United States Patent Application Publication US 2021/0260178 A1 - sequence listing, part 12

SEQ ID NO: 19786 - RNA, 2021 nt, Artificial Sequence
  mRNA product Design a-2 (hSL-A64-N5) comprising derived and/or modified sequence from LASV(LASV1000-NIG-2009;Clade II)__AIT17783__SP-HsALB_NP(2-569) (opt1)
aggagaguccgcucagccagguugcagaagcggcuuagcguguguccuaaucuucucucugcguguagguaggccugugccgcaaacaagcuuaccaugaagugggugaccuucaucagccugcucuuccuguucuccagcgccuacuccagcgccuccaaggaggugaaguccuuccuguggacccagagccuccgccgggagcugagcggcuacugcuccaacaucaagcugcaggucgugaaggacgcccaggcgcuccugcacgggcuggacuucagcgagguguccaacguccagcgccucaugcggaagcagaagcgcgacgacagcgaccugaagcggcugcgcgaccucaaccaggccgugaacaaccugguggagcugaaguccacccagcagaaguccauccuccgggucggcacgcugaccagcgacgaccugcucacccuggccgccgaccuggagaagcucaagagcaaggugauccgcaccgagcggccccuguccagcgggguguacaugggcaaccuguccacgcagcagcucgagcagcgccgggcccugcugaacaugaucgggauggucggcggcgcgcaggggacccagccgggccgcgacgggguggugcgggucugggacgugaagaaccccgaccuccugaacaaccaguucggcaccaugcccagccugacccucgccugccugacgaagcagggccagguggaccugaacgacgucgugcucgcccugaccgaccuggggcucaucuacaccgccaaguaccccaacuccagcgaccuggaccgccugucccagagccacccgauccucaacaugguggacaccaagaaguccagccugaacaucagcggcuacaacuucucccugggggcggccgucaaggccggcgccugcaugcucgacgggggcaacaugcuggagacgaucaaggugacgccccagaccauggacggcauccucaagagcauccugaaggugaagaagucccuggggauguucgucagcgacacccccggcgagcggaaccccuacgagaacauccuguacaagaucugccucuccggggacggcuggccguacaucgccagccgcaccuccaucguggggcgggcgugggagaacaccaccguggaccuggagagcgacggcaagccccagaaggucggcaccgccggguccaacaagagccugcaguccgccggcuuccccacggggcucaccuacagccagcugaugacccugaaggacuccaugaugcagcuggaccccagcgccaagaccuggaucgacaucgagggccgcccggaggaccccguggagaucgcccucuaccagcccgucuccgggugcuacauccacuucuuccgggagcccacggaccugaagcaguucaagcaggacgcgaaguacagccacggcaucgacguggccgaccuguucccggcccagcccggccucaccuccgccgugaucgaggcccugccccgcaacaugguccugaccugccaggggagcgacgacaucaagcggcuccuggacagccagggccgccgcgacaucaagcugaucgacaucgcgcucuccaaggccgacagccggcgcuucgagaacgccgugugggaccagugcaaggaccugugccacaugcacaccgggguggucguggagaagaagaagcggggcgggaaggaggagaucacgccccacugcgcccugauggacugcaucauguacgacgccgcgguguccggcggccucaacaucccgguccugcgcgccgugcugccccgggacaugguguuccgcaccagcucccccaaggucgugcucugaggacuagucccuguucccagagcccacuuuuuuuucuuuuuuugaaauaaaauagccugucuuucagaucucaaaggcucuuuucagagccaccaaaaaaaaaaaaaaaaaaaaaaaaaaaaaaaaaaaaaaaaaaaaaaaaaaaaaaaaaaaaaaaaagaauu

SEQ ID NO: 19787 - RNA, 2021 nt, Artificial Sequence
  mRNA product Design a-2 (hSL-A64-N5) comprising derived and/or modified sequence from LASV(LASV221-NIG-2010;Clade II)__AIT17625__SP-HsALB_NP(2-569) (opt1)
aggagaguccgcucagccagguugcagaagcggcuuagcguguguccuaaucuucucucugcguguagguaggccugugccgcaaacaagcuuaccaugaagugggugaccuucaucagccugcucuuccuguucuccagcgccuacuccagcgccuccaaggaggugaaguccuuccuguggacccagagccuccgccgggagcugagcggcuacugcuccagcaucaagcugcaggucgugaaggacgcccaggcgcuccugcacgggcuggacuucuccgaggugagcaacguccagcgccucaugcggaagcagcgccgggacgacuccgaccugaagcgccugcgggaccucaaccaggccgugaacaaccugguggagcucaagagcacccagcagaaguccauccugcgcgucggcacgcugaccagcgacgaccugcucacccuggccgccgaccuggagaagcucaaguccaaggugauccggaccgagcgcccccugagcuccgggguguacaugggcaaccugagcacgcagcagcucgagcagcggcgcgcccugcugaacaugaucgggauggucggcggcgcgcaggggacccagccgggccgggacgggguggugcgcgucugggacgugaagaaccccgaccuccugaacaaccaguucggcaccaugcccucccugacccucgccugccugacgaagcagggccagguggaccugaacgacgccguccucgcccugaccgaccuggggcucaucuacaccgcgaaguaccccaacagcuccgaccuggaccggcugagccagagccacccgauccucaacaugguggacaccaagaaguccagccugaacaucuccggcuacaacuucagccugggggccgccgugaaggccggcgccugcaugcucgacgggggcaacaugcuggagacgaucaaggucacgccccagaccguggacggcauccugaaguccauccucaaggugaagcgcagccuggggauguucgucuccgacacccccggcgagcggaaccccuacgagaacauccuguacaagaucugccucagcggggacggcuggccguacaucgcgucccgcaccagcaucguggggcgggccugggagaacaccaccguggaccuggaguccgacggcaagccccagaaggucggcaccgccgggagcaacaagucccugcagagcgccggcuuccccacggggcucaccuacucccagcugaugacccugaaggacagcaugaugcagcuggaccccuccgccaagaccuggaucgacaucgagggccgcccggaggaccccguggagaucgcgcucuaccagcccaugagcgggugcuacauccacuucuuccgggagcccacggaccugaagcaguucaagcaggacgccaaguacucccacggcaucgacgucgccgaccuguucccggcccagcccggccucaccagcgccgugaucgaggcgcugccccgcaacauggugcugaccugccaggggagcgacgacaucaagcgccuccuggacucccagggccggcgcgacaucaagcugaucgacaucgcccucagcaaggccgacucccggaaguucgagaacgccgucugggaccagugcaaggaccugugccacaugcacaccggggugguggucgagaagaagaagcgcggcgggaaggaggagaucacgccccacugcgcccugauggacugcaucauguacgacgcggccgugagcggcggccucaacaucccggugcugcgggccguccugccccgcgacaugguguuccggaccuccagccccaaggugguccucugaggacuagucccuguucccagagcccacuuuuuuuucuuuuuuugaaauaaaauagccugucuuucagaucucaaaggcucuuuucagagccaccaaaaaaaaaaaaaaaaaaaaaaaaaaaaaaaaaaaaaaaaaaaaaaaaaaaaaaaaaaaaaaaaagaauu

SEQ ID NO: 19788 - RNA, 2021 nt, Artificial Sequence
  mRNA product Design a-2 (hSL-A64-N5) comprising derived and/or modified sequence from LASV(LASV237-NIG-2010;Clade II)__AIT17639__SP-HsALB_NP(2-569) (opt1)
aggagaguccgcucagccagguugcagaagcggcuuagcguguguccuaaucuucucucugcguguagguaggccugugccgcaaacaagcuuaccaugaagugggugaccuucaucagccugcucuuccuguucuccagcgccuacuccagcgccuccaaggaggugaaguccuuccuguggacccagagccuccgccgggagcugagcggcuacugcuccaacaucaagcugcaggucgugaaggacgcccaggcgcuccugcacgggcuggacuucagcgagguguccaacguccagcgccucaugcggaagcagaagcgcgacgacagcgaccugaagcggcugcgcgaccucaaccaggccgugaacaaccugguggagcugaaguccacccagcagaaguccauccuccgggucggcacccugaccagcgacgaccugcucacccuggccgccgaccuggagaagcucaagagcaaggugauccgcaccgagcggccccuguccagcgggguguacaugggcaaccuguccacgcagcagcucgagcagcgccgggcccugcugaacaugaucgggauggucggcggcgcgcaggggacccagccgggccgcgacgggguggugcgggucugggacgugaagaaccccgaccuccugaacaaccaguucggcaccaugcccagccugacccucgccugccugacgaagcagggccagguggaccugaacgacgccguccucgcccugaccgaccuggggcucaucuacaccgcgaaguaccccaacuccagcgaccuggaccgccugucccagagccacccgauccucaacaugguggacaucaagaaguccagccugaacaucagcggcuacaacuucucccugggggccgccgugaaggccggcgccugcaugcucgacgggggcaacaugcuggagaccaucaaggucacgccccagaccauggacggcauccucaagagcauccugaaggugaagcggucccuggggauguucgugagcgacacccccggcgagcgcaaccccuacgagaacauccuguacaagaucugccucuccggggacggcuggccguacaucgcgagccggaccuccaucgucgggcgcgccugggagaacacgaccguggaccuggagagcgacggcaagccccagaaggugggcuccgccgggagcaacaagucccugcagagcgccggcuuccccaccgggcucaccuacucccagcugaugacgcugaaggacagcaugaugcagcuggaccccuccgccaagaccuggaucgacaucgagggccggccggaggaccccgucgagaucgcgcucuaccagcccaugagcgggugcuacauccacuucuuccgcgagcccaccgaccugaagcaguucaagcaggacgccaaguacucccacggcaucgacguggccgaccuguucccggcccagcccggccucaccagcgccgucaucgaggcgcugccccggaacauggugcugacgugccaggggagcgacgacaucaagcgccuccuggacucccagggccgccgggacaucaagcugaucgacaucgcccucagcaaggccgacucccgccgguucgagaacgccgugugggaccagugcaaggaccugugccacaugcacaccggggucgugguggagaagaagaagcgcggcgggaaggaggagaucacgccccacugcgcccugauggacugcaucauguacgacgcggccgucagcggcggccucaacaucccggugcugcgggccgugcugccccgcgacauggucuuccggaccuccagccccaagguggugcucugaggacuagucccuguucccagagcccacuuuuuuuucuuuuuuugaaauaaaauagccugucuuucagaucucaaaggcucuuuucagagccaccaaaaaaaaaaaaaaaaaaaaaaaaaaaaaaaaaaaaaaaaaaaaaaaaaaaaaaaaaaaaaaaaagaauu

SEQ ID NO: 19789 - RNA, 2021 nt, Artificial Sequence
  mRNA product Design a-2 (hSL-A64-N5) comprising derived and/or modified sequence from LASV(LASV253-NIG-2011;Clade II)__AIT17671__SP-HsALB_NP(2-569) (opt1)
aggagaguccgcucagccagguugcagaagcggcuuagcguguguccuaaucuucucucugcguguagguaggccugugccgcaaacaagcuuaccaugaagugggugaccuucaucagccugcucuuccuguucuccagcgccuacuccagcgccuccaaggaggugaaguccuuccuguggacccagagccuccgccgggagcugagcggcuacugcuccagcaucaagcugcaggucgugaaggacgcccaggcgcuccugcacgggcuggacuucuccgaggugagcaacguccagcgccucaugcggaagcagaagcgcgacgacuccgaccugaagcggcugcgcgaccucaaccaggccgugaacaaccugguggagcucaagagcacccagcagaaguccguccugcgggugggcacccugaccagcgacgaccugcucacccuggccgccgaccuggagaagcucaaguccaaggugauccgcaccgagcggccccugagcuccggggucuacaugggcaaccugagcacgcagcagcucgagcagcgccgggcccugcugaacaugaucgggauggugggcggcgcgcaggggacccagccgggccgcgacggggugguccgggugugggacgugaagaaccccgaccuccugaacaaccaguucggcaccaugcccucccugacccucgccugccugacgaagcaggggcaggucgaccugaacgacguggugcucgcccugaccgaccugggccucaucuacaccgccaaguaccccaacagcuccgaccuggaccgccugagccagagccacccgauccucaacauggucgacaccaagaaguccagccugaacaucuccggcuacaacuucagccugggggcggccgugaaggccggcgccugcaugcucgacgggggcaacaugcuggagacgaucaaggugacgccccagaccauggacggcauccugaaguccauccucaaggucaagaagucccuggggauguucgugagcgacacccccggcgagcggaaccccuacgagaacauccuguacaagaucugccucagcggggacggcuggccguacaucgccucccgcaccagcaucguggggcgggcgugggagaacaccaccgucgaccuggaguccgacggcaagccccagaaggugggcaccgccgggagcaacaagucccugcagagcgccggcuuccccacggggcucaccuacucccagcugaugacccugaaggacagcaugaugcagcuggaccccuccgccaagaccuggaucgacaucgagggccgcccggaggaccccgucgagaucgcccucuaccagcccaugagcgggugcuacauccacuucuuccgggagcccacggaccugaagcaguucaagcaggacgcgaaguacucccacggcaucgacgugaccgaccuguucccggcccagcccggccucaccagcgccgugaucgaggcccugccccgcaacaugguccugaccugccaggggagcgacgacaucaagcggcuccuggacucccagggccgccgcgacaucaagcugaucgacaucgcccucagcaaggcggacucccggcgcuucgagaacgccgugugggaccagugcaaggaccugugccacaugcacacggggguggucguggagaagaagaagcggggcgggaaggaggagaucacgccccacugcgcccugauggacugcaucauguacgacgccgccgugagcggcggccucaacaucccgguccugcgcgcggugcugccccgggacaugguguuccgcaccuccagccccaaggucgugcucugaggacuagucccuguucccagagcccacuuuuuuuucuuuuuuugaaauaaaauagccugucuuucagaucucaaaggcucuuuucagagccaccaaaaaaaaaaaaaaaaaaaaaaaaaaaaaaaaaaaaaaaaaaaaaaaaaaaaaaaaaaaaaaaaagaauu

SEQ ID NO: 19790 - RNA, 2021 nt, Artificial Sequence
  mRNA product Design a-2 (hSL-A64-N5) comprising derived and/or modified sequence from LASV(LASV254-NIG-2011;Clade II)__AIT17675__SP-HsALB_NP(2-569) (opt1)
aggagaguccgcucagccagguugcagaagcggcuuagcguguguccuaaucuucucucugcguguagguaggccugugccgcaaacaagcuuaccaugaagugggugaccuucaucagccugcucuuccuguucuccagcgccuacuccagcgccuccaaggaggugaaguccuuccuguggacccagagccuccgccgggagcugagcggcuacugcuccagcaucaagcugcaggucgugaaggacgcccaggcgcuccugcacgggcuggacuucuccgaggugagcaacguccagcgccucaugcggaagcagaagcgcgacgacuccgaccugaagcggcugcgcgaccucaaccaggccgugaacaaccugguggagcucaagagcacccagcagaaguccguccugcgggugggcacgcugaccagcgacgaccugcucacccuggccgccgaccuggagaagcucaaguccaaggugauccgcaccgagcggccccugagcuccggggucuacaugggcaaccugagcacgcagcagcucgagcagcgccgggcccugcugaacaugaucgggauggugggcggcgcgcaggggacccagccgggccgcgacggggugguccgggugugggacgugaagaaccccgaccuccugaacaaccaguucggcaccaugcccucccugacccucgccugccugacgaagcaggggcaggucgaccugaacgacgccgugcucgcccugaccgaccugggccucaucuacaccgcgaaguaccccaacagcuccgaccuggaccgccugagccagagccacccgauccucaacaugguggacaccaagaaguccagccugaacaucuccggcuacaacuucagccugggggccgccgucaaggccggcgccugcaugcucgacgggggcaacaugcuggagacgaucaaggugacgccccagaccauggacggcauccugaaguccauccucaaggugaagaagucccuggggauguucgucagcgacacccccggcgagcggaaccccuacgagaacauccuguacaagaucugccucagcggggacggcuggccguacaucgcgucccgcaccagcaucguggggcgggccugggagaacaccaucguggaccuggaguccgacggcaagccccagaaggucggcaccgccgggagcaacaagucccugcagagcgccggcuuccccaccgggcucacguacucccagcugaugacccugaaggacagcaugaugcagcuggaccccuccgccaagaccuggaucgacaucgagggccgcccggaggaccccguggagaucgcgcucuaccagcccaugagcgggugcuacauccacuucuuccgggagcccaccgaccugaagcaguucaagcaggacgccaaguacucccacggcaucgacgucgccgaccuguucccggcccagcccggccucacgagcgccgugaucgaggcgcugccccgcaacauggugcugaccugccaggggagcgacgacaucaagcggcuccuggacucccagggccgccgcgacaucaagcugaucgacaucgcccucagcaaggccgacucccggcgcuucgagaacgccgucugggaccagugcaaggaccugugccacaugcacaccggggugguggucgagaagaagaagcggggcgggaaggaggagaucacgccccacugcgcccugauggacugcaucauguacgacgcggccgugagcggcggccucaacaucccggugcugcgcgccguccugccccgggacaugguguuccgcaccuccagccccaaggugguccucugaggacuagucccuguucccagagcccacuuuuuuuucuuuuuuugaaauaaaauagccugucuuucagaucucaaaggcucuuuucagagccaccaaaaaaaaaaaaaaaaaaaaaaaaaaaaaaaaaaaaaaaaaaaaaaaaaaaaaaaaaaaaaaaaagaauu

SEQ ID NO: 19791 - RNA, 2021 nt, Artificial Sequence
  mRNA product Design a-2 (hSL-A64-N5) comprising derived and/or modified sequence from LASV(Nig08-04;Clade II)__ADU56611__SP-HsALB_NP(2-569) (opt1)
aggagaguccgcucagccagguugcagaagcggcuuagcguguguccuaaucuucucucugcguguagguaggccugugccgcaaacaagcuuaccaugaagugggugaccuucaucagccugcucuuccuguucuccagcgccuacuccagcgccuccaaggaggugaaguccuuccuguggacccagagccuccgccgggagcugagcggcuacugcuccaacaucaagcugcaggucgugaaggacgcccaggcgcuccugcacgggcuggacuucagcgagguguccaacguccagcgccucaugcggaagcagaagcgcgacgacggcgaccugaagcggcugcgcgaccucaaccaggccgugaacaaccugguggagcucaagagcacccagcagaaguccguccugcggguggggacccugaccagcgacgaccugcucacccuggccgccgaccuggagaagcucaaguccaaggugauccgcaccgagcggccccugagcuccggcgucuacauggggaaccugagcacgcagcagcucgagcagcgcaaggcccugcuguccaugaucggcauggugggcggggcgcagggcacccagccggggcgggacggcgugguccgcgugugggacgugaagaaccccgaccuccugaacaaccaguucgggaccaugcccagccugacccucgccugccugacgaagcagggccaggucgaccugaacgacgccgugcucgcccugaccgaccugggccucaucuacaccgcgaaguaccccaacuccagcgaccuggaccggcugucccagagccacccgauccucaacaugguggacaccaagaaguccagccugaacaucagcggguacaacuucucccugggcgccgccgucaaggccggggccugcaugcucgacggcggcaacaugcuggagacgaucaaggugacgccccagaccauggacgggauccucaagagcauccugaaggugaagcgcucccugggcauguucgucagcgacacccccggggagcggaaccccuacgagaacauccuguacaagaucugccucuccggcgacggguggccguacaucgcgagccgcaccuccaucgugggccgggccugggagaacaccaccguggaccuggagagcgacggcaagccccagaaggucgggaccgccggcuccaacaagagccugcaguccgccggguuccccacgggccucaccuacagccagcugaugacccugaaggacuccaugaugcagcuggaccccagcgccaagaccuggaucgacaucgaggggcgcccggaggaccccguggagaucgcgcucuaccagcccauguccggcugcuacauccacuucuuccgggagcccacggaccugaagcaguucaagcaggacgccaaguacagccacggcaucgacgucaccgaccuguucuccgcccagccggggcucaccagcgccgugaucgaggcccugccccgcaacauggugcugaccugccagggcagcgacgacaucaagaagcuccuggacucccaggggcggcgcgacaucaagcugaucgacaucagccucaacaaggcggacucccgccgguucgagaacgccgucugggaccagugcaaggaccugugccacaugcacacgggcgugguggucgagaagaagaagcgcgggggcaaggaggagaucacgccccacugcgcccugauggacugcaucauguucgacgccgccgugagcggcgggcucaacauccccauccugcgggcggugcugccgcgcgacauggucuuccggaccuccagccccaagguggugcucugaggacuagucccuguucccagagcccacuuuuuuuucuuuuuuugaaauaaaauagccugucuuucagaucucaaaggcucuuuucagagccaccaaaaaaaaaaaaaaaaaaaaaaaaaaaaaaaaaaaaaaaaaaaaaaaaaaaaaaaaaaaaaaaaagaauu

SEQ ID NO: 19792 - RNA, 2024 nt, Artificial Sequence
  mRNA product Design a-2 (hSL-A64-N5) comprising derived and/or modified sequence from LASV(GA391;Clade III)__AAA46284__SP-HsALB_NP(2-570) (opt1)
aggagaguccgcucagccagguugcagaagcggcuuagcguguguccuaaucuucucucugcguguagguaggccugugccgcaaacaagcuuaccaugaagugggugaccuucaucagccugcucuuccuguucuccagcgccuacuccagcgccuccaaggaggugcgcagcugccuguggacccagucccuccggcgcgagcugagcggcuacugcuccaacaucaagcugcaggucgugaaggacgcccaggcgcuccugcacgggcuggacuucagcgagguguccaacguccagcggcucaugcgcaagcagaagcgggacgacggcgaccugaagcgccugcgggaccucaaccaggccgugaacaaccugguggagcugaaguccacccagcagaaguccguccuccgcguggggacgcugagcuccgacgaccugcucauccuggccgccgaccuggagaagcucaagagcaaggugacccggaccgagcgcccccuguccagcggcgucuacauggggaaccuguccagccagcagcucgaccagcggcgcgcccugcugaacaugaucggcaugaccggcguguccgggggcgggaagggcgcgagcaacgggaucgugcgggucugggacgugaagaacgccgagcuccugaacaaccaguucggcacgaugccgucccugacccucgccugccugaccaagcagggccagguggaccugaacgacgccguccaggcgcucaccgaccuggggcugaucuacacggccaaguaccccaacagcagcgaccucgaccgccugucccagagccaccccauccugaacaugaucgacaccaagaaguccagccucaacaucuccggcuacaacuucagccugggggccgccgugaaggccggcgcgugcaugcuggacggcgggaacaugcucgagaccaucaaggugagcccccagaccauggacggcauccucaagagcauccugaaggucaagaagucccuggggauguucgugagcgacacgccgggcgagcggaaccccuacgagaacauccuguacaagaucugccuguccggggacggcuggagcuacaucgccucccgcaccagcaucgugggccgggccugggagaacaccgucguggaccucgagcaggacaacaagccccagaagaucgggaacggcggguccaacaagagccugcaguccgccggcuucgccgcggggcugaucuacagccagcucaugacccugaaggacuucaagugcuucaaccugauccccaacgccaagacguggauggacaucgagggccgcccggaggaccccguggagaucgcccuguaccagcccuccagcggcugcuacguccacuucuuccgggagcccaccgaccucaagcaguucaagcaggacgccaaguacagccacgggcgcgacgugaccgaccuguucgccgcgcagccgggccugaccuccgccgucaucgaggcccucccccggaacauggugaucacgugccaggggagcgaggacauccgcaagcugcuggagucccagggccgccgggacaucaagcucaucgacaucacccugagcaaggccgacucccgcaaguucgagaacgccgugugggaccaguucaaggaccugugccacaugcacaccggggucgugguggagaagaagaagcggggcggcaaggaggagaucacgccccacugcgcgcucauggacugcaucauguucgacgccgccgucagcgggggccuggacgccaaggugcugcgcgugguccucccccgggacaugguguuccgcaccuccaccccgaaggugguccugugaggacuagucccuguucccagagcccacuuuuuuuucuuuuuuugaaauaaaauagccugucuuucagaucucaaaggcucuuuucagagccaccaaaaaaaaaaaaaaaaaaaaaaaaaaaaaaaaaaaaaaaaaaaaaaaaaaaaaaaaaaaaaaaaagaauu

SEQ ID NO: 19793 - RNA, 2021 nt, Artificial Sequence
  mRNA product Design a-2 (hSL-A64-N5) comprising derived and/or modified sequence from LASV(Nig08-A19;Clade III)__ADU56619__SP-HsALB_NP(2-569) (opt1)
aggagaguccgcucagccagguugcagaagcggcuuagcguguguccuaaucuucucucugcguguagguaggccugugccgcaaacaagcuuaccaugaagugggugaccuucaucagccugcucuuccuguucuccagcgccuacuccagcgccuccaaggaggugaaguccuuccuguggacccagucccuccgccgggagcugagcggcuacugcuccaacaucaagcugcaggucgugaaggacgcccaggcgcuccugcacgggcuggacuucagcgagguguccaacguccagcgccucaugcggaagcagaagcgcgacgacggcgaccugaagcggcugcgcgaccucaaccaggccgugaacaaccugguggagcucaagagcacccagcagaaguccguccugcggguggggacccugagcuccgacgaccugcucgugcuggccgccgaccuggagaagcucaagagcaaggucgugcgcaccgagcggccccuguccagcggcaucuacauggggaaccuguccagccagcagcucgaccagcgcaaggcccugcugaacaugaucggcaugaccggcgggaacggcgggcggaacaccacguccgacggcaucgugcgcgucugggacgugaagaacgcggagcuccugaacaaccaguucgggaccaugccgagccugacccucgccugccugaccaagcagggccagguggaccugaacgacgccguccaggcccucacggaccugggccugaucuacaccgcgaaguaccccaacuccagcgaccucgaccggcuggcccagagccaccccauccugaacaugaucgacaccaagaaguccagccucaacaucuccggguacaacuucagccugggcgccgccgugaaggccggggcgugcaugcuggacggcggcaacaugcucgagaccaucaaggugagcccccagacgauggacgggauccucaagagcauccugaaggucaagcgcucccugggcauguucaucagcgacaccccgggggagcggaaccccuacgagaacauccuguacaagaucugccuguccggcgacggguggcccuacaucgccagccgcaccuccaucgugggccgggccugggagaacaccguggucgaccucgagagcgacaacaagccccagaagacgggcaacgggggcuccaacaagagccugcaguccgccggguucgccgcgggccugaccuacagccagcucaugacccugaaggacuccaugcugcagcuggacccgaacgccaagaccuggauggacaucgaggggcgccccgaggaccccguggagaucgcccucuaccagcccagcuccggcugcuacauccacuucuuccgggagccgacggaccugaagcaguucaagcaggacgccaaguacagccacggcaucgacgugaccgaccuguucgccgcgcagcccgggcucaccagcgccgucaucgaggcccugccccgcaacauggugaucacgugccagggcuccgaggacauccggaagcugcucgagagccaggggcgccgcgacaucaagcugaucgacaucucccugagcaaggucgacucccggaaguucgagaacgccgugugggaccaguucaaggaccucugccacaugcacaccggcaucguggucgagaagaagaagcgcgggggcaaggaggagaucacgccccacugcgcccugauggacugcaucauguucgacgcggccgugagcggcgggguggacgccaagguccugcgggccgugcucccgcgcgacaugguguuccggaccuccacccccaaggucgugcugugaggacuagucccuguucccagagcccacuuuuuuuucuuuuuuugaaauaaaauagccugucuuucagaucucaaaggcucuuuucagagccaccaaaaaaaaaaaaaaaaaaaaaaaaaaaaaaaaaaaaaaaaaaaaaaaaaaaaaaaaaaaaaaaaagaauu

SEQ ID NO: 19794 - RNA, 2021 nt, Artificial Sequence
  mRNA product Design a-2 (hSL-A64-N5) comprising derived and/or modified sequence from LASV(G1180-SLE-2010;Clade IV)__AIT17169__SP-HsALB_NP(2-569) (opt1)
aggagaguccgcucagccagguugcagaagcggcuuagcguguguccuaaucuucucucugcguguagguaggccugugccgcaaacaagcuuaccaugaagugggugaccuucaucagccugcucuuccuguucuccagcgccuacuccagcgccuccaaggagaucaagagcuuccuguggacccagucccuccgccgggagcugagcggcuacugcuccaacaucaagcuccagguggucaaggacgcccaggcgcugcugcacgggcuggacuucagcgagguguccaacgugcagcgccucaugcggaaggagcgccgggacgacaacgaccugaagcgccugcgggaccucaaccaggccgucaacaaccugguggagcucaagagcacccagcagaaguccauccugcgcgugggcacccugaccagcgacgaccugcucauccuggccgccgaccuggagaagcucaaguccaaggucauccggaccgagcgcccccugagcgccgggguguacaugggcaaccuguccagccagcagcucgaccagcggcgcgcgcugcuguccaugaucgggaugagcuccggcaaccagcgggcccaggccggccgcgacggggugguccgggugugggacgugaagaacgucgagcuccugaacaaccaguucggcaccaugccgagccugacgcucgccugccugaccaagcagggccagguggaccugaacgacgcggugcaggcccucaccgaccuggggcugaucuacaccgccaaguaccccaacacguccgaccucgaccgccugacccagagccaccccauccugaacaugaucgacaccaagaaguccagccucaacaucagcggguacaacuucucccugggcgccgccgucaaggcgggcgccugcaugcuggacgggggcaacaugcucgagaccaucaaggugagcccccagacgauggacgggauccugaaguccauccugaaggugaagaaggcccucggcauguucaucagcgacaccccgggcgagcggaaccccuacgagaacauccuguacaagaucugccuguccggggacggcuggcccuacaucgccagccgcaccuccaucaccgggcgggccugggagaacacggucguggaccucgagagcgacggcaagccccagaaggcgggguccaacaacagcaacaagucccugcagagcgugggcuucaccgccggccugaccuacucccagcucaugacccugaaggacgccaugcugcagcuggacccgaacgccaagacguggauggacaucgaggggcgccccgaggaccccgucgagaucgcccucuaccagcccagcuccggcugcuacauccacuucuuccgggagccgaccgaccugaagcaguucaagcaggacgcgaaguacagccacgggaucgacgugaccgaccuguucgccgcccagcccggccucaccuccgccgugaucgacgcccugccccgcaacauggucaucacgugccaggggagcgacgacauccgcaagcugcucgagagccagggccggaaggacaucaagcugaucgacaucgcgcuguccaagaccgacagccgcaaguacgagaacgccgugugggaccaguacaaggaccucugccacaugcacaccggcgucgugguggagaagaagaagcgcgggggcaaggaggagaucacgccccacugcgcccugauggacugcaucauguucgacgccgcggucuccgggggccugaacaccagcgugcuccgggccgugcugccgcgggacauggucuuccgcaccuccacgccccggguggugcugugaggacuagucccuguucccagagcccacuuuuuuuucuuuuuuugaaauaaaauagccugucuuucagaucucaaaggcucuuuucagagccaccaaaaaaaaaaaaaaaaaaaaaaaaaaaaaaaaaaaaaaaaaaaaaaaaaaaaaaaaaaaaaaaaagaauu

SEQ ID NO: 19795 - RNA, 2021 nt, Artificial Sequence
  mRNA product Design a-2 (hSL-A64-N5) comprising derived and/or modified sequence from LASV(G1442-SLE-2011;Clade IV)__AIT17181__SP-HsALB_NP(2-569) (opt1)
aggagaguccgcucagccagguugcagaagcggcuuagcguguguccuaaucuucucucugcguguagguaggccugugccgcaaacaagcuuaccaugaagugggugaccuucaucagccugcucuuccuguucuccagcgccuacuccagcgccuccaaggaggugaaguccuuccuguggacccagagccuccgccgggagcugagcggcuacugcuccaacaucaagcugcaggucgugaaggacgcccaggcgcuccugcacgggcuggacuucagcgagguguccaacguccagcgccucaugcggaagcagcgccgggacgacaacgaccugaagcgccugcgggaccucaaccaggccgugaacaaccugguggagcucaagagcacccagcagaaguccguccugcgcgugggcacccugaccagcgacgaccugcucgugcuggccgccgaccuggagaagcucaaguccaaggucauccggaccgagcgcccccugagcgccgggguguacaugggcaaccuguccagccagcagcucgaccagcggcgcgcgcugcugaacaugaucgggauguccggcggcauccaggggacccggacgggccgcgacggggugguccgggugugggacgugaagaacgccgaccuccugaacaaccaguucggcaccaugccgagccugacccucgccugccugaccaagcaggggcaggucgaccugaacgacguggugcaggcccucacggaccugggccugaucuacaccgcgaaguaccccaacgccuccgaccucgaccgccugacccagagccaccccauccugaacaugaucgacaccaagaaguccagccucaacaucagcggcuacaacuucucccugggggccgccgucaaggccggcgcgugcaugcuggacgggggcaacaugcucgagacgaucaaggugagcccccagaccauggacggcauccugaaguccauccugaaggugaagaagacccucgggauguucaucagcgacaccccgggcgagcggaaccccuacgagaacauccuguacaagaucugccuguccggggacggcuggcccuacaucgccagccgcacguccaucaccgggcgggccugggagaacaccgucguggaccucgagagcgacggcaagccccagaaggccggcuccaacaacagcaacaagucccugcagagcgccggguucgcggccggccugaccuacucccagcucaugacgcugaaggacgccaugcugcagcuggacccgaacgccaagaccuggauggacaucgaggggcgccccgaggaccccguggagaucgcccucuaccagcccagcuccggcugcuacauccacuucuuccgggagccgaccgaccugaagcaguucaagcaggacgcgaaguacagccacgggaucgacgucaccgaccuguucgccgcccagcccggccucacguccgccgugaucgaggcccugccccgcaacauggucaucacgugccagggcagcgacgacaucaagaagcugcucgagucccaggggcgcaaggacaucaagcugaucgacaucgcgcugagcaagaccgacagccggaaguacgagaacgccgugugggaccaguacaaggaccucugccacaugcacaccggcguggucguggagaagaagaagcgcgggggcaaggaggagaucaccccgcacugcgcccugauggacugcaucauguucgacgccgcgguguccgggggccugaacacccucguccugcgggccgugcugccccgcgacaugguguuccggaccagcacgccccgcgucgugcucugaggacuagucccuguucccagagcccacuuuuuuuucuuuuuuugaaauaaaauagccugucuuucagaucucaaaggcucuuuucagagccaccaaaaaaaaaaaaaaaaaaaaaaaaaaaaaaaaaaaaaaaaaaaaaaaaaaaaaaaaaaaaaaaaagaauu

SEQ ID NO: 19796 - RNA, 2021 nt, Artificial Sequence
  mRNA product Design a-2 (hSL-A64-N5) comprising derived and/or modified sequence from LASV(G3010-SLE-2013;Clade IV)__AIT17345__SP-HsALB_NP(2-569) (opt1)
aggagaguccgcucagccagguugcagaagcggcuuagcguguguccuaaucuucucucugcguguagguaggccugugccgcaaacaagcuuaccaugaagugggugaccuucaucagccugcucuuccuguucuccagcgccuacuccagcgccuccaaggagaucaagagcuuccuguggacccagucccuccgccgggagcugagcggcuacugcuccaacaucaagcuccagguggucaaggacgcccaggcgcugcugcacgggcuggacuucagcgagguguccaacgugcagcgccucaugcggaaggagcgccgggacgacaacgaccugaagcgccugcgggaccucaaccaggccgucaacaaccugguggagcucaagagcacccagcagaaguccauccugcgcgugggcacccugaccagcgacgaccugcucauccuggccgccgaccuggagaagcucaaguccaaggucacccggaccgagcgcccccugagcgccgggguguacaugggcaaccuguccagccagcagcucgaccagcggcgcgcgcugcuguccaugaucgggaugagcuccggcgugcagggcgcccgggccgggcgcgacggcgucgugcgggugugggacgucaagaacgccgagcuccugaacaaccaguucgggacgaugccgagccugacccucgcgugccugaccaagcagggccagguggaccugaacgacgugguccaggcccucaccgaccuggggcugaucuacacggccaaguaccccaacaccuccgaccucgaccgccugacccagagccaccccauccugaacaugaucgacaccaagaaguccagccucaacaucagcggcuacaacuucucccugggcgccgccgugaaggcgggggccugcaugcuggacggcgggaacaugcucgagacgaucaaggugagcccccagaccauggacggcauccugaaguccauccugaaggucaagaaggcccucggcauguucaucagcgagaccccgggggagcggaaccccuacgagaacauccuguacaagaucugccuguccggcgacggguggcccuacaucgccagccgcaccuccaucacgggccgggccugggagaacaccgugguggaccucgagagcgacgggaagccccagaaggcgggcuccaacaacagcaacaagucccugcagagcgccggcuucaccgccgggcugaccuacucccagcucaugacgcugaaggacgccaugcugcagcuggacccgaacgccaagaccuggauggacaucgagggccgccccgaggaccccgucgagguggcgcucuaccagcccagcuccgggugcuacauccacuucuuccgggagccgaccgaccugaagcaguucaagcaggacgccaaguacagccacggcaucgacgugaccgaccuguucgccgcccagcccgggcucacguccgccgucaucgacgcgcugccccgcaacauggugaucacgugccagggcagcgacgacaucaagaagcugcucgagagccagggccgcaaggacaucaagcugaucgacaucgcccuguccaagaccgacagccggaaguacgagaacgccgucugggaccaguacaaggaccucugccacaugcacaccggggugguggucgagaagaagaagcgcggcgggaaggaggagaucaccccgcacugcgcccugauggacugcaucauguucgacgcggccguguccggcgggcugaacaccagcgugcuccgggccguccugccccgcgacaugguguuccggaccuccacgccccgcgugguccugugaggacuagucccuguucccagagcccacuuuuuuuucuuuuuuugaaauaaaauagccugucuuucagaucucaaaggcucuuuucagagccaccaaaaaaaaaaaaaaaaaaaaaaaaaaaaaaaaaaaaaaaaaaaaaaaaaaaaaaaaaaaaaaaaagaauu

SEQ ID NO: 19797 - RNA, 2021 nt, Artificial Sequence
  mRNA product Design a-2 (hSL-A64-N5) comprising derived and/or modified sequence from LASV(G502-SLE-2009;Clade IV)__AIT17127__SP-HsALB_NP(2-569) (opt1)
aggagaguccgcucagccagguugcagaagcggcuuagcguguguccuaaucuucucucugcguguagguaggccugugccgcaaacaagcuuaccaugaagugggugaccuucaucagccugcucuuccuguucuccagcgccuacuccagcgccuccaaggagaucaagagcuuccuguggacccagucccuccgccgggagcugagcggcuacugcuccaacaucaagcuccagguggucaaggacgcccaggcgcugcugcacgggcuggacuucagcgagguguccaacgugcagcgccucaugcggaaggagcgccgggacgacaacgaccugaagcgccugcgggaccucaaccaggccgucaacaaccugguggagcucaagagcacccagcagaaguccauccugcgcgugggcacccugaccagcgacgaccugcucauccuggccgccgaccuggagaagcucaaguccaaggucauccggaccgagcgcccccugagcgccgggguguacaugggcaaccuguccagccagcagcucgaccagcggcgcgcgcugcuguccaugaucgggaugagcggcggcaaccagggggugcgggccggcaaggacggggucgugcgcgugugggacgucaagaacgccgagcuccugaacaaccaguucggcaccaugccgucccugacgcucgccugccugaccaagcagggccagguggaccugaacgacgcggugcaggcccucaccgaccuggggcugaucuacaccgccaaguaccccaacacgagcgaccucgaccggcugacccagucccaccccauccugaacaugaucgacaccaagaaguccagccucaacaucuccggcuacaacuucagccugggggccgccgucaaggcgggcgccugcaugcuggacgggggcaacaugcucgagaccaucaaggugagcccccagacgauggacggcauccucaagagcauccugaaggugaagaaggcccuggggauguucaucuccgacaccccgggcgagcgcaaccccuacgagaacauccuguacaagaucugccugagcggggacggcuggcccuacaucgccucccggaccagcaucaccgggcgcgccugggagaacacggucguggaccucgaguccgacggcaagccccagaaggcgggcagcaacaacuccaacaagagccugcaguccgccggguucaccgccggccugaccuacagccagcucaugacccugaaggacgccaugcugcagcuggacccgaacacgaagaccuggauggacaucgaggggcggcccgaggaccccguggagaucgcccucuaccagcccuccagcggcugcuacauccacuucuuccgcgagccgaccgaccugaagcaguucaagcaggacgcgaaguacucccacgggaucgacgucaccgaccuguucgccgcccagcccggccucacgagcgccgugaucgacgcccugccccggaacauggugaucacgugccagggcuccgacgacauccgcaagcugcucgagagccaggggcgcaaggacaucaagcugaucgacaucgcgcugaacaagaccgacagccggaaguacgagaacgccgucugggaccaguacaaggaccucugccacaugcacaccggcguggucguggagaagaagaagcgcgggggcaaggaggagaucaccccgcacugcgcccugauggacugcaucauguucgacgccgcgguguccgggggccugaacaccagcguccuccgggccgugcugccccgcgacaugguguuccggaccuccacgccccgcgucgugcugugaggacuagucccuguucccagagcccacuuuuuuuucuuuuuuugaaauaaaauagccugucuuucagaucucaaaggcucuuuucagagccaccaaaaaaaaaaaaaaaaaaaaaaaaaaaaaaaaaaaaaaaaaaaaaaaaaaaaaaaaaaaaaaaaagaauu

SEQ ID NO: 19798 - RNA, 2021 nt, Artificial Sequence
  mRNA product Design a-2 (hSL-A64-N5) comprising derived and/or modified sequence from LASV(G733-SLE-2010;Clade IV)__AIT17155__SP-HsALB_NP(2-569) (opt1)
aggagaguccgcucagccagguugcagaagcggcuuagcguguguccuaaucuucucucugcguguagguaggccugugccgcaaacaagcuuaccaugaagugggugaccuucaucagccugcucuuccuguucuccagcgccuacuccagcgccuccaaggagaucaagagcuuccuguggacccagucccuccgccgggagcugagcggcuacugcuccaacaucaagcuccagguggucaaggacgcccaggcgcugcugcacgggcuggacuucagcgagguguccaacgugcagcgccucaugcggaaggagcgccgggacgacaacgaccugaagcgccugcgggaccucaaccaggccgucaacaaccugguggagcucaagagcacccagcagaaguccgugcugcgcgucggcacccugaccagcgacgagcugcucgugcuggccgccgaccuggagaagcucaaguccaaggugauccggaccgagcgcccccugagcgccggggucuacaugggcaaccuguccagccagcagcucgaccagcggcgcgcgcugcuguccaugaucgggaugagcggcggcaaccagggggcccggaccggccgcgacgggguggugcgggucugggacgugaagaacgccgagcuccugaacaaccaguucggcaccaugccgucccugacccucgccugccugaccaagcagggccagguggaccugaacgacgcgguccaggcccucaccgaccuggggcugaucuacacggccaaguaccccaacaccagcgaccucgaccgccugacccagucccaccccauccugaacaugaucgacaccaagaaguccagccucaacaucuccggcuacaacuucagccugggggccgccgugaaggcgggcgccugcaugcuggacgggggcaacaugcucgagacgaucaaggugagcccccagaccauggacggcauccucaagagcauccugaaggucaagaaggcccuggggauguucaucuccgacaccccgggcgagcggaaccccuacgagaacauccuguacaagaucugccugagcggggacggcuggcccuacaucgccucccgcaccagcaucacggggcgggccugggagaacaccgugguggaccucgaguccgacggcaagccccagaaggcgggcagcaacaacuccaacaagagccugcaguccgccggguucaccgccggccugaccuacagccagcucaugacgcugaaggacgccaugcugcagcuggacccgaacgccaagaccuggauggacaucgaggggcgccccgaggaccccgucgagaucgcgcucuaccagcccuccagcggcugcuacauccacuucuuccgggagccgaccgaccugaagcaguucaagcaggacgccaaguacucccacgggaucgacgugaccgaccuguucgccgcccagcccggccucacgagcgccgugaucgacgcgcugccccgcaacauggucaucacgugccagggcuccgacgacauccgcaagcugcucgagagccaggggcggaaggacaucaagcugaucgacaucgcccugagcaagaucgacucccgcaaguacgagaacgccgugugggaccaguacaaggaccucugccacaugcacaccggcgucgugguggagaagaagaagcgcgggggcaaggaggagaucacgccccacugcgcccugauggacugcaucauguucgacgcggccgucagcgggggccugaacucccucgugcugcgggccgugcugccgcgggacauggucuuccgcaccagcacgccccggguggugcucugaggacuagucccuguucccagagcccacuuuuuuuucuuuuuuugaaauaaaauagccugucuuucagaucucaaaggcucuuuucagagccaccaaaaaaaaaaaaaaaaaaaaaaaaaaaaaaaaaaaaaaaaaaaaaaaaaaaaaaaaaaaaaaaaagaauu

SEQ ID NO: 19799 - RNA, 2021 nt, Artificial Sequence
  mRNA product Design a-2 (hSL-A64-N5) comprising derived and/or modified sequence from MOPV/LASV reassortant(IGS-1;Clade IV)__AFY05578__SP-HsALB_NP(2-569) (opt1)
aggagaguccgcucagccagguugcagaagcggcuuagcguguguccuaaucuucucucugcguguagguaggccugugccgcaaacaagcuuaccaugaagugggugaccuucaucagccugcucuuccuguucuccagcgccuacuccagcgccuccaaggagaucaagagcuuccuguggacccagucccuccgccgggagcugagcggcuacugcuccaacaucaagcuccagguggucaaggacgcccaggcgcugcugcacgggcuggacuucagcgagguguccaacgugcagcgccucaugcggaaggagcgccgggacgacaacgaccugaagcgccugcgggaccucaaccaggccgucaacaaccugguggagcucaagagcacccagcagaaguccauccugcgcgugggcacccugaccagcgacgaccugcucauccuggccgccgaccuggagaagcuccgguccaaggucauccgcaccgagcggccccugagcgccgggguguacaugggcaaccuguccagccagcagcucgaccagcgccgggcgcugcugaacaugaucgggauguccggcggcaaccagggggcccgcgccggccgggacggggugguccgcgugugggacgugaagaacgccgagcuccugagcaaccaguucggcaccaugccgucccugacgcucgcgugccugaccaagcaggggcaggucgaccugaacgacgccgugcaggcccucaccgaccugggccugaucuacaccgccaaguaccccaacacgagcgaccucgaccggcugacccagucccaccccauccugaacaugaucgacaccaagaaguccagccucaacaucuccggcuacaacuucagccugggggccgcggugaaggccggcgccugcaugcuggacgggggcaacaugcucgagaccaucaaggucagcccccagacgauggacggcauccucaagagcauccugaaggugaagaaggcccuggggauguucaucuccgacaccccgggcgagcgcaaccccuacgagaacauccuguacaagaucugccugagcggggacggcuggcccuacaucgccucccggaccagcaucaccgggcgcgcgugggagaacacgguggucgaccucgaguccgacggcaagccccagaaggccgacagcaacaacuccagcaagucccugcagagcgccggcuucaccgccgggcugaccuacucccagcucaugacccugaaggacgccaugcugcagcuggacccgaacgcgaagacguggauggacaucgagggccggcccgaggaccccguggagaucgcccucuaccagcccagcuccgggugcuacauccacuucuuccgcgagccgaccgaccugaagcaguucaagcaggacgccaaguacagccacggcaucgacgugaccgaccuguucgccacccagcccgggcucacguccgccgucaucgacgcgcugccccgcaacauggugaucacgugccagggcagcgacgacauccggaagcugcucgagagccagggccgcaaggacaucaagcugaucgacaucgaccuguccaagaccgacagccggaaguacgagaacgccgugugggaccaguacaaggaccucugccacaugcacaccggggucguggucgagaagaagaagcgcggcgggaaggaggagaucaccccgcacugcgcccugauggacugcaucauguucgacgccgcgguguccggcgggcugaacaccagcgugcuccgggccguccugccccgcgacaugguguuccggaccuccacgccccgcgugguccugugaggacuagucccuguucccagagcccacuuuuuuuucuuuuuuugaaauaaaauagccugucuuucagaucucaaaggcucuuuucagagccaccaaaaaaaaaaaaaaaaaaaaaaaaaaaaaaaaaaaaaaaaaaaaaaaaaaaaaaaaaaaaaaaaagaauu

SEQ ID NO: 19800 - RNA, 2021 nt, Artificial Sequence
  mRNA product Design a-2 (hSL-A64-N5) comprising derived and/or modified sequence from LASV(LM765-SLE-2012;Clade IV)__AIT17815__SP-HsALB_NP(2-569) (opt1)
aggagaguccgcucagccagguugcagaagcggcuuagcguguguccuaaucuucucucugcguguagguaggccugugccgcaaacaagcuuaccaugaagugggugaccuucaucagccugcucuuccuguucuccagcgccuacuccagcgccuccaaggagaucaagagcuuccuguggacccagucccuccgccgggagcugagcggcuacugcuccaacaucaagcuccagguggucaaggacgcccaggcgcugcugcacgggcuggacuucagcgagguguccaacgugcagcgccucaugcggaaggagcgccgggacgacaacgaccugaagcgccugcgggaccucaaccaggccgucaacaaccugguggagcucaagagcacccagcagaaguccauccugcgcgugggcacccugaccagcgacgaccugcucauccuggccgccgaccuggagaagcucaaguccaaggucacccggaccgagcgcccccugagcgccgggguguacaugggcaaccuguccagccagcagcucgaccagcggcgcgcgcugcuggacaugaucgggauguccggcagcaaccagggcgcccgggccgggcgcgacggcgugguccgggugugggacgugaagaacgccgagcuccugaacaaccaguucgggacgaugccgucccugacccucgcgugccugaccaagcagggccaggucgaccugaacgacgccgugcaggcccucaccgaccuggggcugaucuacacggccaaguaccccaacaccagcgaccucgaccgccugacccagucccaccccauccugaacaugaucgacaccaagaaguccagccucaacaucuccggcuacaacuucagccugggcgccgcggugaaggccggggccugcaugcuggacggcgggaacaugcucgagacgaucaaggucagcccccagaccauggacggcauccucaagagcauccugaaggugaagaaggcccugggcauguucaucuccgacgccccgggggagcggaaccccuacgagaacauccuguacaagaucugccugagcggcgacggguggcccuacaucgcgucccgcaccagcaucaccggccgggccugggagaacacgguggucgaccucgaguccgacgggaagccccagaaggccggcagcaacggcuccaacaagagccugcaguccgccggguucaccgccggccugaccuacagccagcucaugacccugaaggacgcgaugcugcagcuggacccgaacgccaagacguggauggacaucgaggggcgccccgaggaccccguggagaucgcccucuaccagcccuccagcggcugcuacauccacuucuuccgggagccgaccgaccugaagcaguucaagcaggacgccaaguacucccacgggaucgacgugaccgaccuguucgccgcgcagcccggccucaccagcgccgucaucgacgcccugccccgcaacauggugaucacgugccagggcuccgacgacauccgcaagcuguucgagagccaggggcggaaggacaucaagcucaucgacaucgcccugagcaagaccgacucccgcaaguacgagaacgcggugugggaccaguacaaggaccugugccacaugcacaccggcaucgucguggagaagaagaagcgcgggggcaaggaggagaucacgccccacugcgcccucauggacugcaucauguucgacgccgccgucagcgggggccugaacaccuccgugcugcgggccgugcucccgcgggacauggucuuccgcaccagcacgccccggguggugcugugaggacuagucccuguucccagagcccacuuuuuuuucuuuuuuugaaauaaaauagccugucuuucagaucucaaaggcucuuuucagagccaccaaaaaaaaaaaaaaaaaaaaaaaaaaaaaaaaaaaaaaaaaaaaaaaaaaaaaaaaaaaaaaaaagaauu

SEQ ID NO: 19801 - RNA, 2021 nt, Artificial Sequence
  mRNA product Design a-2 (hSL-A64-N5) comprising derived and/or modified sequence from LASV(LM776-SLE-2012;Clade IV)__AIT17825__SP-HsALB_NP(2-569) (opt1)
aggagaguccgcucagccagguugcagaagcggcuuagcguguguccuaaucuucucucugcguguagguaggccugugccgcaaacaagcuuaccaugaagugggugaccuucaucagccugcucuuccuguucuccagcgccuacuccagcgccuccaaggagaucaagagcuuccuguggacccagucccuccgccgggagcugagcuccuacugcagcaacaucaagcuccagguggucaaggacgcccaggcgcugcugcacggccuggacuucuccgaggugagcaacgugcagcgccucaugcggaaggagcgccgggacgacaacgaccugaagcgccugcgggaccucaaccaggccgucaacaaccugguggagcugaaguccacccagcagaaguccauccuccgcguggggacccugaccuccgacgaccugcucauccuggccgccgaccuggagaagcucaagagcaaggucacccggaccgagcgcccccuguccgccggcguguacauggggaaccugagcucccagcagcucgaccagcggcgcgcgcugcugagcaugaucggcauguccgggagcaaccagggcgcccgggccggccgcgacggggugguccgggugugggacgugaagaacgccgagcuccugaacaaccaguucggcacgaugccgucccugacccucgcgugccugaccaagcaggggcaggucgaccugaacgacgccgugcaggcccucaccgaccugggccugaucuacacggccaaguaccccaacaccagcgaccucgaccgccugacccagagccaccccauccugaacaugaucgacaccaagaaguccagccucaacaucuccggguacaacuucagccugggcgccgcggugaaggccggcgccugcaugcuggacgggggcaacaugcucgagacgaucaaggucagcccccagaccauggacgggauccucaagagcauccugaaggugaagaaggcccugggcauguucaucuccgacaccccgggcgagcggaaccccuacgagaacauccuguacaagaucugccugagcggggacggcuggcccuacaucgccucccgcaccagcaucacggggcgggcgugggagaacaccguggucgaccucgaguccgacggcaagccccagaaggccgggagcaacaacuccaacaagagccugcaguccgccggcuucaccgccggccugaccuacagccagcucaugacgcugaaggacgccaugcugcagcuggacccgaacgcgaagaccuggauggacaucgaggggcgccccgaggaccccguggagguggcccucuaccagcccuccagcggcugcuacauccacuucuuccgggagccgaccgaccugaagcaguucaagcaggacgccaaguacucccacgggaucgacgucaccgaccuguucgccgcccagcccggccucacgagcgcggugaucgacgcccugccccgcaacauggugaucacgugccaggggagcgacgacauccgcaagcugcucgagucccagggccggaaggacaucaagcugaucgacaucgcccugagcaagaccgacucccgcaaguacgagaacgccgucugggaccaguacaaggaccucugccacaugcacaccggcguggucguggagaagaagaagcgcgggggcaaggaggagaucaccccgcacugcgcgcugauggacugcaucauguucgacgccgccgugagcgggggccugaacaccuccguccuccgggccgugcugccccgggacaugguguuccgcaccagcacgccccgggucgugcugugaggacuagucccuguucccagagcccacuuuuuuuucuuuuuuugaaauaaaauagccugucuuucagaucucaaaggcucuuuucagagccaccaaaaaaaaaaaaaaaaaaaaaaaaaaaaaaaaaaaaaaaaaaaaaaaaaaaaaaaaaaaaaaaaagaauu

SEQ ID NO: 19802 - RNA, 2021 nt, Artificial Sequence
  mRNA product Design a-2 (hSL-A64-N5) comprising derived and/or modified sequence from LASV(Mad39;Clade IV)__ANH09723__SP-HsALB_NP(2-569) (opt1)
aggagaguccgcucagccagguugcagaagcggcuuagcguguguccuaaucuucucucugcguguagguaggccugugccgcaaacaagcuuaccaugaagugggugaccuucaucagccugcucuuccuguucuccagcgccuacuccagcgccuccaaggagaucaagagcuuccuguggacccagucccuccgccgggagcugagcggcuacugcuccaacaucaagcuccagguggucaaggacgcccaggcgcugcugcacgggcuggacuucagcgagguguccaacgugcagcgccucaugcggaagcagcgccgggacgacaacgaccugaagcgccugcgggaccucaaccaggccgucaacaaccugguggagcugaaguccacccagcagaaguccgugcuccgcgucggcacgcugaccagcgacgaccugcucacccuggccgccgaccuggagaagcucaaguccaaggugacccggacggagcgcccccugaccgccgggguguacaugggcaaccugagcucccagcagcucgaccagcggcgcgcgcugcugaacaugaucgggaugagcggcggcaaccagggggcccggaccggccgcgacggggucgugcgggugugggacgucaagaacgccgagcuccugaacaaccaguucggcaccaugccgucccugacgcucgccugccugaccaagcagggccagguggaccugaacgacgugguccaggcgcucaccgaccuggggcugaucuacaccgccaaguaccccaacacgagcgaccucgaccgccugacccagucccaccccauccugaacaugaucgacaccaacaagagcucccucaacaucagcggcuacaacuucagccugggggccgccgugaaggccggcgcgugcaugcuggacgggggcaacaugcucgagaccaucaaggugagcccccagacgauggacggcauccucaagagcauccugaaggucaagaagucccuggggauguucaucagcgacaccccgggcgagcggaaccccuacgagaacauccuguacaagaucugccuguccggggacggcuggcccuacaucgccagccgcaccuccaucaccgggcgggccugggagaacacggugguggaccucgagagcggcggcaagccccagaaggccggguccaacaacagcaacaagucccugcagagcgccggcuucgcggccgggcugaccuacucccagcucaugacccugaaggacgccaugcugcagcuggacccgaacgccaagaccuggauggacaucgagggccgccccgaggaccccgucgagaucgcccucuaccagcccaucagcgggugcuacauccacuucuuccgggagccgacggaccugaagcaguucaagcaggacgcgaaguacucccacggcaucgacgugaccgaccuguucgccgcccagcccggccucaccagcgccgugaucgaggcccugccccgcaacauggucaucacgugccagggguccgacgacauccgcaagcuguucgagagccagggccggaaggacaucaagcucaucgacaucgcgcuguccaagaccgacagccgcaaguacgagaacgccgugugggaccaguacaaggaccugugccacaugcacaccggggucgugguggagaagaagaagaagggcgggaaggaggagaucacgccccacugcgcccucauggacugcaucauguucgacgccgcggucagcggcggccugaacacccuggugcuccgggccgugcugccgcgcgacauggucuuccggaccuccacccccaagguggugcugugaggacuagucccuguucccagagcccacuuuuuuuucuuuuuuugaaauaaaauagccugucuuucagaucucaaaggcucuuuucagagccaccaaaaaaaaaaaaaaaaaaaaaaaaaaaaaaaaaaaaaaaaaaaaaaaaaaaaaaaaaaaaaaaaagaauu

SEQ ID NO: 19803 - RNA, 2021 nt, Artificial Sequence
  mRNA product Design a-2 (hSL-A64-N5) comprising derived and/or modified sequence from LASV(Z0947-SLE-2011;Clade IV)__AIT17841__SP-HsALB_NP(2-569) (opt1)
aggagaguccgcucagccagguugcagaagcggcuuagcguguguccuaaucuucucucugcguguagguaggccugugccgcaaacaagcuuaccaugaagugggugaccuucaucagccugcucuuccuguucuccagcgccuacuccagcgccuccaaggagaucaagagcuuccuguggacccagucccuccgccgggagcugagcggcuacugcuccaacaucaagcuccagguggucaaggacgcccaggcgcugcugcacgggcuggacuucagcgagguguccaacgugcagcgccucaugcggaaggagcgccgggacgacaacgaccugaagcgccugcgggaccucaaccaggccgucaacaaccugguggagcucaagagcacccagcagaaguccauccugcgcgugggcacccugaccagcgacgaccugcucauccuggccgccgaccuggagaagcucaaguccaaggucacccggaccgagcgcccccugagcgccgggguguacaugggcaaccuguccagccagcagcucgaccagcggcgcgcgcugcugaacaugaucgggauguccggcagcaaccagggcgcccggacggggcgcgacggcgugguccgggugugggacgugaagaacgccgagcuccugaacaaccaguucgggaccaugccgucccugacccucgccugccugaccaagcagggccaggucgaccugaacgacgcggugcaggcccucacggaccuggggcugaucuacaccgccaaguaccccaacaccagcgaccucgaccgccugacccagucccaccccauccugaacaugaucgacacgaagaaguccagccucaacaucuccggcuacaacuucagccugggcgccgccgugaaggcgggggccugcaugcuggacggcgggaacaugcucgagaccaucaaggucagcccccagaccauggacggcauccucaagagcauccugaaggugaagaaggcccugggcauguucaucuccgacgccccgggggagcggaaccccuacgagaacauccuguacaagaucugccugagcggcgacggguggcccuacaucgccucccgcaccagcaucacgggccgggcgugggagaacaccguggucgaccucgaguccgacgggaagccccagaaggccggcagcaacggcuccaacaagagccugcaguccgccggguucaccgccggccugaccuacagccagcucaugacgcugaaggacgccaugcugcagcuggacccgaacgcgaagaccuggauggacaucgaggggcgccccgaggaccccguggagaucgcccucuaccagcccuccagcggcugcuacauccacuucuuccgggagccgaccgaccugaagcaguucaagcaggacgccaaguacucccacgggaucgacgugaccgaccuguucgccgcccagcccggccucacgagcgcggucaucgacgcccugccccgcaacauggugaucacgugccagggcuccgacgacauccgcaagcuguucgagagccaggggcggaaggacaucaagcucaucgacaucgcccugagcaagaccgacucccgcaaguacgagaacgccgugugggaccaguacaaggaccugugccacaugcacaccggcaucgucguggagaagaagaagcgcgggggcaaggaggagaucaccccgcacugcgcgcucauggacugcaucauguucgacgccgccgucagcgggggccugaacaccuccgugcugcgggccgugcucccccgggacauggucuuccgcaccagcacgccccggguggugcugugaggacuagucccuguucccagagcccacuuuuuuuucuuuuuuugaaauaaaauagccugucuuucagaucucaaaggcucuuuucagagccaccaaaaaaaaaaaaaaaaaaaaaaaaaaaaaaaaaaaaaaaaaaaaaaaaaaaaaaaaaaaaaaaaagaauu

SEQ ID NO: 19804 - RNA, 2021 nt, Artificial Sequence
  mRNA product Design a-2 (hSL-A64-N5) comprising derived and/or modified sequence from LASV(Josiah;Clade IV)__NP_694869__SP-HsALB_NP(2-569) (opt4)
aggagaguccgcucagccagguugcagaagcggcuuagcguguguccuaaucuucucucugcguguagguaggccugugccgcaaacaagcuuaccaugaagugggugaccuucaucagccugcuguuccuguucagcagcgccuacagcagcgccagcaaggagaucaagagcuuccuguggacccagagccugagaagagagcugagcggcuacugcagcaacaucaagcugcagguggugaaggacgcccaggcccugcugcacggccuggacuucagcgaggugagcaacgugcagagacugaugagaaaggagagaagagacgacaacgaccugaagagacugagagaccugaaccaggccgugaacaaccugguggagcugaagagcacccagcagaagagcauccugagagugggcacccugaccagcgacgaccugcugauccuggccgccgaccuggagaagcugaagagcaaggugaucagaaccgagagaccccugagcgccggcguguacaugggcaaccugagcagccagcagcuggaccagagaagagcccugcugaacaugaucggcaugagcggcggcaaccagggcgccagagccggcagagacggcguggugagagugugggacgugaagaacgccgagcugcugaacaaccaguucggcaccaugcccagccugacccuggccugccugaccaagcagggccagguggaccugaacgacgccgugcaggcccugaccgaccugggccugaucuacaccgccaaguaccccaacaccagcgaccuggacagacugacccagagccaccccauccugaacaugaucgacaccaagaagagcagccugaacaucagcggcuacaacuucagccugggcgccgccgugaaggccggcgccugcaugcuggacggcggcaacaugcuggagaccaucaaggugagcccccagaccauggacggcauccugaagagcauccugaaggugaagaaggcccugggcauguucaucagcgacacccccggcgagagaaaccccuacgagaacauccuguacaagaucugccugagcggcgacggcuggcccuacaucgccagcagaaccagcaucaccggcagagccugggagaacaccgugguggaccuggagagcgacggcaagccccagaaggccgacagcaacaacagcagcaagagccugcagagcgccggcuucaccgccggccugaccuacagccagcugaugacccugaaggacgccaugcugcagcuggaccccaacgccaagaccuggauggacaucgagggcagacccgaggaccccguggagaucgcccuguaccagcccagcagcggcugcuacauccacuucuucagagagcccaccgaccugaagcaguucaagcaggacgccaaguacagccacggcaucgacgugaccgaccuguucgccacccagcccggccugaccagcgccgugaucgacgcccugcccagaaacauggugaucaccugccagggcagcgacgacaucagaaagcugcuggagagccagggcagaaaggacaucaagcugaucgacaucgcccugagcaagaccgacagcagaaaguacgagaacgccgugugggaccaguacaaggaccugugccacaugcacaccggcguggugguggagaagaagaagagaggcggcaaggaggagaucaccccccacugcgcccugauggacugcaucauguucgacgccgccgugagcggcggccugaacaccagcgugcugagagccgugcugcccagagacaugguguucagaaccagcacccccagaguggugcugugaggacuagucccuguucccagagcccacuuuuuuuucuuuuuuugaaauaaaauagccugucuuucagaucucaaaggcucuuuucagagccaccaaaaaaaaaaaaaaaaaaaaaaaaaaaaaaaaaaaaaaaaaaaaaaaaaaaaaaaaaaaaaaaaagaauu

SEQ ID NO: 19805 - RNA, 2021 nt, Artificial Sequence
  mRNA product Design a-2 (hSL-A64-N5) comprising derived and/or modified sequence from LASV(LP;Clade I)__AAF86702__SP-HsALB_NP(2-569) (opt4)
aggagaguccgcucagccagguugcagaagcggcuuagcguguguccuaaucuucucucugcguguagguaggccugugccgcaaacaagcuuaccaugaagugggugaccuucaucagccugcuguuccuguucagcagcgccuacagcagcaacagcaaggagaucaagagcuuccuguggacccagagccugagaagagagcugagcggcuacugcagcaacaucaagcugcagguggugaaggacgcccaggcccugcugcacggccuggacuucagcgaggugagcaacgugcagagacugaugagaaagcagaagagagacgacgccgaccugaagagacugagagaccugaaccaggccgugaacaaccugguggagcugaagagcacccagcagaagaacgugcugagagugggcacccugagcagcgacgaccugaucacccuggccgccgaccuggagaagcugaagagcaaggugaucagaaccgagagaccccugagcagcggcguguacaugggcaaccugagcagccagcagcuggaccagagaagagcccugcugagcaugaucggcaugagcggcggcccccagggcaacagaaccggcggcgacggcguggugagagugugggacgugaagaacgccgagcugcugaacaaccaguucggcaccaugcccagccugacccuggccugccugaccaagcagggccagguggaccugaacgacgccgugcaggcccugaccgaccugggccugaucuacaccgccaaguaccccaacagcagcgaccuggacaugcugacccagagccaccccauccugggcaugguggacaccaagaagagcagccugaacaucagcggcuacaacuucagccugggcgccgccgugaaggccggcgccugcaugcuggacggcggcaacaugcuggagaccaucaaggugagcccccagaccauggacggcauccugaagagcauccugaaggugaagagaagccugggcauguucaucagcgacacccccggcgagagaaaccccuacgagaacauccuguacaagaucugccugagcggcgagggcuggcccuacaucgccagcagaaccagcaucaccggcagagccugggagaacacccugguggaccuggagagcgacaacaagccccccaagcugaacagcgccggcagcaacaagagccugcaggccgccggccugaacgccggccugaccuacagccagcugaugacccugaaggacugcaugcugcagcuggaccccagcagcaagaccuggaucgacaucgagggcagacccgaggaccccguggagaucgcccuguuccagcccagcagcggcugcuacauccacuucuucagagagcccaccgaccugaagcaguucaagcaggacgccaaguacagccacggcaucgacgugaccgaccuguucagcacccagcccggccugaccagcgccgugaucgaggcccugcccagaaacauggugcugaccugccagggcagcgacgacaucaagaagcugcuggagagccagggcagaagagacaucaagcugaucgacaucagccugagcaaggccgacagcagaaaguucgagaacgccgugugggaccaguacaaggaccugugccacaugcacaccggcguggugguggagaagaagaagagaggcggcaaggaggagaucaccccccacugcgcccugcuggacugcaucauguucgacgccgccaccaccggcagccugaacaucaccacccugagagccgugcugcccagagacaugguguucagaaccagcacccccaagguggugcugugaggacuagucccuguucccagagcccacuuuuuuuucuuuuuuugaaauaaaauagccugucuuucagaucucaaaggcucuuuucagagccaccaaaaaaaaaaaaaaaaaaaaaaaaaaaaaaaaaaaaaaaaaaaaaaaaaaaaaaaaaaaaaaaaagaauu

SEQ ID NO: 19806 - RNA, 2021 nt, Artificial Sequence
  mRNA product Design a-2 (hSL-A64-N5) comprising derived and/or modified sequence from LASV(803213;Clade II)__AAF86704__SP-HsALB_NP(2-569) (opt4)
aggagaguccgcucagccagguugcagaagcggcuuagcguguguccuaaucuucucucugcguguagguaggccugugccgcaaacaagcuuaccaugaagugggugaccuucaucagccugcuguuccuguucagcagcgccuacagcagcgccagcaaggaggugaagagcuuccuguggacccagagccugagaagagagcugagcggcuacugcagcaacaucaagcugcagguggugaaggacgcccaggcccugcugcacggccuggacuucagcgaggugaacaacgugcagagacugaugagaaagcagaagagagacgacggcgaccugaagagacugagagaccugaaccaggccgugaacaaccugguggagcugaagagcacccagcagaagagcauccugagagugggcacccugaccagcgacgaccugcugacccuggccgccgaccuggagaagcugaagagcaaggugaucagaaccgagagaccccugagcagcggcguguacaugggcaaccugagcacccagcagcuggagcagagaagagcccugcugaacaugaucggcauggugggcggcgcccagggcacccagcccggcagagacggcguggugagagugugggacgugaagaaccccgaccugcugaacaaccaguucggcaccaugcccagccugacccuggccugccugaccaagcagggccagguggaccugaacgacgccgugcuggcccugaccgaccugggccugaucuacaccgccaaguaccccaacagcagcgaccuggacagacugagccagagccaccccauccugaacaugguggacaccaagaagagcagccugaacaucagcggcuacaacuucagccugggcgccgccgugaaggccggcgccugcaugcuggacggcggcaacaugcuggagaccaucaaggugaccccccagaccauggacggcauccugaagagcauccugaaggugaagagaagccugggcauguucgugagcgacacccccggcgagagaaaccccuacgagaacauccuguacaagaucugccugagcggcgacggcuggcccuacaucgccagcagaaccagcaucgugggcagagccugggagaacaccaccguggaccuggagagcgacggcaagccccagaaggugggcaccgccggcagcaacaagagccugcagagcgccggcuuccccaccggccugaccuacagccagcugaugacccugaaggacagcaugaugcagcuggaccccagcgccaagaccuggaucgacaucgagggcagacccgaggaccccguggagaucgcccuguaccagcccaugagcggcugcuacauccacuucuucagagagcccaccgaccugaagcaguucaagcaggacgccaaguacagccacggcaucgacguggccgaccuguuccccgcccagcccggccugaccagcgccgugaucgaggcccugcccagaaacauggugcugaccugccagggcagcgacgacaucaagaagcugcuggacagccagggcagaagagacaucaagcugaucgacaucagccugagcaagguggacagcagaaaguucgagaacgccgugugggaccagugcaaggaccugugccacaugcacaccggcguggugguggagaagaagaagagaggcggcaaggaggagaucaccccccacugcgcccugauggacugcaucauguucgacgccgccgugagcggcggccugaacauccccgugcugagagccgugcugcccagagacaugguguucagaaccagcagccccaagguggugcugugaggacuagucccuguucccagagcccacuuuuuuuucuuuuuuugaaauaaaauagccugucuuucagaucucaaaggcucuuuucagagccaccaaaaaaaaaaaaaaaaaaaaaaaaaaaaaaaaaaaaaaaaaaaaaaaaaaaaaaaaaaaaaaaaagaauu

SEQ ID NO: 19807 - RNA, 2024 nt, Artificial Sequence
  mRNA product Design a-2 (hSL-A64-N5) comprising derived and/or modified sequence from LASV(GA391;Clade III)__CAA36646__SP-HsALB_NP(2-570) (opt4)
aggagaguccgcucagccagguugcagaagcggcuuagcguguguccuaaucuucucucugcguguagguaggccugugccgcaaacaagcuuaccaugaagugggugaccuucaucagccugcuguuccuguucagcagcgccuacagcagcgccagcaaggaggugagaagcuuccuguggacccagagccugagaagagagcugagcggcuacugcagcaacaucaagcugcagguggugaaggacgcccaggcccugcugcacggccuggacuucagcgaggugagcaacgugcagagacugaugagaaagcagaagagagacgacggcgaccugaagagacugagagaccugaaccaggccgugaacaaccugguggagcugaagagcacccagcagaagagcgugcugagagugggcacccugagcagcgacgaccugcugauccuggccgccgaccuggagaagcugaagagcaaggugaccagaaccgagagaccccugagcagcggcguguacaugggcaaccugagcagccagcagcuggaccagagaagagcccugcugaacaugaucggcaugaccggcgugagcggcggcggcaagggcgccagcgacggcaucgugagagugugggacgugaagaacgccgagcugcugaacaaccaguucggcaccaugcccagccugacccuggccugccugaccaagcagggccagguggaccugaacgacgccgugcaggcccugaccgaccugggccugaucuacaccgccaaguaccccaacagcagcgaccuggacagacugagccagagccaccccauccugaacaugaucgacaccaagaagagcagccugaacaucagcggcuacaacuucagccugggcgccgccgugaaggccggcgccugcaugcuggacggcggcaacaugcuggagaccaucaaggugagcccccagaccauggacggcauccugaagagcauccugaaggugaagaagagccugggcauguucgugagcgacacccccggcgagagaaaccccuacgagaacauccuguacaagaucugccugagcggcgacggcuggcccuacaucgccagcagaaccagcaucgugggcagagccugggagaacaccgugguggaccuggagcaggacaacaagccccagaagaucggcaacggcggcagcaacaagagccugcagagcgccggcuucgccgccggccugaccuacagccagcugaugacccugaaggacuucaagugcuucaaccugauccccaacgccaagaccuggauggacaucgagggcagacccgaggaccccguggagaucgcccuguaccagcccagcagcggcugcuacgugcacuucuucagagagcccaccgaccugaagcaguucaagcaggacgccaaguacagccacggcaucgacgugaccgaccuguucgccgcccagcccggccugaccagcgccgugaucgaggcccugcccagaaacauggugaucaccugccagggcagcgaggacaucagaaagcugcuggagagccagggcagaagagacaucaagcugaucgacaucacccugagcaaggccgacagcagaaaguucgagaacgccgugugggaccaguucaaggaccugugccacaugcacaccggcguggugguggagaagaagaagagaggcggcaaggaggagaucaccccccacugcgcccugauggacugcaucauguucgacgccgccgugagcggcggccuggacgccaaggugcugagaguggugcugcccagagacaugguguucagaaccagcacccccaagguggugcugugaggacuagucccuguucccagagcccacuuuuuuuucuuuuuuugaaauaaaauagccugucuuucagaucucaaaggcucuuuucagagccaccaaaaaaaaaaaaaaaaaaaaaaaaaaaaaaaaaaaaaaaaaaaaaaaaaaaaaaaaaaaaaaaaagaauu

SEQ ID NO: 19808 - RNA, 2021 nt, Artificial Sequence
  mRNA product Design a-2 (hSL-A64-N5) comprising derived and/or modified sequence from LASV(AV;Clade V)__CCA30315__SP-HsALB_NP(2-569) (opt4)
aggagaguccgcucagccagguugcagaagcggcuuagcguguguccuaaucuucucucugcguguagguaggccugugccgcaaacaagcuuaccaugaagugggugaccuucaucagccugcuguuccuguucagcagcgccuacagcagcgccagcaaggaggugaagagcuuccuguggacccagagccugagaagagagcugagcggcuacugcagcaacaucaagcugcagguggugaaggacgcccaggcccugcugcacggccuggacuucagcgaggugagcaacgugcagagacugaugagaaagcagagaagagacgacagcgaccugaagagacugagagaccugaaccaggccgugaacaaccugguggagcugaagagcacccagcagaagagcgugcugagagugggcacccugagcagcgacgaccugcugacccuggccgccgaccuggagaagcugaagagcaaggugaccagaaccgagagaccccugagcagcggcguguacaugggcaaccugagcagccagcagcuggaccagagaagagcccugcugaaccugaucggcaugaccaacggcagccagggcagccaggccggcagagacggcguggugagagugugggacgugaagaacgccgagcugcugaacaaccaguucggcaccaugcccagccugacccuggccugccugaccaagcagggccagguggaccugaacgacguggugcaggcccugaccgaccugggccugaucuacaccgccaaguaccccaacaccagcgaccuggacagacugacccagagccaccccauccugaacaugaucgacaccaagaagagcagccugaacaucagcggcuacaacuucagccugggcgccgccgugaaggccggcgccugcaugcuggacggcggcaacaugcuggagaccaucaaggugagcccccagagcauggacggcauccugaagagcauccugaaggugaagagagcccugggcauguucgugagcgacacccccggcgagagaaaccccuacgagaacauccuguacaagaucugccugagcggcgacggcuggcccuacaucgccagcagaaccagcaucgugggcagagccugggagaacaccgugguggaccuggagaccgacggcaagccccagaagaucggcagcggcaacagcaacaagagccugcagagcgccggcuucagcgccggccugaccuacagccagcugaugacccugaaggacgccaugcugcagcuggaccccaacgccaagaccuggauggacaucgagggcagacccgaggaccccguggagguggcccuguaccagcccaucagcggcugcuacauccacuucuucagagagcccaccgaccugaagcaguucaagcaggacgccaaguacagccacggcaucgacaucgccgaccuguucgccgcccagcccggccugaccagcgccgugaucgaggcccugcccagaaacauggugaucaccugccagggcagcgaggacaucaagaagcugcuggagagccagggcagaaaggacaucaagcugaucgacaucgcccugagcaagaucgacagcagaaaguucgagaacgccgugugggaccaguacaaggaccugugccacaugcacaccggcguggugguggagaagaagaagagaggcggcaaggaggagaucaccccccacugcgcccugauggacugcaucauguucgacgccgccgugagcggcggccugaacacccuggugcugagagccgugcugcccagagacaugguguucagaaccagcacccccagaguggugcugugaggacuagucccuguucccagagcccacuuuuuuuucuuuuuuugaaauaaaauagccugucuuucagaucucaaaggcucuuuucagagccaccaaaaaaaaaaaaaaaaaaaaaaaaaaaaaaaaaaaaaaaaaaaaaaaaaaaaaaaaaaaaaaaaagaauu

SEQ ID NO: 19809 - RNA, 2021 nt, Artificial Sequence
  mRNA product Design a-2 (hSL-A64-N5) comprising derived and/or modified sequence from LASV(Togo/2016/7082;Clade VI)__AMR44578__SP-HsALB_NP(2-569) (opt4)
aggagaguccgcucagccagguugcagaagcggcuuagcguguguccuaaucuucucucugcguguagguaggccugugccgcaaacaagcuuaccaugaagugggugaccuucaucagccugcuguuccuguucagcagcgccuacagcagcaacagcaaggaggugaagagcuuccuguggacccagagccugagaagagagcugagcggcuacugcagcaacaucaagcugcagguggugaaggacgcccaggcccugcugcacggccuggacuucagcgaggugagcaacgugcagagacugaugagaaagcagaagagagacgacggcgaccugaagagacugagagaccugaaccaggccgugaacaaccugguggagcugaagagcgugcagcagaagagcauccugagagugggcacccugaccagcgacgaccugcugacccuggccgccgaccuggagaagcugaagagcaaggugaccagaaccgagagaccccugagcagcggcguguacaugggcaaccugagcagccagcagcuggaccagagaagagcccugcugagcaugaucggcaugagcggcggcaaccagaacagccagcccaagggcgacggcguggugagagugugggacgugaagaacgccgaccugcugaacaaccaguucggcaccaugcccagccugacccuggccugccugaccaagcagggccagguggaccugaacgacgccgugcaggcccugaccgaccugggccugaucuacaccgccaaguaccccaacagcagcgaccuggacagacugagccagagccaccccauccugaacaugaucgacaccaagaagagcagccugaacaucagcggcuacaacuucagccugggcgccgccaucaagaccggcgccugcaugcuggacggcggcaacaugcuggagaccaucaaggugaccccccagaccauggacggcauccugaagagcauccugaaggugaagagaagccugggcauguucaucagcgacacccccggcgagagaaaccccuacgagaacauccuguacaagaucugccugagcggcgacggcuggcccuacaucgccagcagaaccgccaucaucggcagagccugggagaacaccgugguggaccuggagagcgacagcaagccccagaagaucggcagcaacggcagcaacaagagccugcagagcgccggcuucgcccccggccugaccuacagccagcugaugacccugaaggacagcaugcugcagcuggaccccaacgccaagaccuggaucgacaucgagggcagacccgaggaccccguggagguggcccuguuccagcccaucagcggcugcuacauccacuucuucagagagcccaccgaccugaagcaguucaagcaggacgccaaguacagccacggcaucgacgugaccgaccuguucgccgcccagcccggccugaccagcgccgugaucgaggcccugcccagaaacauggugcugaccugccagggcagcgacgacaucaagaagcugcuggacagccagggcagaagagacaucaagcugaucgacgugagccugaacaagaucgacagcagaaaguucgagaacgccgugugggaccaguacaaggaccugugccacaugcacaccggcguggugguggagaagaagaagaagggcggcaaggaggagaucaccccccacugcgcccugcuggacugcaucauguucgacgccgccgugagcggcggccugaacgccaccgugcugagagccgugcugcccagagacaugguguucagaaccagcagccccaagguggugcugugaggacuagucccuguucccagagcccacuuuuuuuucuuuuuuugaaauaaaauagccugucuuucagaucucaaaggcucuuuucagagccaccaaaaaaaaaaaaaaaaaaaaaaaaaaaaaaaaaaaaaaaaaaaaaaaaaaaaaaaaaaaaaaaaagaauu

SEQ ID NO: 19810 - RNA, 2021 nt, Artificial Sequence
  mRNA product Design a-2 (hSL-A64-N5) comprising derived and/or modified sequence from LASV(KAK-428;Clade n.d. (VII))__ANH09741__SP-HsALB_NP(2-569) (opt4)
aggagaguccgcucagccagguugcagaagcggcuuagcguguguccuaaucuucucucugcguguagguaggccugugccgcaaacaagcuuaccaugaagugggugaccuucaucagccugcuguuccuguucagcagcgccuacagcagcaacagcaaggaggugaagagcuuccuguggacccagagccugagaagagagcugagcggcuacugcaccaacaucaagcugcagguggugaaggacgcccaggcccugcugcacggccuggacuucagcgaggugagcaacgugcagagacugaugagaaagcagaagagagacgacaacgaccugaagagacugagagaccugaaccaggccgugaacaaccugguggagcugaagagcgugcagcagaagagcgugcugaaggugggcacccugaacagcgacgaccugcugacccuggccgccgaccuggagaagcugaagagcaagguggugagaaccgagagaccccugagcagcggcguguacaugggcaaccugagcagccagcagcuggaccagagaagagcccugcugaacaugaucggcauggccggcggcagccagggcaaccagcccagcagagacggcguggugagagugugggacgugaagaacgccgaccugcugaacaaccaguucggcaccaugcccagccugacccuggccugccugaccaagcagggccagguggaccugaacgacguggugcuggcccugaccgaccugggccugaucuacaccgccaaguaccccaacagcagcgaccuggacagacugagccagaaccaccccgugcugaacaugaucgacgugaacaagagcagccugaacaucagcggcuacaacuucagccugggcgccgccgugaaggccggcgccugcaugcuggacggcggcaacaugcuggagaccaucaagaucagcccccagaccguggacggcauccugaagagcauccugaaggugaagagagcccugggcauguucgugagcgacacccccggcgagagaaaccccuacgagaacauccuguacaaggugugccugagcggcaacggcuggcccuacaucgccagcagaaccagcaucgugggcagagccugggagaacaccgugguggaccuggagagcaacaagaaccagcccaaggugggcaacaacggcagcaacaagaugcugcagagcagcggcuucgccaccggccugaccuacagccagcugaugacccugagagacagcaugcugcagcuggaccccaccgccaagaccuggaucgacaucgagggcagacccgaggaccccguggagcuggcccuguuccagcccagcagcggcugcuacauccacuucuucagagagcccaccgaccugaagcaguucaagcaggacgccaaguacagccacggcaucgacgugaacgaccuguucagcgcccagcccggccugaccagcgccgugcuggaggcccugcccagaaacauggugcugaccugccagggcagcgacgacaucagaaagcugcuggacagccaggacagaaaggacaucaagcugaucgacaucagccugagcaaggccgacgccagaaaguucgagaacgacgugugggaccaguucaaggaccugugccacaugcacaccggcaucgugguggagaagaagaagaagggcggcaagcaggagaugaccccccacugcgcccugcuggacugcaucauguucgacgccgccgugagcggcggccugaacgugcccacccugagagccgugcugcccaccgacaugguguucagaaccaucaccaccaagguggugcugugaggacuagucccuguucccagagcccacuuuuuuuucuuuuuuugaaauaaaauagccugucuuucagaucucaaaggcucuuuucagagccaccaaaaaaaaaaaaaaaaaaaaaaaaaaaaaaaaaaaaaaaaaaaaaaaaaaaaaaaaaaaaaaaaagaauu

SEQ ID NO: 19811 - RNA, 2021 nt, Artificial Sequence; identical to SEQ ID NO: 19805
  mRNA product Design a-2 (hSL-A64-N5) comprising derived and/or modified sequence from LASV(Pinneo-NIG-1969;Clade I)__AIT17837__SP-HsALB_NP(2-569) (opt4)

SEQ ID NO: 19812 - RNA, 2021 nt, Artificial Sequence
  mRNA product Design a-2 (hSL-A64-N5) comprising derived and/or modified sequence from LASV(ISTH0009-NIG-2011;Clade II)__AIT17405__SP-HsALB_NP(2-569) (opt4)
aggagaguccgcucagccagguugcagaagcggcuuagcguguguccuaaucuucucucugcguguagguaggccugugccgcaaacaagcuuaccaugaagugggugaccuucaucagccugcuguuccuguucagcagcgccuacagcagcgugagcaaggaggugaagagcuuccuguggacccagagccugagaagagagcugagcggcuacugcagcaacaucaagcugcagguggugaaggacgcccaggcccugcugcacggccuggacuucagcgaggugagcaacgugcagagacugaugagaaagcagaagagagacgacagcgaccugaagagacugagagaccugaaccaggccgugaacaaccugguggagcugaagagcacccagcagaagagcauccugagagugggcacccugaccagcgacgaccugcugacccuggccgccgaccuggagaagcugaagagcaaggugaucagaaccgagagaccccugagcagcggcguguacaugggcaaccugagcacccagcagcuggagcagagaagagcccugcugaacaugaucggcauggugggcggcgcccagggcacccagcccggcagagacggcguggugagagugugggacgugaagaaccccgaccugcugaacaaccaguucggcaccaugcccagccugacccuggccugccugaccaagcagggccagguggaccugaacgacgccgugcuggcccugaccgaccugggccugaucuacaccgccaaguaccccaacagcagcgaccuggacagacugagccagagccaccccauccugaacaugguggacaucaagaagagcagccugaacaucagcggcuacaacuucagccugggcgccgccgugaaggccggcgccugcaugcuggacggcggcaacaugcuggagaccaucaaggugaccccccagaccauggacggcauccugaagagcauccugaaggugaagagaagccugggcauguucgugagcgacacccccggcgagagaaaccccuacgagaacauccuguacaagaucugccugagcggcgacggcuggcccuacaucgccagcagaaccagcaucgugggcagagccugggagaacaccaccguggaccuggagagcgacggcaagccccagaaggugggcagcgccggcagcaacaagagccugcagagcgccggcuuccccaccggccugaccuacagccagcugaugacccugaaggacagcaugaugcagcuggaccccagcgccaagaccuggaucgacaucgagggcagacccgaggaccccguggagaucgcccuguaccagcccaugagcggcugcuacauccacuucuucagagagcccaccgaccugaagcaguucaagcaggacgccaaguacagccacggcaucgacguggccgaccuguuccccgcccagcccggccugaccagcgccgugaucgaggcccugcccagaaacauggugcugaccugccagggcagcgacgacaucaagagacugcuggacagccagggcagaagagacaucaagcugaucgacaucgcccugagcaaggccgacagcagaagauucgagaacgccgugugggaccagugcaaggaccugugccacaugcacaccggcguggugguggagaagaagaagagaggcggcaaggaggagaucaccccccacugcgcccugauggacugcaucauguacgacgccgccgugagcggcggccugaacauccccgugcugagagccgugcugcccagagacaugguguucagaaccagcagccccaagguggugcugugaggacuagucccuguucccagagcccacuuuuuuuucuuuuuuugaaauaaaauagccugucuuucagaucucaaaggcucuuuucagagccaccaaaaaaaaaaaaaaaaaaaaaaaaaaaaaaaaaaaaaaaaaaaaaaaaaaaaaaaaaaaaaaaaagaauu

SEQ ID NO: 19813 - RNA, 2021 nt, Artificial Sequence
  mRNA product Design a-2 (hSL-A64-N5) comprising derived and/or modified sequence from LASV(ISTH2010-NIG-2012;Clade II)__AIT17483__SP-HsALB_NP(2-569) (opt4)
aggagaguccgcucagccagguugcagaagcggcuuagcguguguccuaaucuucucucugcguguagguaggccugugccgcaaacaagcuuaccaugaagugggugaccuucaucagccugcuguuccuguucagcagcgccuacagcagcgccagcaaggaggugaagagcuuccuguggacccagagccugagaagagagcugagcggcuacugcagcaacaucaagcugcagguggugaaggacgcccaggcccugcugcacggccuggacuucagcgaggugagcaacgugcagagacugaugagaaagcagaagagagacgacagcgaccugaagagacugagagaccugaaccaggccgugaacaaccugguggagcugaagagcacccagcagaagagcauccugagagugggcacccugaccagcgacgaccugcugacccuggccgccgaccuggagaagcugaagagcaaggugaucagaaccgagagaccccugagcagcggcguguacaugggcaaccugagcacccagcagcuggagcagagaagagcccugcugaaccugaucggcauggugggcggcgcccagggcacccagcccggcagagacggcguggugagagugugggacgugaagaaccccgaccugcugaacaaccaguucggcaccaugcccagccugacccuggccugccugaccaagcagggccagguggaccugaacgacgccgugcuggcccugaccgaccugggccugaucuacaccgccaaguaccccaacagcagcgaccuggacagacugagccagagccaccccauccugaacaugguggacaccaagaagagcagccugaacaucagcggcuucaacuucagccugggcgccgccgugaaggccggcgccugcaugcuggacggcggcaacaugcuggagaccaucaaggugaccccccagaccauggacggcauccugaagagcauccugaaggugaagaagagccugggcauguucgugagcgacacccccggcgagagaaaccccuacgagaacauccuguacaagaucugccugagcggcgacggcuggcccuacaucgccagcagaaccagcaucgugggcagagccugggagaacaccaccguggaccuggagagcgacggcaagccccacaaggugggcaccgccggcagcaacaagagccugcagagcgccggcuuccccaccggccugaccuacagccagcugaugacccugaaggacagcaugaugcagcuggaccccagcgccaagaccuggaucgacaucgagggcagacccgaggaccccguggagaucgcccuguaccagcccaugagcggcugcuacauccacuucuucagagagcccaccgaccugaagcaguucaagcaggacgccaaguacagccacggcaucgacguggccgaccuguuccccgcccagcccggccugaccagcgccgugaucgaggcccugcccagaaacauggugcugaccugccagggcagcgacgacaucaagagacugcuggacagccagggcagaagagacaucaagcugaucgacaucgcccugagcaaggccgacagcagaagauucgagaacgccgugugggaccagugcaaggaccugugccacaugcacaccggcguggugguggagaagaagaagagaggcggcaaggaggagaucaccccccacugcgcccugauggacugcaucauguacgacgccgccgugagcggcggccugaacauccccgugcugagagccgugcugcccagagacaugguguucagaaccagcagccccaagguggugcugugaggacuagucccuguucccagagcccacuuuuuuuucuuuuuuugaaauaaaauagccugucuuucagaucucaaaggcucuuuucagagccaccaaaaaaaaaaaaaaaaaaaaaaaaaaaaaaaaaaaaaaaaaaaaaaaaaaaaaaaaaaaaaaaaagaauu

SEQ ID NO: 19814 - RNA, 2021 nt, Artificial Sequence
  mRNA product Design a-2 (hSL-A64-N5) comprising derived and/or modified sequence from LASV(Lassa virus/H.sapiens-wt/NGA/2015/ISTH_0543;Clade II)__AVO03640__SP-HsALB_NP(2-569) (opt4)
aggagaguccgcucagccagguugcagaagcggcuuagcguguguccuaaucuucucucugcguguagguaggccugugccgcaaacaagcuuaccaugaagugggugaccuucaucagccugcuguuccuguucagcagcgccuacagcagcgccagcaaggaggugaagagcuuccuguggacccagagccugagaagagagcugagcggcuacugcagcaacaucaagcugcagguggugaaggacgcccaggcccugcugcacggccuggacuucagcgaggugagcaacgugcagagacugaugagaaagcagaagagagacgacagcgaccugaagagacugagagaccugaaccaggccgugaacaaccugguggagcugaagagcacccagcagaagagcauccugagagugggcacccugaccagcgacgaccugcugacccuggccgccgaccuggagaagcugaagagcaaggugaucagaaccgagagaccccugagcagcggcguguacaugggcaaccugagcacccagcagcuggagcagagaagagcccugcugaacaugaucggcauggugggcggcgcccagggcacccagcccggcagagacggcguggugagagugugggacgugaagaaccccgaccugcugaacaaccaguucggcaccaugcccagccugacccuggccugccugaccaagcagggccagguggaccugaacgacgccgugcuggcccugaccgaccugggccugaucuacaccgccaaguaccccaacagcagcgaccuggacagacugagccagagccaccccauccugaacaugguggacaccaagaagagcagccugaacaucagcggcuacaacuucagccugggcgccgccgugaaggccggcgccugcaugcuggacggcggcaacaugcuggagaccaucaaggugaccccccagaccauggacggcauccugaagagcauccugaaggugaagaagagccugggcauguucgugagcgacacccccggcgagagaaaccccuacgagaacauccuguacaagaucugccugagcggcgacggcuggcccuacaucgccagcagaaccagcaucgugggcagagccugggagaacaccaccguggaccuggagagcgacggcaagccccagaaggugggcagcgccggcagcaacaagagccugcagagcgccggcuuccccaccggccugaccuacagccagcugaugacccugaaggacagcaugaugcagcuggaccccagcgccaagaccuggaucgacaucgagggcagacccgaggaccccguggagaucgcccuguaccagcccaugagcggcugcuacauccacuucuucagagagcccaccgaccugaagcaguucaagcaggacgccaaguacagccacggcaucgacguggccgaccuguuccccgcccagcccggccugaccagcgccgugaucgaggcccugcccagaaacauggugcugaccugccagggcagcgacgacaucaagagacugcuggacagccagggcagaaaggacaucaagcugaucgacaucgcccugagcaaggccgacagcagaagauucgagaacgccgugugggaccagugcaaggaccugugccacaugcacaccggcguggugguggagaagaagaagagaggcggcaaggaggagaucaccccccacugcgcccugauggacugcaucauguacgacgccgccgugagcggcggccugaacauccccgugcugagagccgugcugcccagagacaugguguucagaaccagcagccccaagguggugcugugaggacuagucccuguucccagagcccacuuuuuuuucuuuuuuugaaauaaaauagccugucuuucagaucucaaaggcucuuuucagagccaccaaaaaaaaaaaaaaaaaaaaaaaaaaaaaaaaaaaaaaaaaaaaaaaaaaaaaaaaaaaaaaaaagaauu

SEQ ID NO: 19815 - RNA, 2021 nt, Artificial Sequence
  mRNA product Design a-2 (hSL-A64-N5) comprising derived and/or modified sequence from LASV(Lassa virus/H.sapiens-wt/NGA/2016/ISTH_0009;Clade II)__AVO03572__SP-HsALB_NP(2-569) (opt4)
aggagaguccgcucagccagguugcagaagcggcuuagcguguguccuaaucuucucucugcguguagguaggccugugccgcaaacaagcuuaccaugaagugggugaccuucaucagccugcuguuccuguucagcagcgccuacagcagcgccagcaaggaggugaagagcuuccuguggacccagagccugagaagagagcugagcggcuacugcagcaacaucaagcugcagguggugaaggacgcccaggcccugcugcacggccuggacuucagcgaggugagcaacgugcagagacugaugagaaagcagaagagagacgacagcgaccugaagagacugagagaccugaaccaggccgugaacaaccugguggagcugaagagcacccagcagaagagcauccugagagugggcacccugaccagcgacgaccugcugacccuggccgccgaccuggagaagcugaagagcaaggugaucagaaccgagagaccccugagcagcggcguguacaugggcaaccugagcacccagcagcuggagcagagaagagcccugcugaacaugaucggcauggugggcggcgcccagggcacccagcccggcagagacggcguggugagagugugggacgugaagaaccccgaccugcugaacaaccaguucggcaccaugcccagccugacccuggccugccugaccaagcagggccagguggaccugaacgacgccgugcuggcccugaccgaccugggccugaucuacaccgccaaguaccccaacagcagcgaccuggacagacugagccagagccaccccauccugaacaugguggacaccaagaagagcagccugaacaucagcggcuacaacuucagccugggcgccgccgugaaggccggcgccugcaugcuggacggcggcaacaugcuggagaccaucaaggugaccccccagaccauggacggcauccugaagagcauccugaaggugaagaagagccugggcauguucgugagcgacacccccggcgagagaaaccccuacgagaacauccuguacaagaucugccugagcggcgacggcuggcccuacaucgccagcagaaccagcaucgugggcagagccugggagaacaccaccguggaccuggagagcgacggcaagccccagaaggugggcagcgccggcagcaacaagagccugcagagcgccggcuuccccaccggccugaccuacagccagcugaugacccugaaggacagcaugaugcagcuggaccccagcgccaagaccuggaucgacaucgagggcagacccgaggaccccguggagaucgcccuguaccagcccaugagcggcugcuacauccacuucuucagagagcccaccgaccugaagcaguucaagcaggacgccaaguacagccacggcaucgacguggccgaccuguuccccgcccagcccggccugaccagcgccgugaucgaggcccugcccagaaacauggugcugaccugccagggcagcgacgacaucaagagacugcuggacagccagggcagaagagacaucaagcugaucgacaucgcccugagcaaggccgacagcagaagauucgagaacgccgugugggaccagugcaaggaccugugccacaugcacaccggcguggugguggagaagaagaagagaggcggcaaggaggagaucaccccccacugcgcccugauggacugcaucauguacgacgccgccgugagcggcggccugaacauccccgugcugagagccgugcugcccagagacaugguguucagaaccagcagccccaagguggugcugugaggacuagucccuguucccagagcccacuuuuuuuucuuuuuuugaaauaaaauagccugucuuucagaucucaaaggcucuuuucagagccaccaaaaaaaaaaaaaaaaaaaaaaaaaaaaaaaaaaaaaaaaaaaaaaaaaaaaaaaaaaaaaaaaagaauu

SEQ ID NO: 19816 - RNA, 2021 nt, Artificial Sequence
  mRNA product Design a-2 (hSL-A64-N5) comprising derived and/or modified sequence from LASV(Lassa virus/H.sapiens-wt/NGA/2016/ISTH_0017;Clade II)__AVO03568__SP-HsALB_NP(2-569) (opt4)
aggagaguccgcucagccagguugcagaagcggcuuagcguguguccuaaucuucucucugcguguagguaggccugugccgcaaacaagcuuaccaugaagugggugaccuucaucagccugcuguuccuguucagcagcgccuacagcagcgccagcaaggaggugaagagcuuccuguggacccagagccugagaagagagcugagcggcuacugcagcagcaucaagcugcagguggugaaggacgcccaggcccugcugcacggccuggacuucagcgaggugagcaacgugcagagacugaugagaaagcagaagagagacgacagcgaccugaagagacugagagaccugaaccaggccgugaacaaccugguggagcugaagagcacccagcagaagagcauccugagagugggcacccugaccagcgacgaccugcugacccuggccgccgaccuggagaagcugaagagcaaggugaucagaaccgagagaccccugagcagcggcguguacaugggcaaccugagcacccagcagcuggagcagagaagagcccugcugaacaugaucggcauggccggcggcgcccagggcacccagcccggcagagacggcguggugagagugugggacgugaagaaccccgaccugcugaacaaccaguucggcaccaugcccagccugacccuggccugccugaccaagcagggccagguggaccugaacgacgccgugcuggcccugaccgaccugggccugaucuacaccgccaaguaccccaacagcagcgaccuggacagacugagccagagccaccccauccugaacaugguggacaccaagaagagcagccugaacaucagcggcuacaacuucagccugggcgccgccgugaaggccggcgccugcaugcuggacggcggcaacaugcuggagaccaucaaggugaccccccagaccauggacggcauccugaagagcauccugaaggugaagagaagccugggcauguucgugagcgacgcccccggcgagagaaaccccuacgagaacauccuguacaagaucugccugagcggcgacggcuggcccuacaucgccagcagaaccagcaucgugggcagagccugggagaacaccaccguggaccuggagagcgacggcaagccccagaaggugggcgccaccggcagcaacaagagccugcagagcgccggcuuccccaccggccugaccuacagccagcugaugacccugaaggacagcaugaugcagcuggaccccagcgccaagaccuggaucgacaucgagggcagacccgaggaccccguggagguggcccuguaccagcccgugagcggcugcuacauccacuucuucagagagcccaccgaccugaagcaguucaagcaggacgccaaguacagccacggcaucgacguggccgaccuguuccccgcccagcccggccugaccagcgccgugaucgaggcccugcccagaaacauggugcugaccugccagggcagcgacgacaucaagaagcugcuggacagccagggcagaaaggacaucaagcugaucgacaucgcccugagcaaggccgacagcagaagauucgagaacgccgugugggaccagugcaaggaccugugccacaugcacaccggcguggugguggagaagaagaagagaggcggcaaggaggagaucaccccccacugcgcccugauggacugcaucauguacgacgccgccgugagcggcggccugaacauccccgugcugagagccgugcugcccagagacaugguguucagaaccagcagccccaagguggugcugugaggacuagucccuguucccagagcccacuuuuuuuucuuuuuuugaaauaaaauagccugucuuucagaucucaaaggcucuuuucagagccaccaaaaaaaaaaaaaaaaaaaaaaaaaaaaaaaaaaaaaaaaaaaaaaaaaaaaaaaaaaaaaaaaagaauu

SEQ ID NO: 19817 - RNA, 2021 nt, Artificial Sequence
  mRNA product Design a-2 (hSL-A64-N5) comprising derived and/or modified sequence from LASV(Lassa virus/H.sapiens-wt/NGA/2018/ISTH_0959;Clade II)__AVV65100__SP-HsALB_NP(2-569) (opt4)
aggagaguccgcucagccagguugcagaagcggcuuagcguguguccuaaucuucucucugcguguagguaggccugugccgcaaacaagcuuaccaugaagugggugaccuucaucagccugcuguuccuguucagcagcgccuacagcagcgccagcaaggaggugaagagcuuccuguggacccagagccugagaagagagcugagcggcuacugcagcaacaucaagcugcagguggugaaggacgcccaggcccugcugcacggccuggacuucagcgaggugagcaacgugcagagacugaugagaaagcagaagagagacgacagcgaccugaagagacugagagaccugaaccaggccgugaacaaccugguggagcugaagagcacccagcagaagagcauccugagagugggcacccugaccagcgacgaccugcugacccuggccgccgaccuggagaagcugaagagcaaggugaucagaaccgagagaccccugagcagcggcguguacaugggcaaccugagcacccagcagcuggagcagagaagagcccugcugaaccugaucggcauggugggcggcgcccagggcacccagcccggcagagacggcguggugagagugugggacgugaagaaccccgaccugcugaacaaccaguucggcaccaugcccagccugacccuggccugccugaccaagcagggccagguggaccugaacgacguggugcuggcccugaccgaccugggccugaucuacaccgccaaguaccccaacagcagcgaccuggacagacugagccagagccaccccauccugaacaugguggacaccaagaagagcagccugaacaucagcggcuucaacuucagccugggcgccgccgugaaggccggcgccugcaugcuggacggcggcaacaugcuggagaccaucaaggugaccccccagaccauggacggcauccugaagagcauccugaaggugaagaagagccugggcauguucgugagcgacacccccggcgagagaaaccccuacgagaacauccuguacaagaucugccugagcggcgacggcuggcccuacaucgccagcagaaccagcaucgugggcagagccugggagaacaccaccguggaccuggagagcgacggcaagccccacaaggugggcaccgccggcagcaacaagagccugcagagcgccggcuuccccaccggccugaccuacagccagcugaugacccugaaggacagcaugaugcagcuggaccccagcgccaagaccuggaucgacaucgagggcagacccgaggaccccguggagaucgcccuguaccagcccaugagcggcugcuacauccacuucuucagagagcccaccgaccugaagcaguucaagcaggacgccaaguacagccacggcaucgacguggccgaccuguuccccgcccagcccggccugaccagcgccgugaucgaggcccugcccagaaacauggugcugaccugccagggcagcgacgacaucaagagacugcuggacagccagggcagaaaggacaucaagcugaucgacaucgcccugagcaagaccgacagcagaagauucgagaacgccgugugggaccagugcaaggaccugugccacaugcacaccggcguggugguggagaagaagaagagaggcggcaaggaggagaucaccccccacugcgcccugauggacugcaucauguacgacgccgccgugagcggcggccugaacauccccgugcugagagccgugcugcccagagacaugguguucagaaccagcagccccaagguggugcugugaggacuagucccuguucccagagcccacuuuuuuuucuuuuuuugaaauaaaauagccugucuuucagaucucaaaggcucuuuucagagccaccaaaaaaaaaaaaaaaaaaaaaaaaaaaaaaaaaaaaaaaaaaaaaaaaaaaaaaaaaaaaaaaaagaauu

SEQ ID NO: 19818 - RNA, 2021 nt, Artificial Sequence
  mRNA product Design a-2 (hSL-A64-N5) comprising derived and/or modified sequence from LASV(LASV003-NIG-2008;Clade II)__AIT17581__SP-HsALB_NP(2-569) (opt4)
aggagaguccgcucagccagguugcagaagcggcuuagcguguguccuaaucuucucucugcguguagguaggccugugccgcaaacaagcuuaccaugaagugggugaccuucaucagccugcuguuccuguucagcagcgccuacagcagcgccagcaaggaggugaagagcuuccuguggacccagagccugagaagagagcugagcggcuacugcagcagcaucaagcugcagguggugaaggacgcccaggcccugcugcacggccuggacuucagcgaggugagcaacgugcagagacugaugagaaagcagaagagagacgacagcgaccugaagagacugagagaccugaaccaggccgugaacaaccugguggagcugaagagcacccagcagaagagcgugcugagagugggcacccugaccagcgacgaccugcugacccuggccgccgaccuggagaagcugaagagcaaggugaucagaaccgagagaccccugagcagcggcguguacaugggcaaccugagcgcccagcagcuggagcagagaagaacccugcugaacaugaucggcauggugggcggcgcccagggcacccagcccggcagagacggcguggugagagugugggacgugaagaaccccgaccugcugaacaaccaguucggcaccaugcccagccugacccuggccugccugaccaagcagggccagguggaccugaacgacguggugcuggcccugaccgaccugggccugaucuacaccgccaaguaccccaacagcagcgaccuggacagacugagccagagccaccccauccugagcaugguggacaccaagaagagcagccugaacaucagcggcuacaacuucagccugggcgccgccgugaaggccggcgccugcaugcuggacggcggcaacaugcuggagaccaucaaggugaccccccagaccauggacggcauccugaagagcauccugaaggugaagaagagccugggcauguucgugagcgacacccccggcgagagaaaccccuacgagaacauccuguacaagaucugccugagcggcgacggcuggcccuacaucgccagcagaaccagcaucgugggcagagccugggagaacaccaccguggaccuggagagcgacggcaagccccagaaggugggcaccgccggcagcaacaagagccugcagagcgccggcuuccccaccggccugaccuacagccagcugaugacccugaaggacagcaugaugcagcuggaccccagcgccaagaccuggaucgacaucgagggcagacccgaggaccccguggagaucgcccuguaccagcccaugagcggcugcuacauccacuucuucagagagcccaccgaccugaagcaguucaagcaggacgccaaguacagccacggcaucgacgugaccgaccuguuccccgcccagcccggccugaccagcgccgugaucgaggcccugcccagaaacauggugcugaccugccagggcagcgacgacaucaagagacugcuggacagccagggcagaagagacaucaagcugaucgacaucgcccugagcaaggccgacagcagaagauucgagaacgccgugugggaccagugcaaggaccugugccacaugcacaccggcguggugguggagaagaagaagagaggcggcaaggaggagaucaccccccacugcgcccugauggacugcaucauguacgacgccgccgugagcggcggccugaacauccccgugcugagagccgugcugcccagagacaugguguucagaaccagcagccccaagguggugcugugaggacuagucccuguucccagagcccacuuuuuuuucuuuuuuugaaauaaaauagccugucuuucagaucucaaaggcucuuuucagagccaccaaaaaaaaaaaaaaaaaaaaaaaaaaaaaaaaaaaaaaaaaaaaaaaaaaaaaaaaaaaaaaaaagaauu

SEQ ID NO: 19819 - RNA, 2021 nt, Artificial Sequence
  mRNA product Design a-2 (hSL-A64-N5) comprising derived and/or modified sequence from LASV(LASV035-NIG-2009;Clade II)__AIT17589__SP-HsALB_NP(2-569) (opt4)
aggagaguccgcucagccagguugcagaagcggcuuagcguguguccuaaucuucucucugcguguagguaggccugugccgcaaacaagcuuaccaugaagugggugaccuucaucagccugcuguuccuguucagcagcgccuacagcagcgccagcaaggaggugaagagcuuccuguggacccagagccugagaagagagcugagcggcuacugcagcagcaucaagcugcagguggugaaggacgcccaggcccugcugcacggccuggacuucagcgaggugagcaacgugcagagacugaugagaaagcagaagagagacgacagcgaccugaagagacugagagaccugaaccaggccgugaacaaccugguggagcugaagagcacccagcagaagagcauccugagagugggcacccugaccagcgacgaccugcugacccuggccgccgaccuggagaagcugaagagcaaggugaucagaaccgagagaccccugagcagcggcguguacaugggcaaccugagcgcccagcagcuggagcagagaagagcccugcugaacaugaucggcauggugggcggcgcccagggcacccagcccggcagagacggcguggugagagugugggacgugaagaaccccgaccugcugaacaaccaguucggcaccaugcccagccugacccuggccugccugaccaagcagggccagguggaccugaacgacgccgugcuggcccugaccgaccugggccugaucuacaccgccaaguaccccaacagcagcgaccuggacagacugagccagagccaccccauccugaacaugguggacaccaagaagagcagccugaacaucagcggcuacaacuucagccugggcgccgccgugaaggccggcgccugcaugcuggacggcggcaacaugcuggagaccaucaaggugaccccccagaccauggacggcauccugaagagcauccugaaggugaagagaagccugggcauguucgugagcgacacccccggcgagagaaaccccuacgagaacauccuguacaagaucugccugagcggcgacggcuggcccuacaucgccagcagaaccagcaucgugggcagagccugggagaacaccaccguggaccuggagagcgacggcaagccccagaaggugggcaccaccggcagcaacaagagccugcagagcgccggcuuccccaccggccugaccuacagccagcugaugacccugaaggacagcaugaugcagcuggaccccagcgccaagaccuggaucgacaucgagggcagacccgaggaccccguggagaucgcccuguaccagcccaugagcggcugcuacauccacuucuucagagagcccaccgaccugaagcaguucaagcaggacgccaaguacagccacggcaucgacguggccgaccuguuccccgcccagcccggccugaccagcgccgugaucgaggcccugcccagaaacauggugcugaccugccagggcagcgacgacaucaagaagcugcuggacagccagggcagaagagacaucaagcugaucgacaucgcccugagcaaggccgacagcagaaaguucgagaacgccgugugggaccagugcaaggaccugugccacaugcacaccggcguggugguggagaagaagaagagaggcggcaaggaggagaucaccccccacugcgcccugauggacugcaucauguacgacgccgccgugagcggcggccugaacauccccgugcugagagccgugcugcccagagacaugguguucagaaccagcagccccaagguggugcugugaggacuagucccuguucccagagcccacuuuuuuuucuuuuuuugaaauaaaauagccugucuuucagaucucaaaggcucuuuucagagccaccaaaaaaaaaaaaaaaaaaaaaaaaaaaaaaaaaaaaaaaaaaaaaaaaaaaaaaaaaaaaaaaaagaauu

SEQ ID NO: 19820 - RNA, 2021 nt, Artificial Sequence
  mRNA product Design a-2 (hSL-A64-N5) comprising derived and/or modified sequence from LASV(LASV1000-NIG-2009;Clade II)__AIT17783__SP-HsALB_NP(2-569) (opt4)
aggagaguccgcucagccagguugcagaagcggcuuagcguguguccuaaucuucucucugcguguagguaggccugugccgcaaacaagcuuaccaugaagugggugaccuucaucagccugcuguuccuguucagcagcgccuacagcagcgccagcaaggaggugaagagcuuccuguggacccagagccugagaagagagcugagcggcuacugcagcaacaucaagcugcagguggugaaggacgcccaggcccugcugcacggccuggacuucagcgaggugagcaacgugcagagacugaugagaaagcagaagagagacgacagcgaccugaagagacugagagaccugaaccaggccgugaacaaccugguggagcugaagagcacccagcagaagagcauccugagagugggcacccugaccagcgacgaccugcugacccuggccgccgaccuggagaagcugaagagcaaggugaucagaaccgagagaccccugagcagcggcguguacaugggcaaccugagcacccagcagcuggagcagagaagagcccugcugaacaugaucggcauggugggcggcgcccagggcacccagcccggcagagacggcguggugagagugugggacgugaagaaccccgaccugcugaacaaccaguucggcaccaugcccagccugacccuggccugccugaccaagcagggccagguggaccugaacgacguggugcuggcccugaccgaccugggccugaucuacaccgccaaguaccccaacagcagcgaccuggacagacugagccagagccaccccauccugaacaugguggacaccaagaagagcagccugaacaucagcggcuacaacuucagccugggcgccgccgugaaggccggcgccugcaugcuggacggcggcaacaugcuggagaccaucaaggugaccccccagaccauggacggcauccugaagagcauccugaaggugaagaagagccugggcauguucgugagcgacacccccggcgagagaaaccccuacgagaacauccuguacaagaucugccugagcggcgacggcuggcccuacaucgccagcagaaccagcaucgugggcagagccugggagaacaccaccguggaccuggagagcgacggcaagccccagaaggugggcaccgccggcagcaacaagagccugcagagcgccggcuuccccaccggccugaccuacagccagcugaugacccugaaggacagcaugaugcagcuggaccccagcgccaagaccuggaucgacaucgagggcagacccgaggaccccguggagaucgcccuguaccagcccgugagcggcugcuacauccacuucuucagagagcccaccgaccugaagcaguucaagcaggacgccaaguacagccacggcaucgacguggccgaccuguuccccgcccagcccggccugaccagcgccgugaucgaggcccugcccagaaacauggugcugaccugccagggcagcgacgacaucaagagacugcuggacagccagggcagaagagacaucaagcugaucgacaucgcccugagcaaggccgacagcagaagauucgagaacgccgugugggaccagugcaaggaccugugccacaugcacaccggcguggugguggagaagaagaagagaggcggcaaggaggagaucaccccccacugcgcccugauggacugcaucauguacgacgccgccgugagcggcggccugaacauccccgugcugagagccgugcugcccagagacaugguguucagaaccagcagccccaagguggugcugugaggacuagucccuguucccagagcccacuuuuuuuucuuuuuuugaaauaaaauagccugucuuucagaucucaaaggcucuuuucagagccaccaaaaaaaaaaaaaaaaaaaaaaaaaaaaaaaaaaaaaaaaaaaaaaaaaaaaaaaaaaaaaaaaagaauu

SEQ ID NO: 19821 - RNA, 2021 nt, Artificial Sequence
  mRNA product Design a-2 (hSL-A64-N5) comprising derived and/or modified sequence from LASV(LASV221-NIG-2010;Clade II)__AIT17625__SP-HsALB_NP(2-569) (opt4)
aggagaguccgcucagccagguugcagaagcggcuuagcguguguccuaaucuucucucugcguguagguaggccugugccgcaaacaagcuuaccaugaagugggugaccuucaucagccugcuguuccuguucagcagcgccuacagcagcgccagcaaggaggugaagagcuuccuguggacccagagccugagaagagagcugagcggcuacugcagcagcaucaagcugcagguggugaaggacgcccaggcccugcugcacggccuggacuucagcgaggugagcaacgugcagagacugaugagaaagcagagaagagacgacagcgaccugaagagacugagagaccugaaccaggccgugaacaaccugguggagcugaagagcacccagcagaagagcauccugagagugggcacccugaccagcgacgaccugcugacccuggccgccgaccuggagaagcugaagagcaaggugaucagaaccgagagaccccugagcagcggcguguacaugggcaaccugagcacccagcagcuggagcagagaagagcccugcugaacaugaucggcauggugggcggcgcccagggcacccagcccggcagagacggcguggugagagugugggacgugaagaaccccgaccugcugaacaaccaguucggcaccaugcccagccugacccuggccugccugaccaagcagggccagguggaccugaacgacgccgugcuggcccugaccgaccugggccugaucuacaccgccaaguaccccaacagcagcgaccuggacagacugagccagagccaccccauccugaacaugguggacaccaagaagagcagccugaacaucagcggcuacaacuucagccugggcgccgccgugaaggccggcgccugcaugcuggacggcggcaacaugcuggagaccaucaaggugaccccccagaccguggacggcauccugaagagcauccugaaggugaagagaagccugggcauguucgugagcgacacccccggcgagagaaaccccuacgagaacauccuguacaagaucugccugagcggcgacggcuggcccuacaucgccagcagaaccagcaucgugggcagagccugggagaacaccaccguggaccuggagagcgacggcaagccccagaaggugggcaccgccggcagcaacaagagccugcagagcgccggcuuccccaccggccugaccuacagccagcugaugacccugaaggacagcaugaugcagcuggaccccagcgccaagaccuggaucgacaucgagggcagacccgaggaccccguggagaucgcccuguaccagcccaugagcggcugcuacauccacuucuucagagagcccaccgaccugaagcaguucaagcaggacgccaaguacagccacggcaucgacguggccgaccuguuccccgcccagcccggccugaccagcgccgugaucgaggcccugcccagaaacauggugcugaccugccagggcagcgacgacaucaagagacugcuggacagccagggcagaagagacaucaagcugaucgacaucgcccugagcaaggccgacagcagaaaguucgagaacgccgugugggaccagugcaaggaccugugccacaugcacaccggcguggugguggagaagaagaagagaggcggcaaggaggagaucaccccccacugcgcccugauggacugcaucauguacgacgccgccgugagcggcggccugaacauccccgugcugagagccgugcugcccagagacaugguguucagaaccagcagccccaagguggugcugugaggacuagucccuguucccagagcccacuuuuuuuucuuuuuuugaaauaaaauagccugucuuucagaucucaaaggcucuuuucagagccaccaaaaaaaaaaaaaaaaaaaaaaaaaaaaaaaaaaaaaaaaaaaaaaaaaaaaaaaaaaaaaaaaagaauu

SEQ ID NO: 19822 - RNA, 2021 nt, Artificial Sequence
  mRNA product Design a-2 (hSL-A64-N5) comprising derived and/or modified sequence from LASV(LASV237-NIG-2010;Clade II)__AIT17639__SP-HsALB_NP(2-569) (opt4)
aggagaguccgcucagccagguugcagaagcggcuuagcguguguccuaaucuucucucugcguguagguaggccugugccgcaaacaagcuuaccaugaagugggugaccuucaucagccugcuguuccuguucagcagcgccuacagcagcgccagcaaggaggugaagagcuuccuguggacccagagccugagaagagagcugagcggcuacugcagcaacaucaagcugcagguggugaaggacgcccaggcccugcugcacggccuggacuucagcgaggugagcaacgugcagagacugaugagaaagcagaagagagacgacagcgaccugaagagacugagagaccugaaccaggccgugaacaaccugguggagcugaagagcacccagcagaagagcauccugagagugggcacccugaccagcgacgaccugcugacccuggccgccgaccuggagaagcugaagagcaaggugaucagaaccgagagaccccugagcagcggcguguacaugggcaaccugagcacccagcagcuggagcagagaagagcccugcugaacaugaucggcauggugggcggcgcccagggcacccagcccggcagagacggcguggugagagugugggacgugaagaaccccgaccugcugaacaaccaguucggcaccaugcccagccugacccuggccugccugaccaagcagggccagguggaccugaacgacgccgugcuggcccugaccgaccugggccugaucuacaccgccaaguaccccaacagcagcgaccuggacagacugagccagagccaccccauccugaacaugguggacaucaagaagagcagccugaacaucagcggcuacaacuucagccugggcgccgccgugaaggccggcgccugcaugcuggacggcggcaacaugcuggagaccaucaaggugaccccccagaccauggacggcauccugaagagcauccugaaggugaagagaagccugggcauguucgugagcgacacccccggcgagagaaaccccuacgagaacauccuguacaagaucugccugagcggcgacggcuggcccuacaucgccagcagaaccagcaucgugggcagagccugggagaacaccaccguggaccuggagagcgacggcaagccccagaaggugggcagcgccggcagcaacaagagccugcagagcgccggcuuccccaccggccugaccuacagccagcugaugacccugaaggacagcaugaugcagcuggaccccagcgccaagaccuggaucgacaucgagggcagacccgaggaccccguggagaucgcccuguaccagcccaugagcggcugcuacauccacuucuucagagagcccaccgaccugaagcaguucaagcaggacgccaaguacagccacggcaucgacguggccgaccuguuccccgcccagcccggccugaccagcgccgugaucgaggcccugcccagaaacauggugcugaccugccagggcagcgacgacaucaagagacugcuggacagccagggcagaagagacaucaagcugaucgacaucgcccugagcaaggccgacagcagaagauucgagaacgccgugugggaccagugcaaggaccugugccacaugcacaccggcguggugguggagaagaagaagagaggcggcaaggaggagaucaccccccacugcgcccugauggacugcaucauguacgacgccgccgugagcggcggccugaacauccccgugcugagagccgugcugcccagagacaugguguucagaaccagcagccccaagguggugcugugaggacuagucccuguucccagagcccacuuuuuuuucuuuuuuugaaauaaaauagccugucuuucagaucucaaaggcucuuuucagagccaccaaaaaaaaaaaaaaaaaaaaaaaaaaaaaaaaaaaaaaaaaaaaaaaaaaaaaaaaaaaaaaaaagaauu

SEQ ID NO: 19823 - RNA, 2021 nt, Artificial Sequence
  mRNA product Design a-2 (hSL-A64-N5) comprising derived and/or modified sequence from LASV(LASV253-NIG-2011;Clade II)__AIT17671__SP-HsALB_NP(2-569) (opt4)
aggagaguccgcucagccagguugcagaagcggcuuagcguguguccuaaucuucucucugcguguagguaggccugugccgcaaacaagcuuaccaugaagugggugaccuucaucagccugcuguuccuguucagcagcgccuacagcagcgccagcaaggaggugaagagcuuccuguggacccagagccugagaagagagcugagcggcuacugcagcagcaucaagcugcagguggugaaggacgcccaggcccugcugcacggccuggacuucagcgaggugagcaacgugcagagacugaugagaaagcagaagagagacgacagcgaccugaagagacugagagaccugaaccaggccgugaacaaccugguggagcugaagagcacccagcagaagagcgugcugagagugggcacccugaccagcgacgaccugcugacccuggccgccgaccuggagaagcugaagagcaaggugaucagaaccgagagaccccugagcagcggcguguacaugggcaaccugagcacccagcagcuggagcagagaagagcccugcugaacaugaucggcauggugggcggcgcccagggcacccagcccggcagagacggcguggugagagugugggacgugaagaaccccgaccugcugaacaaccaguucggcaccaugcccagccugacccuggccugccugaccaagcagggccagguggaccugaacgacguggugcuggcccugaccgaccugggccugaucuacaccgccaaguaccccaacagcagcgaccuggacagacugagccagagccaccccauccugaacaugguggacaccaagaagagcagccugaacaucagcggcuacaacuucagccugggcgccgccgugaaggccggcgccugcaugcuggacggcggcaacaugcuggagaccaucaaggugaccccccagaccauggacggcauccugaagagcauccugaaggugaagaagagccugggcauguucgugagcgacacccccggcgagagaaaccccuacgagaacauccuguacaagaucugccugagcggcgacggcuggcccuacaucgccagcagaaccagcaucgugggcagagccugggagaacaccaccguggaccuggagagcgacggcaagccccagaaggugggcaccgccggcagcaacaagagccugcagagcgccggcuuccccaccggccugaccuacagccagcugaugacccugaaggacagcaugaugcagcuggaccccagcgccaagaccuggaucgacaucgagggcagacccgaggaccccguggagaucgcccuguaccagcccaugagcggcugcuacauccacuucuucagagagcccaccgaccugaagcaguucaagcaggacgccaaguacagccacggcaucgacgugaccgaccuguuccccgcccagcccggccugaccagcgccgugaucgaggcccugcccagaaacauggugcugaccugccagggcagcgacgacaucaagagacugcuggacagccagggcagaagagacaucaagcugaucgacaucgcccugagcaaggccgacagcagaagauucgagaacgccgugugggaccagugcaaggaccugugccacaugcacaccggcguggugguggagaagaagaagagaggcggcaaggaggagaucaccccccacugcgcccugauggacugcaucauguacgacgccgccgugagcggcggccugaacauccccgugcugagagccgugcugcccagagacaugguguucagaaccagcagccccaagguggugcugugaggacuagucccuguucccagagcccacuuuuuuuucuuuuuuugaaauaaaauagccugucuuucagaucucaaaggcucuuuucagagccaccaaaaaaaaaaaaaaaaaaaaaaaaaaaaaaaaaaaaaaaaaaaaaaaaaaaaaaaaaaaaaaaaagaauu

SEQ ID NO: 19824 - RNA, 2021 nt, Artificial Sequence
  mRNA product Design a-2 (hSL-A64-N5) comprising derived and/or modified sequence from LASV(LASV254-NIG-2011;Clade II)__AIT17675__SP-HsALB_NP(2-569) (opt4)
aggagaguccgcucagccagguugcagaagcggcuuagcguguguccuaaucuucucucugcguguagguaggccugugccgcaaacaagcuuaccaugaagugggugaccuucaucagccugcuguuccuguucagcagcgccuacagcagcgccagcaaggaggugaagagcuuccuguggacccagagccugagaagagagcugagcggcuacugcagcagcaucaagcugcagguggugaaggacgcccaggcccugcugcacggccuggacuucagcgaggugagcaacgugcagagacugaugagaaagcagaagagagacgacagcgaccugaagagacugagagaccugaaccaggccgugaacaaccugguggagcugaagagcacccagcagaagagcgugcugagagugggcacccugaccagcgacgaccugcugacccuggccgccgaccuggagaagcugaagagcaaggugaucagaaccgagagaccccugagcagcggcguguacaugggcaaccugagcacccagcagcuggagcagagaagagcccugcugaacaugaucggcauggugggcggcgcccagggcacccagcccggcagagacggcguggugagagugugggacgugaagaaccccgaccugcugaacaaccaguucggcaccaugcccagccugacccuggccugccugaccaagcagggccagguggaccugaacgacgccgugcuggcccugaccgaccugggccugaucuacaccgccaaguaccccaacagcagcgaccuggacagacugagccagagccaccccauccugaacaugguggacaccaagaagagcagccugaacaucagcggcuacaacuucagccugggcgccgccgugaaggccggcgccugcaugcuggacggcggcaacaugcuggagaccaucaaggugaccccccagaccauggacggcauccugaagagcauccugaaggugaagaagagccugggcauguucgugagcgacacccccggcgagagaaaccccuacgagaacauccuguacaagaucugccugagcggcgacggcuggcccuacaucgccagcagaaccagcaucgugggcagagccugggagaacaccaucguggaccuggagagcgacggcaagccccagaaggugggcaccgccggcagcaacaagagccugcagagcgccggcuuccccaccggccugaccuacagccagcugaugacccugaaggacagcaugaugcagcuggaccccagcgccaagaccuggaucgacaucgagggcagacccgaggaccccguggagaucgcccuguaccagcccaugagcggcugcuacauccacuucuucagagagcccaccgaccugaagcaguucaagcaggacgccaaguacagccacggcaucgacguggccgaccuguuccccgcccagcccggccugaccagcgccgugaucgaggcccugcccagaaacauggugcugaccugccagggcagcgacgacaucaagagacugcuggacagccagggcagaagagacaucaagcugaucgacaucgcccugagcaaggccgacagcagaagauucgagaacgccgugugggaccagugcaaggaccugugccacaugcacaccggcguggugguggagaagaagaagagaggcggcaaggaggagaucaccccccacugcgcccugauggacugcaucauguacgacgccgccgugagcggcggccugaacauccccgugcugagagccgugcugcccagagacaugguguucagaaccagcagccccaagguggugcugugaggacuagucccuguucccagagcccacuuuuuuuucuuuuuuugaaauaaaauagccugucuuucagaucucaaaggcucuuuucagagccaccaaaaaaaaaaaaaaaaaaaaaaaaaaaaaaaaaaaaaaaaaaaaaaaaaaaaaaaaaaaaaaaaagaauu

SEQ ID NO: 19825 - RNA, 2021 nt, Artificial Sequence
  mRNA product Design a-2 (hSL-A64-N5) comprising derived and/or modified sequence from LASV(Nig08-04;Clade II)__ADU56611__SP-HsALB_NP(2-569) (opt4)
aggagaguccgcucagccagguugcagaagcggcuuagcguguguccuaaucuucucucugcguguagguaggccugugccgcaaacaagcuuaccaugaagugggugaccuucaucagccugcuguuccuguucagcagcgccuacagcagcgccagcaaggaggugaagagcuuccuguggacccagagccugagaagagagcugagcggcuacugcagcaacaucaagcugcagguggugaaggacgcccaggcccugcugcacggccuggacuucagcgaggugagcaacgugcagagacugaugagaaagcagaagagagacgacggcgaccugaagagacugagagaccugaaccaggccgugaacaaccugguggagcugaagagcacccagcagaagagcgugcugagagugggcacccugaccagcgacgaccugcugacccuggccgccgaccuggagaagcugaagagcaaggugaucagaaccgagagaccccugagcagcggcguguacaugggcaaccugagcacccagcagcuggagcagagaaaggcccugcugagcaugaucggcauggugggcggcgcccagggcacccagcccggcagagacggcguggugagagugugggacgugaagaaccccgaccugcugaacaaccaguucggcaccaugcccagccugacccuggccugccugaccaagcagggccagguggaccugaacgacgccgugcuggcccugaccgaccugggccugaucuacaccgccaaguaccccaacagcagcgaccuggacagacugagccagagccaccccauccugaacaugguggacaccaagaagagcagccugaacaucagcggcuacaacuucagccugggcgccgccgugaaggccggcgccugcaugcuggacggcggcaacaugcuggagaccaucaaggugaccccccagaccauggacggcauccugaagagcauccugaaggugaagagaagccugggcauguucgugagcgacacccccggcgagagaaaccccuacgagaacauccuguacaagaucugccugagcggcgacggcuggcccuacaucgccagcagaaccagcaucgugggcagagccugggagaacaccaccguggaccuggagagcgacggcaagccccagaaggugggcaccgccggcagcaacaagagccugcagagcgccggcuuccccaccggccugaccuacagccagcugaugacccugaaggacagcaugaugcagcuggaccccagcgccaagaccuggaucgacaucgagggcagacccgaggaccccguggagaucgcccuguaccagcccaugagcggcugcuacauccacuucuucagagagcccaccgaccugaagcaguucaagcaggacgccaaguacagccacggcaucgacgugaccgaccuguucagcgcccagcccggccugaccagcgccgugaucgaggcccugcccagaaacauggugcugaccugccagggcagcgacgacaucaagaagcugcuggacagccagggcagaagagacaucaagcugaucgacaucagccugaacaaggccgacagcagaagauucgagaacgccgugugggaccagugcaaggaccugugccacaugcacaccggcguggugguggagaagaagaagagaggcggcaaggaggagaucaccccccacugcgcccugauggacugcaucauguucgacgccgccgugagcggcggccugaacauccccauccugagagccgugcugcccagagacaugguguucagaaccagcagccccaagguggugcugugaggacuagucccuguucccagagcccacuuuuuuuucuuuuuuugaaauaaaauagccugucuuucagaucucaaaggcucuuuucagagccaccaaaaaaaaaaaaaaaaaaaaaaaaaaaaaaaaaaaaaaaaaaaaaaaaaaaaaaaaaaaaaaaaagaauu

SEQ ID NO: 19826 - RNA, 2024 nt, Artificial Sequence
  mRNA product Design a-2 (hSL-A64-N5) comprising derived and/or modified sequence from LASV(GA391;Clade III)__AAA46284__SP-HsALB_NP(2-570) (opt4)
aggagaguccgcucagccagguugcagaagcggcuuagcguguguccuaaucuucucucugcguguagguaggccugugccgcaaacaagcuuaccaugaagugggugaccuucaucagccugcuguuccuguucagcagcgccuacagcagcgccagcaaggaggugagaagcugccuguggacccagagccugagaagagagcugagcggcuacugcagcaacaucaagcugcagguggugaaggacgcccaggcccugcugcacggccuggacuucagcgaggugagcaacgugcagagacugaugagaaagcagaagagagacgacggcgaccugaagagacugagagaccugaaccaggccgugaacaaccugguggagcugaagagcacccagcagaagagcgugcugagagugggcacccugagcagcgacgaccugcugauccuggccgccgaccuggagaagcugaagagcaaggugaccagaaccgagagaccccugagcagcggcguguacaugggcaaccugagcagccagcagcuggaccagagaagagcccugcugaacaugaucggcaugaccggcgugagcggcggcggcaagggcgccagcaacggcaucgugagagugugggacgugaagaacgccgagcugcugaacaaccaguucggcaccaugcccagccugacccuggccugccugaccaagcagggccagguggaccugaacgacgccgugcaggcccugaccgaccugggccugaucuacaccgccaaguaccccaacagcagcgaccuggacagacugagccagagccaccccauccugaacaugaucgacaccaagaagagcagccugaacaucagcggcuacaacuucagccugggcgccgccgugaaggccggcgccugcaugcuggacggcggcaacaugcuggagaccaucaaggugagcccccagaccauggacggcauccugaagagcauccugaaggugaagaagagccugggcauguucgugagcgacacccccggcgagagaaaccccuacgagaacauccuguacaagaucugccugagcggcgacggcuggagcuacaucgccagcagaaccagcaucgugggcagagccugggagaacaccgugguggaccuggagcaggacaacaagccccagaagaucggcaacggcggcagcaacaagagccugcagagcgccggcuucgccgccggccugaucuacagccagcugaugacccugaaggacuucaagugcuucaaccugauccccaacgccaagaccuggauggacaucgagggcagacccgaggaccccguggagaucgcccuguaccagcccagcagcggcugcuacgugcacuucuucagagagcccaccgaccugaagcaguucaagcaggacgccaaguacagccacggcagagacgugaccgaccuguucgccgcccagcccggccugaccagcgccgugaucgaggcccugcccagaaacauggugaucaccugccagggcagcgaggacaucagaaagcugcuggagagccagggcagaagagacaucaagcugaucgacaucacccugagcaaggccgacagcagaaaguucgagaacgccgugugggaccaguucaaggaccugugccacaugcacaccggcguggugguggagaagaagaagagaggcggcaaggaggagaucaccccccacugcgcccugauggacugcaucauguucgacgccgccgugagcggcggccuggacgccaaggugcugagaguggugcugcccagagacaugguguucagaaccagcacccccaagguggugcugugaggacuagucccuguucccagagcccacuuuuuuuucuuuuuuugaaauaaaauagccugucuuucagaucucaaaggcucuuuucagagccaccaaaaaaaaaaaaaaaaaaaaaaaaaaaaaaaaaaaaaaaaaaaaaaaaaaaaaaaaaaaaaaaaagaauu

SEQ ID NO: 19827 - RNA, 2021 nt, Artificial Sequence
  mRNA product Design a-2 (hSL-A64-N5) comprising derived and/or modified sequence from LASV(Nig08-A19;Clade III)__ADU56619__SP-HsALB_NP(2-569) (opt4)
aggagaguccgcucagccagguugcagaagcggcuuagcguguguccuaaucuucucucugcguguagguaggccugugccgcaaacaagcuuaccaugaagugggugaccuucaucagccugcuguuccuguucagcagcgccuacagcagcgccagcaaggaggugaagagcuuccuguggacccagagccugagaagagagcugagcggcuacugcagcaacaucaagcugcagguggugaaggacgcccaggcccugcugcacggccuggacuucagcgaggugagcaacgugcagagacugaugagaaagcagaagagagacgacggcgaccugaagagacugagagaccugaaccaggccgugaacaaccugguggagcugaagagcacccagcagaagagcgugcugagagugggcacccugagcagcgacgaccugcuggugcuggccgccgaccuggagaagcugaagagcaagguggugagaaccgagagaccccugagcagcggcaucuacaugggcaaccugagcagccagcagcuggaccagagaaaggcccugcugaacaugaucggcaugaccggcggcaacggcggcagaaacaccaccagcgacggcaucgugagagugugggacgugaagaacgccgagcugcugaacaaccaguucggcaccaugcccagccugacccuggccugccugaccaagcagggccagguggaccugaacgacgccgugcaggcccugaccgaccugggccugaucuacaccgccaaguaccccaacagcagcgaccuggacagacuggcccagagccaccccauccugaacaugaucgacaccaagaagagcagccugaacaucagcggcuacaacuucagccugggcgccgccgugaaggccggcgccugcaugcuggacggcggcaacaugcuggagaccaucaaggugagcccccagaccauggacggcauccugaagagcauccugaaggugaagagaagccugggcauguucaucagcgacacccccggcgagagaaaccccuacgagaacauccuguacaagaucugccugagcggcgacggcuggcccuacaucgccagcagaaccagcaucgugggcagagccugggagaacaccgugguggaccuggagagcgacaacaagccccagaagaccggcaacggcggcagcaacaagagccugcagagcgccggcuucgccgccggccugaccuacagccagcugaugacccugaaggacagcaugcugcagcuggaccccaacgccaagaccuggauggacaucgagggcagacccgaggaccccguggagaucgcccuguaccagcccagcagcggcugcuacauccacuucuucagagagcccaccgaccugaagcaguucaagcaggacgccaaguacagccacggcaucgacgugaccgaccuguucgccgcccagcccggccugaccagcgccgugaucgaggcccugcccagaaacauggugaucaccugccagggcagcgaggacaucagaaagcugcuggagagccagggcagaagagacaucaagcugaucgacaucagccugagcaagguggacagcagaaaguucgagaacgccgugugggaccaguucaaggaccugugccacaugcacaccggcaucgugguggagaagaagaagagaggcggcaaggaggagaucaccccccacugcgcccugauggacugcaucauguucgacgccgccgugagcggcggcguggacgccaaggugcugagagccgugcugcccagagacaugguguucagaaccagcacccccaagguggugcugugaggacuagucccuguucccagagcccacuuuuuuuucuuuuuuugaaauaaaauagccugucuuucagaucucaaaggcucuuuucagagccaccaaaaaaaaaaaaaaaaaaaaaaaaaaaaaaaaaaaaaaaaaaaaaaaaaaaaaaaaaaaaaaaaagaauu

SEQ ID NO: 19828 - RNA, 2021 nt, Artificial Sequence
  mRNA product Design a-2 (hSL-A64-N5) comprising derived and/or modified sequence from LASV(G1180-SLE-2010;Clade IV)__AIT17169__SP-HsALB_NP(2-569) (opt4)
aggagaguccgcucagccagguugcagaagcggcuuagcguguguccuaaucuucucucugcguguagguaggccugugccgcaaacaagcuuaccaugaagugggugaccuucaucagccugcuguuccuguucagcagcgccuacagcagcgccagcaaggagaucaagagcuuccuguggacccagagccugagaagagagcugagcggcuacugcagcaacaucaagcugcagguggugaaggacgcccaggcccugcugcacggccuggacuucagcgaggugagcaacgugcagagacugaugagaaaggagagaagagacgacaacgaccugaagagacugagagaccugaaccaggccgugaacaaccugguggagcugaagagcacccagcagaagagcauccugagagugggcacccugaccagcgacgaccugcugauccuggccgccgaccuggagaagcugaagagcaaggugaucagaaccgagagaccccugagcgccggcguguacaugggcaaccugagcagccagcagcuggaccagagaagagcccugcugagcaugaucggcaugagcagcggcaaccagagagcccaggccggcagagacggcguggugagagugugggacgugaagaacguggagcugcugaacaaccaguucggcaccaugcccagccugacccuggccugccugaccaagcagggccagguggaccugaacgacgccgugcaggcccugaccgaccugggccugaucuacaccgccaaguaccccaacaccagcgaccuggacagacugacccagagccaccccauccugaacaugaucgacaccaagaagagcagccugaacaucagcggcuacaacuucagccugggcgccgccgugaaggccggcgccugcaugcuggacggcggcaacaugcuggagaccaucaaggugagcccccagaccauggacggcauccugaagagcauccugaaggugaagaaggcccugggcauguucaucagcgacacccccggcgagagaaaccccuacgagaacauccuguacaagaucugccugagcggcgacggcuggcccuacaucgccagcagaaccagcaucaccggcagagccugggagaacaccgugguggaccuggagagcgacggcaagccccagaaggccggcagcaacaacagcaacaagagccugcagagcgugggcuucaccgccggccugaccuacagccagcugaugacccugaaggacgccaugcugcagcuggaccccaacgccaagaccuggauggacaucgagggcagacccgaggaccccguggagaucgcccuguaccagcccagcagcggcugcuacauccacuucuucagagagcccaccgaccugaagcaguucaagcaggacgccaaguacagccacggcaucgacgugaccgaccuguucgccgcccagcccggccugaccagcgccgugaucgacgcccugcccagaaacauggugaucaccugccagggcagcgacgacaucagaaagcugcuggagagccagggcagaaaggacaucaagcugaucgacaucgcccugagcaagaccgacagcagaaaguacgagaacgccgugugggaccaguacaaggaccugugccacaugcacaccggcguggugguggagaagaagaagagaggcggcaaggaggagaucaccccccacugcgcccugauggacugcaucauguucgacgccgccgugagcggcggccugaacaccagcgugcugagagccgugcugcccagagacaugguguucagaaccagcacccccagaguggugcugugaggacuagucccuguucccagagcccacuuuuuuuucuuuuuuugaaauaaaauagccugucuuucagaucucaaaggcucuuuucagagccaccaaaaaaaaaaaaaaaaaaaaaaaaaaaaaaaaaaaaaaaaaaaaaaaaaaaaaaaaaaaaaaaaagaauu

SEQ ID NO: 19829 - RNA, 2021 nt, Artificial Sequence
  mRNA product Design a-2 (hSL-A64-N5) comprising derived and/or modified sequence from LASV(G1442-SLE-2011;Clade IV)__AIT17181__SP-HsALB_NP(2-569) (opt4)
aggagaguccgcucagccagguugcagaagcggcuuagcguguguccuaaucuucucucugcguguagguaggccugugccgcaaacaagcuuaccaugaagugggugaccuucaucagccugcuguuccuguucagcagcgccuacagcagcgccagcaaggaggugaagagcuuccuguggacccagagccugagaagagagcugagcggcuacugcagcaacaucaagcugcagguggugaaggacgcccaggcccugcugcacggccuggacuucagcgaggugagcaacgugcagagacugaugagaaagcagagaagagacgacaacgaccugaagagacugagagaccugaaccaggccgugaacaaccugguggagcugaagagcacccagcagaagagcgugcugagagugggcacccugaccagcgacgaccugcuggugcuggccgccgaccuggagaagcugaagagcaaggugaucagaaccgagagaccccugagcgccggcguguacaugggcaaccugagcagccagcagcuggaccagagaagagcccugcugaacaugaucggcaugagcggcggcauccagggcaccagaaccggcagagacggcguggugagagugugggacgugaagaacgccgaccugcugaacaaccaguucggcaccaugcccagccugacccuggccugccugaccaagcagggccagguggaccugaacgacguggugcaggcccugaccgaccugggccugaucuacaccgccaaguaccccaacgccagcgaccuggacagacugacccagagccaccccauccugaacaugaucgacaccaagaagagcagccugaacaucagcggcuacaacuucagccugggcgccgccgugaaggccggcgccugcaugcuggacggcggcaacaugcuggagaccaucaaggugagcccccagaccauggacggcauccugaagagcauccugaaggugaagaagacccugggcauguucaucagcgacacccccggcgagagaaaccccuacgagaacauccuguacaagaucugccugagcggcgacggcuggcccuacaucgccagcagaaccagcaucaccggcagagccugggagaacaccgugguggaccuggagagcgacggcaagccccagaaggccggcagcaacaacagcaacaagagccugcagagcgccggcuucgccgccggccugaccuacagccagcugaugacccugaaggacgccaugcugcagcuggaccccaacgccaagaccuggauggacaucgagggcagacccgaggaccccguggagaucgcccuguaccagcccagcagcggcugcuacauccacuucuucagagagcccaccgaccugaagcaguucaagcaggacgccaaguacagccacggcaucgacgugaccgaccuguucgccgcccagcccggccugaccagcgccgugaucgaggcccugcccagaaacauggugaucaccugccagggcagcgacgacaucaagaagcugcuggagagccagggcagaaaggacaucaagcugaucgacaucgcccugagcaagaccgacagcagaaaguacgagaacgccgugugggaccaguacaaggaccugugccacaugcacaccggcguggugguggagaagaagaagagaggcggcaaggaggagaucaccccccacugcgcccugauggacugcaucauguucgacgccgccgugagcggcggccugaacacccuggugcugagagccgugcugcccagagacaugguguucagaaccagcacccccagaguggugcugugaggacuagucccuguucccagagcccacuuuuuuuucuuuuuuugaaauaaaauagccugucuuucagaucucaaaggcucuuuucagagccaccaaaaaaaaaaaaaaaaaaaaaaaaaaaaaaaaaaaaaaaaaaaaaaaaaaaaaaaaaaaaaaaaagaauu

SEQ ID NO: 19830 - RNA, 2021 nt, Artificial Sequence
  mRNA product Design a-2 (hSL-A64-N5) comprising derived and/or modified sequence from LASV(G3010-SLE-2013;Clade IV)__AIT17345__SP-HsALB_NP(2-569) (opt4)
aggagaguccgcucagccagguugcagaagcggcuuagcguguguccuaaucuucucucugcguguagguaggccugugccgcaaacaagcuuaccaugaagugggugaccuucaucagccugcuguuccuguucagcagcgccuacagcagcgccagcaaggagaucaagagcuuccuguggacccagagccugagaagagagcugagcggcuacugcagcaacaucaagcugcagguggugaaggacgcccaggcccugcugcacggccuggacuucagcgaggugagcaacgugcagagacugaugagaaaggagagaagagacgacaacgaccugaagagacugagagaccugaaccaggccgugaacaaccugguggagcugaagagcacccagcagaagagcauccugagagugggcacccugaccagcgacgaccugcugauccuggccgccgaccuggagaagcugaagagcaaggugaccagaaccgagagaccccugagcgccggcguguacaugggcaaccugagcagccagcagcuggaccagagaagagcccugcugagcaugaucggcaugagcagcggcgugcagggcgccagagccggcagagacggcguggugagagugugggacgugaagaacgccgagcugcugaacaaccaguucggcaccaugcccagccugacccuggccugccugaccaagcagggccagguggaccugaacgacguggugcaggcccugaccgaccugggccugaucuacaccgccaaguaccccaacaccagcgaccuggacagacugacccagagccaccccauccugaacaugaucgacaccaagaagagcagccugaacaucagcggcuacaacuucagccugggcgccgccgugaaggccggcgccugcaugcuggacggcggcaacaugcuggagaccaucaaggugagcccccagaccauggacggcauccugaagagcauccugaaggugaagaaggcccugggcauguucaucagcgagacccccggcgagagaaaccccuacgagaacauccuguacaagaucugccugagcggcgacggcuggcccuacaucgccagcagaaccagcaucaccggcagagccugggagaacaccgugguggaccuggagagcgacggcaagccccagaaggccggcagcaacaacagcaacaagagccugcagagcgccggcuucaccgccggccugaccuacagccagcugaugacccugaaggacgccaugcugcagcuggaccccaacgccaagaccuggauggacaucgagggcagacccgaggaccccguggagguggcccuguaccagcccagcagcggcugcuacauccacuucuucagagagcccaccgaccugaagcaguucaagcaggacgccaaguacagccacggcaucgacgugaccgaccuguucgccgcccagcccggccugaccagcgccgugaucgacgcccugcccagaaacauggugaucaccugccagggcagcgacgacaucaagaagcugcuggagagccagggcagaaaggacaucaagcugaucgacaucgcccugagcaagaccgacagcagaaaguacgagaacgccgugugggaccaguacaaggaccugugccacaugcacaccggcguggugguggagaagaagaagagaggcggcaaggaggagaucaccccccacugcgcccugauggacugcaucauguucgacgccgccgugagcggcggccugaacaccagcgugcugagagccgugcugcccagagacaugguguucagaaccagcacccccagaguggugcugugaggacuagucccuguucccagagcccacuuuuuuuucuuuuuuugaaauaaaauagccugucuuucagaucucaaaggcucuuuucagagccaccaaaaaaaaaaaaaaaaaaaaaaaaaaaaaaaaaaaaaaaaaaaaaaaaaaaaaaaaaaaaaaaaagaauu

SEQ ID NO: 19831 - RNA, 2021 nt, Artificial Sequence
  mRNA product Design a-2 (hSL-A64-N5) comprising derived and/or modified sequence from LASV(G502-SLE-2009;Clade IV)__AIT17127__SP-HsALB_NP(2-569) (opt4)
aggagaguccgcucagccagguugcagaagcggcuuagcguguguccuaaucuucucucugcguguagguaggccugugccgcaaacaagcuuaccaugaagugggugaccuucaucagccugcuguuccuguucagcagcgccuacagcagcgccagcaaggagaucaagagcuuccuguggacccagagccugagaagagagcugagcggcuacugcagcaacaucaagcugcagguggugaaggacgcccaggcccugcugcacggccuggacuucagcgaggugagcaacgugcagagacugaugagaaaggagagaagagacgacaacgaccugaagagacugagagaccugaaccaggccgugaacaaccugguggagcugaagagcacccagcagaagagcauccugagagugggcacccugaccagcgacgaccugcugauccuggccgccgaccuggagaagcugaagagcaaggugaucagaaccgagagaccccugagcgccggcguguacaugggcaaccugagcagccagcagcuggaccagagaagagcccugcugagcaugaucggcaugagcggcggcaaccagggcgugagagccggcaaggacggcguggugagagugugggacgugaagaacgccgagcugcugaacaaccaguucggcaccaugcccagccugacccuggccugccugaccaagcagggccagguggaccugaacgacgccgugcaggcccugaccgaccugggccugaucuacaccgccaaguaccccaacaccagcgaccuggacagacugacccagagccaccccauccugaacaugaucgacaccaagaagagcagccugaacaucagcggcuacaacuucagccugggcgccgccgugaaggccggcgccugcaugcuggacggcggcaacaugcuggagaccaucaaggugagcccccagaccauggacggcauccugaagagcauccugaaggugaagaaggcccugggcauguucaucagcgacacccccggcgagagaaaccccuacgagaacauccuguacaagaucugccugagcggcgacggcuggcccuacaucgccagcagaaccagcaucaccggcagagccugggagaacaccgugguggaccuggagagcgacggcaagccccagaaggccggcagcaacaacagcaacaagagccugcagagcgccggcuucaccgccggccugaccuacagccagcugaugacccugaaggacgccaugcugcagcuggaccccaacaccaagaccuggauggacaucgagggcagacccgaggaccccguggagaucgcccuguaccagcccagcagcggcugcuacauccacuucuucagagagcccaccgaccugaagcaguucaagcaggacgccaaguacagccacggcaucgacgugaccgaccuguucgccgcccagcccggccugaccagcgccgugaucgacgcccugcccagaaacauggugaucaccugccagggcagcgacgacaucagaaagcugcuggagagccagggcagaaaggacaucaagcugaucgacaucgcccugaacaagaccgacagcagaaaguacgagaacgccgugugggaccaguacaaggaccugugccacaugcacaccggcguggugguggagaagaagaagagaggcggcaaggaggagaucaccccccacugcgcccugauggacugcaucauguucgacgccgccgugagcggcggccugaacaccagcgugcugagagccgugcugcccagagacaugguguucagaaccagcacccccagaguggugcugugaggacuagucccuguucccagagcccacuuuuuuuucuuuuuuugaaauaaaauagccugucuuucagaucucaaaggcucuuuucagagccaccaaaaaaaaaaaaaaaaaaaaaaaaaaaaaaaaaaaaaaaaaaaaaaaaaaaaaaaaaaaaaaaaagaauu

SEQ ID NO: 19832 - RNA, 2021 nt, Artificial Sequence
  mRNA product Design a-2 (hSL-A64-N5) comprising derived and/or modified sequence from LASV(G733-SLE-2010;Clade IV)__AIT17155__SP-HsALB_NP(2-569) (opt4)
aggagaguccgcucagccagguugcagaagcggcuuagcguguguccuaaucuucucucugcguguagguaggccugugccgcaaacaagcuuaccaugaagugggugaccuucaucagccugcuguuccuguucagcagcgccuacagcagcgccagcaaggagaucaagagcuuccuguggacccagagccugagaagagagcugagcggcuacugcagcaacaucaagcugcagguggugaaggacgcccaggcccugcugcacggccuggacuucagcgaggugagcaacgugcagagacugaugagaaaggagagaagagacgacaacgaccugaagagacugagagaccugaaccaggccgugaacaaccugguggagcugaagagcacccagcagaagagcgugcugagagugggcacccugaccagcgacgagcugcuggugcuggccgccgaccuggagaagcugaagagcaaggugaucagaaccgagagaccccugagcgccggcguguacaugggcaaccugagcagccagcagcuggaccagagaagagcccugcugagcaugaucggcaugagcggcggcaaccagggcgccagaaccggcagagacggcguggugagagugugggacgugaagaacgccgagcugcugaacaaccaguucggcaccaugcccagccugacccuggccugccugaccaagcagggccagguggaccugaacgacgccgugcaggcccugaccgaccugggccugaucuacaccgccaaguaccccaacaccagcgaccuggacagacugacccagagccaccccauccugaacaugaucgacaccaagaagagcagccugaacaucagcggcuacaacuucagccugggcgccgccgugaaggccggcgccugcaugcuggacggcggcaacaugcuggagaccaucaaggugagcccccagaccauggacggcauccugaagagcauccugaaggugaagaaggcccugggcauguucaucagcgacacccccggcgagagaaaccccuacgagaacauccuguacaagaucugccugagcggcgacggcuggcccuacaucgccagcagaaccagcaucaccggcagagccugggagaacaccgugguggaccuggagagcgacggcaagccccagaaggccggcagcaacaacagcaacaagagccugcagagcgccggcuucaccgccggccugaccuacagccagcugaugacccugaaggacgccaugcugcagcuggaccccaacgccaagaccuggauggacaucgagggcagacccgaggaccccguggagaucgcccuguaccagcccagcagcggcugcuacauccacuucuucagagagcccaccgaccugaagcaguucaagcaggacgccaaguacagccacggcaucgacgugaccgaccuguucgccgcccagcccggccugaccagcgccgugaucgacgcccugcccagaaacauggugaucaccugccagggcagcgacgacaucagaaagcugcuggagagccagggcagaaaggacaucaagcugaucgacaucgcccugagcaagaucgacagcagaaaguacgagaacgccgugugggaccaguacaaggaccugugccacaugcacaccggcguggugguggagaagaagaagagaggcggcaaggaggagaucaccccccacugcgcccugauggacugcaucauguucgacgccgccgugagcggcggccugaacagccuggugcugagagccgugcugcccagagacaugguguucagaaccagcacccccagaguggugcugugaggacuagucccuguucccagagcccacuuuuuuuucuuuuuuugaaauaaaauagccugucuuucagaucucaaaggcucuuuucagagccaccaaaaaaaaaaaaaaaaaaaaaaaaaaaaaaaaaaaaaaaaaaaaaaaaaaaaaaaaaaaaaaaaagaauu

SEQ ID NO: 19833 - RNA, 2021 nt, Artificial Sequence
  mRNA product Design a-2 (hSL-A64-N5) comprising derived and/or modified sequence from MOPV/LASV reassortant(IGS-1;Clade IV)__AFY05578__SP-HsALB_NP(2-569) (opt4)
aggagaguccgcucagccagguugcagaagcggcuuagcguguguccuaaucuucucucugcguguagguaggccugugccgcaaacaagcuuaccaugaagugggugaccuucaucagccugcuguuccuguucagcagcgccuacagcagcgccagcaaggagaucaagagcuuccuguggacccagagccugagaagagagcugagcggcuacugcagcaacaucaagcugcagguggugaaggacgcccaggcccugcugcacggccuggacuucagcgaggugagcaacgugcagagacugaugagaaaggagagaagagacgacaacgaccugaagagacugagagaccugaaccaggccgugaacaaccugguggagcugaagagcacccagcagaagagcauccugagagugggcacccugaccagcgacgaccugcugauccuggccgccgaccuggagaagcugagaagcaaggugaucagaaccgagagaccccugagcgccggcguguacaugggcaaccugagcagccagcagcuggaccagagaagagcccugcugaacaugaucggcaugagcggcggcaaccagggcgccagagccggcagagacggcguggugagagugugggacgugaagaacgccgagcugcugagcaaccaguucggcaccaugcccagccugacccuggccugccugaccaagcagggccagguggaccugaacgacgccgugcaggcccugaccgaccugggccugaucuacaccgccaaguaccccaacaccagcgaccuggacagacugacccagagccaccccauccugaacaugaucgacaccaagaagagcagccugaacaucagcggcuacaacuucagccugggcgccgccgugaaggccggcgccugcaugcuggacggcggcaacaugcuggagaccaucaaggugagcccccagaccauggacggcauccugaagagcauccugaaggugaagaaggcccugggcauguucaucagcgacacccccggcgagagaaaccccuacgagaacauccuguacaagaucugccugagcggcgacggcuggcccuacaucgccagcagaaccagcaucaccggcagagccugggagaacaccgugguggaccuggagagcgacggcaagccccagaaggccgacagcaacaacagcagcaagagccugcagagcgccggcuucaccgccggccugaccuacagccagcugaugacccugaaggacgccaugcugcagcuggaccccaacgccaagaccuggauggacaucgagggcagacccgaggaccccguggagaucgcccuguaccagcccagcagcggcugcuacauccacuucuucagagagcccaccgaccugaagcaguucaagcaggacgccaaguacagccacggcaucgacgugaccgaccuguucgccacccagcccggccugaccagcgccgugaucgacgcccugcccagaaacauggugaucaccugccagggcagcgacgacaucagaaagcugcuggagagccagggcagaaaggacaucaagcugaucgacaucgaccugagcaagaccgacagcagaaaguacgagaacgccgugugggaccaguacaaggaccugugccacaugcacaccggcguggugguggagaagaagaagagaggcggcaaggaggagaucaccccccacugcgcccugauggacugcaucauguucgacgccgccgugagcggcggccugaacaccagcgugcugagagccgugcugcccagagacaugguguucagaaccagcacccccagaguggugcugugaggacuagucccuguucccagagcccacuuuuuuuucuuuuuuugaaauaaaauagccugucuuucagaucucaaaggcucuuuucagagccaccaaaaaaaaaaaaaaaaaaaaaaaaaaaaaaaaaaaaaaaaaaaaaaaaaaaaaaaaaaaaaaaaagaauu

SEQ ID NO: 19834 - RNA, 2021 nt, Artificial Sequence
  mRNA product Design a-2 (hSL-A64-N5) comprising derived and/or modified sequence from LASV(LM765-SLE-2012;Clade IV)__AIT17815__SP-HsALB_NP(2-569) (opt4)
aggagaguccgcucagccagguugcagaagcggcuuagcguguguccuaaucuucucucugcguguagguaggccugugccgcaaacaagcuuaccaugaagugggugaccuucaucagccugcuguuccuguucagcagcgccuacagcagcgccagcaaggagaucaagagcuuccuguggacccagagccugagaagagagcugagcggcuacugcagcaacaucaagcugcagguggugaaggacgcccaggcccugcugcacggccuggacuucagcgaggugagcaacgugcagagacugaugagaaaggagagaagagacgacaacgaccugaagagacugagagaccugaaccaggccgugaacaaccugguggagcugaagagcacccagcagaagagcauccugagagugggcacccugaccagcgacgaccugcugauccuggccgccgaccuggagaagcugaagagcaaggugaccagaaccgagagaccccugagcgccggcguguacaugggcaaccugagcagccagcagcuggaccagagaagagcccugcuggacaugaucggcaugagcggcagcaaccagggcgccagagccggcagagacggcguggugagagugugggacgugaagaacgccgagcugcugaacaaccaguucggcaccaugcccagccugacccuggccugccugaccaagcagggccagguggaccugaacgacgccgugcaggcccugaccgaccugggccugaucuacaccgccaaguaccccaacaccagcgaccuggacagacugacccagagccaccccauccugaacaugaucgacaccaagaagagcagccugaacaucagcggcuacaacuucagccugggcgccgccgugaaggccggcgccugcaugcuggacggcggcaacaugcuggagaccaucaaggugagcccccagaccauggacggcauccugaagagcauccugaaggugaagaaggcccugggcauguucaucagcgacgcccccggcgagagaaaccccuacgagaacauccuguacaagaucugccugagcggcgacggcuggcccuacaucgccagcagaaccagcaucaccggcagagccugggagaacaccgugguggaccuggagagcgacggcaagccccagaaggccggcagcaacggcagcaacaagagccugcagagcgccggcuucaccgccggccugaccuacagccagcugaugacccugaaggacgccaugcugcagcuggaccccaacgccaagaccuggauggacaucgagggcagacccgaggaccccguggagaucgcccuguaccagcccagcagcggcugcuacauccacuucuucagagagcccaccgaccugaagcaguucaagcaggacgccaaguacagccacggcaucgacgugaccgaccuguucgccgcccagcccggccugaccagcgccgugaucgacgcccugcccagaaacauggugaucaccugccagggcagcgacgacaucagaaagcuguucgagagccagggcagaaaggacaucaagcugaucgacaucgcccugagcaagaccgacagcagaaaguacgagaacgccgugugggaccaguacaaggaccugugccacaugcacaccggcaucgugguggagaagaagaagagaggcggcaaggaggagaucaccccccacugcgcccugauggacugcaucauguucgacgccgccgugagcggcggccugaacaccagcgugcugagagccgugcugcccagagacaugguguucagaaccagcacccccagaguggugcugugaggacuagucccuguucccagagcccacuuuuuuuucuuuuuuugaaauaaaauagccugucuuucagaucucaaaggcucuuuucagagccaccaaaaaaaaaaaaaaaaaaaaaaaaaaaaaaaaaaaaaaaaaaaaaaaaaaaaaaaaaaaaaaaaagaauu

SEQ ID NO: 19835 - RNA, 2021 nt, Artificial Sequence
  mRNA product Design a-2 (hSL-A64-N5) comprising derived and/or modified sequence from LASV(LM776-SLE-2012;Clade IV)__AIT17825__SP-HsALB_NP(2-569) (opt4)
aggagaguccgcucagccagguugcagaagcggcuuagcguguguccuaaucuucucucugcguguagguaggccugugccgcaaacaagcuuaccaugaagugggugaccuucaucagccugcuguuccuguucagcagcgccuacagcagcgccagcaaggagaucaagagcuuccuguggacccagagccugagaagagagcugagcagcuacugcagcaacaucaagcugcagguggugaaggacgcccaggcccugcugcacggccuggacuucagcgaggugagcaacgugcagagacugaugagaaaggagagaagagacgacaacgaccugaagagacugagagaccugaaccaggccgugaacaaccugguggagcugaagagcacccagcagaagagcauccugagagugggcacccugaccagcgacgaccugcugauccuggccgccgaccuggagaagcugaagagcaaggugaccagaaccgagagaccccugagcgccggcguguacaugggcaaccugagcagccagcagcuggaccagagaagagcccugcugagcaugaucggcaugagcggcagcaaccagggcgccagagccggcagagacggcguggugagagugugggacgugaagaacgccgagcugcugaacaaccaguucggcaccaugcccagccugacccuggccugccugaccaagcagggccagguggaccugaacgacgccgugcaggcccugaccgaccugggccugaucuacaccgccaaguaccccaacaccagcgaccuggacagacugacccagagccaccccauccugaacaugaucgacaccaagaagagcagccugaacaucagcggcuacaacuucagccugggcgccgccgugaaggccggcgccugcaugcuggacggcggcaacaugcuggagaccaucaaggugagcccccagaccauggacggcauccugaagagcauccugaaggugaagaaggcccugggcauguucaucagcgacacccccggcgagagaaaccccuacgagaacauccuguacaagaucugccugagcggcgacggcuggcccuacaucgccagcagaaccagcaucaccggcagagccugggagaacaccgugguggaccuggagagcgacggcaagccccagaaggccggcagcaacaacagcaacaagagccugcagagcgccggcuucaccgccggccugaccuacagccagcugaugacccugaaggacgccaugcugcagcuggaccccaacgccaagaccuggauggacaucgagggcagacccgaggaccccguggagguggcccuguaccagcccagcagcggcugcuacauccacuucuucagagagcccaccgaccugaagcaguucaagcaggacgccaaguacagccacggcaucgacgugaccgaccuguucgccgcccagcccggccugaccagcgccgugaucgacgcccugcccagaaacauggugaucaccugccagggcagcgacgacaucagaaagcugcuggagagccagggcagaaaggacaucaagcugaucgacaucgcccugagcaagaccgacagcagaaaguacgagaacgccgugugggaccaguacaaggaccugugccacaugcacaccggcguggugguggagaagaagaagagaggcggcaaggaggagaucaccccccacugcgcccugauggacugcaucauguucgacgccgccgugagcggcggccugaacaccagcgugcugagagccgugcugcccagagacaugguguucagaaccagcacccccagaguggugcugugaggacuagucccuguucccagagcccacuuuuuuuucuuuuuuugaaauaaaauagccugucuuucagaucucaaaggcucuuuucagagccaccaaaaaaaaaaaaaaaaaaaaaaaaaaaaaaaaaaaaaaaaaaaaaaaaaaaaaaaaaaaaaaaaagaauu

SEQ ID NO: 19836 - RNA, 2021 nt, Artificial Sequence
  mRNA product Design a-2 (hSL-A64-N5) comprising derived and/or modified sequence from LASV(Mad39;Clade IV)__ANH09723__SP-HsALB_NP(2-569) (opt4)
aggagaguccgcucagccagguugcagaagcggcuuagcguguguccuaaucuucucucugcguguagguaggccugugccgcaaacaagcuuaccaugaagugggugaccuucaucagccugcuguuccuguucagcagcgccuacagcagcgccagcaaggagaucaagagcuuccuguggacccagagccugagaagagagcugagcggcuacugcagcaacaucaagcugcagguggugaaggacgcccaggcccugcugcacggccuggacuucagcgaggugagcaacgugcagagacugaugagaaagcagagaagagacgacaacgaccugaagagacugagagaccugaaccaggccgugaacaaccugguggagcugaagagcacccagcagaagagcgugcugagagugggcacccugaccagcgacgaccugcugacccuggccgccgaccuggagaagcugaagagcaaggugaccagaaccgagagaccccugaccgccggcguguacaugggcaaccugagcagccagcagcuggaccagagaagagcccugcugaacaugaucggcaugagcggcggcaaccagggcgccagaaccggcagagacggcguggugagagugugggacgugaagaacgccgagcugcugaacaaccaguucggcaccaugcccagccugacccuggccugccugaccaagcagggccagguggaccugaacgacguggugcaggcccugaccgaccugggccugaucuacaccgccaaguaccccaacaccagcgaccuggacagacugacccagagccaccccauccugaacaugaucgacaccaacaagagcagccugaacaucagcggcuacaacuucagccugggcgccgccgugaaggccggcgccugcaugcuggacggcggcaacaugcuggagaccaucaaggugagcccccagaccauggacggcauccugaagagcauccugaaggugaagaagagccugggcauguucaucagcgacacccccggcgagagaaaccccuacgagaacauccuguacaagaucugccugagcggcgacggcuggcccuacaucgccagcagaaccagcaucaccggcagagccugggagaacaccgugguggaccuggagagcggcggcaagccccagaaggccggcagcaacaacagcaacaagagccugcagagcgccggcuucgccgccggccugaccuacagccagcugaugacccugaaggacgccaugcugcagcuggaccccaacgccaagaccuggauggacaucgagggcagacccgaggaccccguggagaucgcccuguaccagcccaucagcggcugcuacauccacuucuucagagagcccaccgaccugaagcaguucaagcaggacgccaaguacagccacggcaucgacgugaccgaccuguucgccgcccagcccggccugaccagcgccgugaucgaggcccugcccagaaacauggugaucaccugccagggcagcgacgacaucagaaagcuguucgagagccagggcagaaaggacaucaagcugaucgacaucgcccugagcaagaccgacagcagaaaguacgagaacgccgugugggaccaguacaaggaccugugccacaugcacaccggcguggugguggagaagaagaagaagggcggcaaggaggagaucaccccccacugcgcccugauggacugcaucauguucgacgccgccgugagcggcggccugaacacccuggugcugagagccgugcugcccagagacaugguguucagaaccagcacccccaagguggugcugugaggacuagucccuguucccagagcccacuuuuuuuucuuuuuuugaaauaaaauagccugucuuucagaucucaaaggcucuuuucagagccaccaaaaaaaaaaaaaaaaaaaaaaaaaaaaaaaaaaaaaaaaaaaaaaaaaaaaaaaaaaaaaaaaagaauu

SEQ ID NO: 19837 - RNA, 2021 nt, Artificial Sequence
  mRNA product Design a-2 (hSL-A64-N5) comprising derived and/or modified sequence from LASV(Z0947-SLE-2011;Clade IV)__AIT17841__SP-HsALB_NP(2-569) (opt4)
aggagaguccgcucagccagguugcagaagcggcuuagcguguguccuaaucuucucucugcguguagguaggccugugccgcaaacaagcuuaccaugaagugggugaccuucaucagccugcuguuccuguucagcagcgccuacagcagcgccagcaaggagaucaagagcuuccuguggacccagagccugagaagagagcugagcggcuacugcagcaacaucaagcugcagguggugaaggacgcccaggcccugcugcacggccuggacuucagcgaggugagcaacgugcagagacugaugagaaaggagagaagagacgacaacgaccugaagagacugagagaccugaaccaggccgugaacaaccugguggagcugaagagcacccagcagaagagcauccugagagugggcacccugaccagcgacgaccugcugauccuggccgccgaccuggagaagcugaagagcaaggugaccagaaccgagagaccccugagcgccggcguguacaugggcaaccugagcagccagcagcuggaccagagaagagcccugcugaacaugaucggcaugagcggcagcaaccagggcgccagaaccggcagagacggcguggugagagugugggacgugaagaacgccgagcugcugaacaaccaguucggcaccaugcccagccugacccuggccugccugaccaagcagggccagguggaccugaacgacgccgugcaggcccugaccgaccugggccugaucuacaccgccaaguaccccaacaccagcgaccuggacagacugacccagagccaccccauccugaacaugaucgacaccaagaagagcagccugaacaucagcggcuacaacuucagccugggcgccgccgugaaggccggcgccugcaugcuggacggcggcaacaugcuggagaccaucaaggugagcccccagaccauggacggcauccugaagagcauccugaaggugaagaaggcccugggcauguucaucagcgacgcccccggcgagagaaaccccuacgagaacauccuguacaagaucugccugagcggcgacggcuggcccuacaucgccagcagaaccagcaucaccggcagagccugggagaacaccgugguggaccuggagagcgacggcaagccccagaaggccggcagcaacggcagcaacaagagccugcagagcgccggcuucaccgccggccugaccuacagccagcugaugacccugaaggacgccaugcugcagcuggaccccaacgccaagaccuggauggacaucgagggcagacccgaggaccccguggagaucgcccuguaccagcccagcagcggcugcuacauccacuucuucagagagcccaccgaccugaagcaguucaagcaggacgccaaguacagccacggcaucgacgugaccgaccuguucgccgcccagcccggccugaccagcgccgugaucgacgcccugcccagaaacauggugaucaccugccagggcagcgacgacaucagaaagcuguucgagagccagggcagaaaggacaucaagcugaucgacaucgcccugagcaagaccgacagcagaaaguacgagaacgccgugugggaccaguacaaggaccugugccacaugcacaccggcaucgugguggagaagaagaagagaggcggcaaggaggagaucaccccccacugcgcccugauggacugcaucauguucgacgccgccgugagcggcggccugaacaccagcgugcugagagccgugcugcccagagacaugguguucagaaccagcacccccagaguggugcugugaggacuagucccuguucccagagcccacuuuuuuuucuuuuuuugaaauaaaauagccugucuuucagaucucaaaggcucuuuucagagccaccaaaaaaaaaaaaaaaaaaaaaaaaaaaaaaaaaaaaaaaaaaaaaaaaaaaaaaaaaaaaaaaaagaauu

SEQ ID NO: 19838 - RNA, 2021 nt, Artificial Sequence
  mRNA product Design a-2 (hSL-A64-N5) comprising derived and/or modified sequence from LASV(Josiah;Clade IV)__NP_694869__SP-HsALB_NP(2-569) (opt5)
aggagaguccgcucagccagguugcagaagcggcuuagcguguguccuaaucuucucucugcguguagguaggccugugccgcaaacaagcuuaccaugaagugggugaccuucaucagccugcucuuucuguucuccucugccuacagcagcgccuccaaggagaucaaaucuuuccuguggacccagagccucagacgggaacuguccggcuacugcucuaacauuaagcugcaaguggucaaagacgcucaggcccugcuccacgggcuggauuuuagcgagguuuccaaugugcagcgccuuaugagaaaggaacggcgcgacgauaacgaccugaaaagacuccgggaucugaaucaggcggugaacaaucuggucgagcucaagucuacacaacaaaagagcauccugcgcgugggaacgcuuaccuccgacgaucugcucauucuggcugccgaccuugaaaaacuuaagagcaaaguuaucagaacagagcggccccucucugccggcguguauauggggaaccuguccagccagcagcuggaucagcgcagagcucuccugaauaugauuggaaugucuggcgggaaccagggagcccgggcuggccgcgacggcgucgugagaguuugggaugugaagaaugccgagcuucugaacaaucaguucgggaccaugccuucccucacacuggcgugucuuaccaaacagggacaagucgaccugaacgaugccgugcaggcucucacagaccugggccugaucuacaccgccaaguauccgaauacgagcgaccucgaucggcugacccagucucaucccauccuuaacaugauugacacaaagaaauccagccugaauaucuccggguacaacuuuucucucggagcugccgugaaggcgggcgccugcaugcuggaugggggaaacaugcuugaaaccauuaaagucagcccucaaacaauggacggcauccugaaguccauucucaaaguuaagaaagcucugggcauguucaucagcgauacccccggggagcgcaauccuuaugaaaacauucuguacaagaucugucucucuggagacggcuggcccuauaucgccuccagaacgagcauuacagggcgggcuugggagaauaccgugguggaucuggagucugacggaaagccucagaaagccgauagcaacaauuccucuaagagccuucaguccgccggcuuuacagcugggcugaccuacagccagcucaugacccugaaagacgcgaugcugcaacuugauccgaacgccaagacauggauggacaucgaaggaagacccgaggacccugucgaaauugcucucuaccagcccucuuccggcugcuauauccacuucuuucgcgagccuacggaucugaaacaguucaagcaggacgccaaguacagccauggcauugaugugaccgaccuguuugccacacaacccgggcucaccucugcuguuaucgaugcccugccgcggaauauggugaucacaugucagggauccgacgauauuagaaaacuucuggaaagccagggccgcaaggacaucaaacucauugauaucgcgcuguccaagaccgacucucggaaauaugagaacgcugucugggaucaguacaaggaccugugccacaugcauacgggggugguuguggagaagaaaaagagaggaggcaaagaagagauuacaccucacugugcccuuauggauugcaucauguucgacgccgcugucagcgggggccucaauaccuccgugcugcgcgccguccugccccgggacaugguguuuagaaccucuacaccucgcguugugcucugaggacuagucccuguucccagagcccacuuuuuuuucuuuuuuugaaauaaaauagccugucuuucagaucucaaaggcucuuuucagagccaccaaaaaaaaaaaaaaaaaaaaaaaaaaaaaaaaaaaaaaaaaaaaaaaaaaaaaaaaaaaaaaaaagaauu

SEQ ID NO: 19839 - RNA, 2021 nt, Artificial Sequence
  mRNA product Design a-2 (hSL-A64-N5) comprising derived and/or modified sequence from LASV(LP;Clade I)__AAF86702__SP-HsALB_NP(2-569) (opt5)
aggagaguccgcucagccagguugcagaagcggcuuagcguguguccuaaucuucucucugcguguagguaggccugugccgcaaacaagcuuaccaugaagugggugaccuucaucagccugcucuuucuguucuccucugccuacagcagcaacuccaaggagaucaaaucuuuccuguggacccagagccucagacgggaacuguccggcuacugcucuaauauuaagcuccaaguggucaaagacgcccaggcucugcuccacgggcuggauuuuagcgagguuuccaacgugcagcgccuuaugagaaagcagaaacgggacgaugccgaccugaagcgccucagagaucugaaucaagcggugaacaaucuggucgaacucaagucuacacagcagaaaaacgugcugcggguuggaacgcuuagcuccgacgaucugaucacccucgcugccgaccuggagaaacuuaaaagcaaggugauucgcacagaaagaccccugucuuccggcgucuauauggggaaucucagcucucagcaacuggaucagcggcgcgcccugcucuccaugaucggaaugagcggcgggccucagggaaacagaaccggcggcgacggggugguucgggugugggaugucaaaaaugcugagcugcuuaacaaucaguucggaacaaugccgucucugacccucgccugucugacaaagcaaggccagguggaccuuaacgaugcugugcaggcccugaccgaccucgggcugauuuacacggcgaaguaucccaauuccagcgaccuggauaugcucacccaaucccauccuauccugggaauggucgacacaaagaagucuagccuuaacaucuccggcuacaauuuuagccugggggccgcuguuaaagccggagcuugcaugcucgauggcggcaacaugcuggagaccauuaaggugucuccccagacaauggacgggauccuuaaauccauucugaaggugaaacgcagccucggaauguucaucucugauaccccuggcgaaagaaaccccuaugagaauauucuguacaagaucugucugagcggggaaggauggccuuauauugccucccggacgucuaucacaggccgcgcgugggagaacacccucgucgaccuggagagcgauaauaagccgcccaaacuuaacuccgccgggagcaauaagucucugcaggcugccggacucaacgcuggccugacauacucccagcugaugacccuuaaagacugcaugcuccaacuggauccuagcucuaagaccuggaucgacauugaaggcagacccgaggauccuguggaaaucgcccuguuucagcccuccagcggguguuacauucacuucuuucgggagccgacagaccucaaacaguucaagcaggacgccaaguauucccauggaaucgauguuacggaccuguuuucuacccaaccuggccuuacaagcgcugugauugaagcgcugcccagaaauaugguccuuaccugccagggguccgaugacaucaaaaagcugcuggagucucagggacgccgggauaucaaacuuauugacaucagccucuccaaggccgauagcagaaaauucgagaacgcugugugggaccaguacaaggaucugugucacaugcauacaggcguuguggucgaaaagaaaaagcgcgggggcaaagaggaaauuaccccucacugcgcccugcucgacuguaucauguuugaugccgcuacgacaggaucucugaauauuaccacccuucgggccgugcugcccagagacauggucuuccgcacauccacccccaaggugguucucugaggacuagucccuguucccagagcccacuuuuuuuucuuuuuuugaaauaaaauagccugucuuucagaucucaaaggcucuuuucagagccaccaaaaaaaaaaaaaaaaaaaaaaaaaaaaaaaaaaaaaaaaaaaaaaaaaaaaaaaaaaaaaaaaagaauu

SEQ ID NO: 19840 - RNA, 2021 nt, Artificial Sequence
  mRNA product Design a-2 (hSL-A64-N5) comprising derived and/or modified sequence from LASV(803213;Clade II)__AAF86704__SP-HsALB_NP(2-569) (opt5)
aggagaguccgcucagccagguugcagaagcggcuuagcguguguccuaaucuucucucugcguguagguaggccugugccgcaaacaagcuuaccaugaagugggugaccuucaucagccugcucuuucuguucuccucugccuacagcagcgccuccaaggaggugaaaucuuuccuguggacccagagccucagacgggaacuguccggcuacugcucuaacaucaaacuucaagucguuaaggacgcucaggcccugcuccacgggcuggauuuuagcgaggugaauaacgugcagcgccuuaugagaaagcagaaacgggacgauggagaccugaagcgccucagagaucugaaucaagcggucaacaaucugguggaacucaaguccacacagcagaaaucuauucugcggguuggcacgcuuaccagcgacgaucugcucacacuggcugccgaccuugagaagcugaaauccaaggugauccgcaccgaaagaccccucagcucuggggucuauaugggaaaccuguccacacagcaacuggagcagcggcgcgcccuccugaauaugauuggcauggugggaggagcucagggcacccagccuggcagagaugggguugugcgggucugggacgugaaaaacccggaucuucugaauaaccaauucggaacaaugcccagccucacccuggccugucuuacgaagcagggccagguggaccugaaugaugcuguccucgcccugaccgaccuggggcucaucuacacagcgaaguauccuaacucuuccgaccuggaucgccuuagccaaucucaucccauucugaauaugguugacaccaaaaaguccagccucaacaucuccggauacaauuuuucucugggcgccgcugugaaagccggggcuugcaugcuugauggaggcaacaugcuggagacaaucaaggugaccccucagacgauggacggcauucucaaaagcauccugaaggucaaaagaucccuggggauguucgugagcgauacacccggagaacggaacccuuaugagaauauucucuacaagaucugucugucuggcgacggguggccguauauugccucccgcaccagcaucguugggagagcgugggaaaacacaaccguggaucuugagucugacggcaagccccagaaagucgggaccgccggaagcaauaagucccugcagucugcuggcuuuccuacaggccucacguacagccaacugaugacccugaaagauuccaugaugcagcuugaccccagcgccaagacauggauugauaucgaggggcggccugaagaccccguggagaucgcucucuaccagccgaugucuggaugcuauauucacuucuuuagagaaccuaccgaccugaaacaguucaagcaagaugccaaguacucccauggcaucgacguugccgaucuguuucccgcucagccugggcucacaagcgcggugauugaggcccugccccgcaacaugguccuuaccugucagggaucugacgauaucaaaaagcugcucgacucccagggccggagagauauuaaacugaucgacaucagccuguccaagguggauucucgcaaauucgaaaaugcugucugggaccaaugcaaggaucuuugucacaugcauacgggggugguuguggagaagaaaaagcggggcggaaaagaggaaauuacaccccacugcgcccucauggacuguaucauguuugaugccgcugucagcggcgggcugaacauuccugugcugagagccguucucccgcgcgacaugguguuccggaccuccucucccaaggucgugcugugaggacuagucccuguucccagagcccacuuuuuuuucuuuuuuugaaauaaaauagccugucuuucagaucucaaaggcucuuuucagagccaccaaaaaaaaaaaaaaaaaaaaaaaaaaaaaaaaaaaaaaaaaaaaaaaaaaaaaaaaaaaaaaaaagaauu

SEQ ID NO: 19841 - RNA, 2024 nt, Artificial Sequence
  mRNA product Design a-2 (hSL-A64-N5) comprising derived and/or modified sequence from LASV(GA391;Clade III)__CAA36646__SP-HsALB_NP(2-570) (opt5)
aggagaguccgcucagccagguugcagaagcggcuuagcguguguccuaaucuucucucugcguguagguaggccugugccgcaaacaagcuuaccaugaagugggugaccuucaucagccugcucuuucuguucuccucugccuacagcagcgccuccaaggaggugagaucuuuccuguggacccagagccuccggcgcgaacuguccggcuacugcucuaacaucaaacuucaagucguuaaggacgcucaggcccugcuccacgggcuggauuuuagcgagguguccaaugugcagagacuuaugcggaaacagaagcgcgacgauggagaccugaaaagacuccgggaucugaaccaagcggucaauaaccugguggaacucaagucuacacagcagaaaagcguucugcgcgugggcacgcuuuccagcgacgaucugcucauucuggcugccgaccuugagaaacugaagucuaaagucaccagaacagaacggccccucuccagcgggguguauaugggaaaucugucuucccagcaacuggaucagcgcagagcccuccugaacaugaucggcaugaccgggguuagcggaggcggcaagggggcuucugacggaauugugcgggucugggaugugaaaaaugccgagcuucugaacaaucaguucggcacaaugccuucccucacccuggcuugucuuacaaagcaggggcaaguggaccugaacgaugccguccaggcgcucaccgaccugggacugaucuacacggccaaguauccgaauagcuccgaccucgaucgccugucucagagccaucccauucuuaacaugaucgacaccaaaaaguccagccugaauaucucuggcuacaacuuuucccucggggcugccguuaaagcuggagccugcaugcuggauggcggcaauaugcuugagacaauuaaggugagcccucaaaccauggacgggauccugaaaucuauucucaaggugaaaaagagccugggaauguucgucuccgauacacccggcgaaagaaacccuuaugagaacauccuguacaagauuugucucucuggggacggauggcccuauaucgcgagccggaccuccauugugggccgcgccugggaaaauacgguuguggaucuggagcaggacaacaaaccucagaagaucgggaauggaggcagcaacaaaucucuucaguccgcuggcuuugccgcugggcugacauacagccaacucaugacccugaaggauuucaaaugcuuuaaucugaucccgaacgccaagacauggauggacauugagggaagacccgaagauccugucgagaucgcccuuuaccagcccucuuccggcuguuaugugcacuucuuucgggaaccuaccgaccucaagcaguucaaacaggacgcuaaguacagccaugggauugauguuaccgaccuguuugcggcccaacccggacugacauccgcugugaucgaggcccucccgagaaauauggucauuacgugccagggcucugaagauauccgcaaacugcuugagagccaggggcggagagacaucaagcugauugauaucacccucuccaaagccgacucucgcaaguucgagaacgcugugugggaucaguuuaaggaccugugucacaugcauacaggcgucgugguugaaaagaagaaacggggaggcaaggaggaaauuaccccucacugcgcccugauggauuguaucauguucgacgcggcugugagcgggggacuugaugccaaaguccucagagugguucugccccgcgacaugguguuccggacauccaccccuaaggucgugcugugaggacuagucccuguucccagagcccacuuuuuuuucuuuuuuugaaauaaaauagccugucuuucagaucucaaaggcucuuuucagagccaccaaaaaaaaaaaaaaaaaaaaaaaaaaaaaaaaaaaaaaaaaaaaaaaaaaaaaaaaaaaaaaaaagaauu

SEQ ID NO: 19842 - RNA, 2021 nt, Artificial Sequence
  mRNA product Design a-2 (hSL-A64-N5) comprising derived and/or modified sequence from LASV(AV;Clade V)__CCA30315__SP-HsALB_NP(2-569) (opt5)
aggagaguccgcucagccagguugcagaagcggcuuagcguguguccuaaucuucucucugcguguagguaggccugugccgcaaacaagcuuaccaugaagugggugaccuucaucagccugcucuuucuguucuccucugccuacagcagcgccuccaaggaggugaaaucuuuccuguggacccagagccucagacgggaacuguccggcuacugcucuaacaucaaacuucaagucguuaaggacgcucaggcccugcuccacgggcuggauuuuagcgagguguccaaugugcagcgccuuaugagaaagcagcggcgcgacgauucugaccugaaaagacuccgggaucugaaccaagcggucaauaaccugguggaacucaagagcacacagcagaaguccguucugcgcgugggaacgcuuagcucugacgaucugcucacccuggcugccgaccuugagaaacugaaguccaaagucacaagaaccgaacggccccucagcucuggcguguauauggggaaucuguccagccagcaacuggaucagcgcagagcccuccugaaccuuauuggaaugacaaauggcucucaggggucccaggcuggacgggacggcguugugcgcgucugggaugugaagaacgccgagcugcucaauaaccaauucggcaccaugccuagccugacacuugcuugucugaccaaacagggacagguggaccucaaugaugucguucaagcccugacggaccuggggcucaucuacaccgcgaaguauccgaacacauccgaccuggauagacuuacccagucucaucccauucugaauaugaucgacacaaagaaaagcucccucaacauuagcggcuacaauuuuucucugggggccgcugugaaggccggagcuugcaugcuugauggcgggaacaugcuggagaccaucaaaguguccccucagagcauggacggaauccucaagucuauucugaaagucaagcgggcccugggcauguucgugagcgauacgcccggcgaacgcaacccuuaugagaauauccucuacaaaauuugucuguccggggacggauggcccuauaucgcgucuagaacaagcauuguuggccgggccugggaaaacaccguggucgaucuugagacagacgggaagccucagaagaucggauccggcaauagcaacaaaucucugcaauccgcuggguuuagcgccggacucaccuacucucagcugaugacccugaaggaugcuaugcuucagcucgacccgaaugccaaaacauggauggauauugagggcagacccgaagacccuguggagguugcccuguaccagcccaucuccggcugcuauauccacuucuuucgcgaaccuacggaccugaagcaauucaaacaggaugcuaaguacagccaugggauugacaucgcggaucucuuugccgcucagcccggacugaccuccgccgugauugaggcccuuccgcggaacauggucaucacaugucagggcucugaagacauuaagaaacugcucgagagccaagggagaaaggauaucaaacugaucgacauugcucuguccaagaucgauucucgcaaauucgagaaugccgugugggaccaguauaaggaucuuugccacaugcauaccggagucgugguugaaaagaaaaagcggggcgggaaagaggaaauuacaccucacugugcgcucauggacugcaucauguuugaugcugccgugagcggcggacugaacacccugguccucagagccgugcugccccgcgacaugguuuuccggacguccacaccuagagugguccuuugaggacuagucccuguucccagagcccacuuuuuuuucuuuuuuugaaauaaaauagccugucuuucagaucucaaaggcucuuuucagagccaccaaaaaaaaaaaaaaaaaaaaaaaaaaaaaaaaaaaaaaaaaaaaaaaaaaaaaaaaaaaaaaaaagaauu

SEQ ID NO: 19843 - RNA, 2021 nt, Artificial Sequence
  mRNA product Design a-2 (hSL-A64-N5) comprising derived and/or modified sequence from LASV(Togo/2016/7082;Clade VI)__AMR44578__SP-HsALB_NP(2-569) (opt5)
aggagaguccgcucagccagguugcagaagcggcuuagcguguguccuaaucuucucucugcguguagguaggccugugccgcaaacaagcuuaccaugaagugggugaccuucaucagccugcucuuucuguucuccucugccuacagcagcaacuccaaggaggugaaaucuuuccuguggacccagagccucagacgggaacuguccggcuacugcucuaauaucaaacuucaagucguuaaagacgcccaggcucugcuccacgggcuggauuuuagcgagguguccaacgugcagcgccuuaugagaaagcagaaacgggacgauggagaccugaagcgccucagagaucugaaucaagccgucaacaaucugguggaacucaagucuguucagcagaaaagcauucugcgggugggcacacuuacguccgacgaucugcucacccuggcggcugaccuugagaagcugaaaagcaaggucacacgcaccgaaagaccccucucuuccgggguguauaugggaaaccugagcucucagcaacuggaucagcggcgcgcccuccuguccaugaucggcaugagcgggggaaaucagaacucucagccuaaaggcgacggcguugugagagucugggaugugaagaaugccgaccuucugaacaaucaauucgggacaaugccgucccucacccuggcuugucuuacaaagcagggacagguggaucugaacgacgccguccaagcucucaccgaccugggccugauuuacacggccaaauaucccaauagcuccgaucucgaccggcugucucagagccauccuauccuuaacaugauugauaccaagaaauccagccugaauaucucuggguacaacuuuucccucggagcggccaucaagacaggcgcuugcaugcuggacgggggaaacaugcuugagaccauuaaaguuacaccccagaccauggauggcauccucaagagcauucugaaagugaagcgcucucugggcauguucaucagcgacacgccuggggagagaaaucccuaugaaaacauucuguacaagaucugucucuccggagauggcuggccuuauauugccucucggacagcuaucaucgggcgcgccugggagaauaccguggucgaccuggaaagcgauuccaaaccgcagaagauuggaagcaacggcucuaauaaaucccuucaaagcgcgggguuugcccccggacugacauacucucagcucaugacccugaaggacuccaugcugcagcuugauccuaacgcuaaaaccuggaucgacauugagggcagacccgaggacccuguggaaguugcccucuuccagcccaucagcggcugcuacauucacuuuuuccgggagccgacagaucugaagcaauuuaagcaggacgcuaaauauucccaugggaucgaugugacggaccuguucgccgcccagccuggacucaccucugcugucaucgaagcgcugcccagaaauauggugcuuacaugucagggcagcgaugacauuaagaaacugcucgauucccaagggcgccgggacaucaagcugauugauguuucucugaacaaaaucgacagcagaaaguuugagaaugccgugugggaucaguacaaggaccuuugccacaugcauaccggagucguggucgaaaagaagaaaaagggcgggaaagaggagauuacaccucacugugcucuccuggauugcaucauguucgacgccgccguguccggcggacugaacgcuaccguucuccgcgccgugcugccccgggacauggucuuuagaacgagcucucccaaggugguucuuugaggacuagucccuguucccagagcccacuuuuuuuucuuuuuuugaaauaaaauagccugucuuucagaucucaaaggcucuuuucagagccaccaaaaaaaaaaaaaaaaaaaaaaaaaaaaaaaaaaaaaaaaaaaaaaaaaaaaaaaaaaaaaaaaagaauu

SEQ ID NO: 19844 - RNA, 2021 nt, Artificial Sequence
  mRNA product Design a-2 (hSL-A64-N5) comprising derived and/or modified sequence from LASV(KAK-428;Clade n.d. (VII))__ANH09741__SP-HsALB_NP(2-569) (opt5)
aggagaguccgcucagccagguugcagaagcggcuuagcguguguccuaaucuucucucugcguguagguaggccugugccgcaaacaagcuuaccaugaagugggugaccuucaucagccugcucuuucuguucuccucugccuacagcagcaacuccaaggaggugaaaucuuuccuguggacccagagccucagacgggaacuguccggcuacugcacaaauaucaaacuucaagucguuaaggacgcccaggcucugcuccacgggcuggauuuuucugaggugagcaacgugcagcgccuuaugagaaagcagaaacgggacgauaaugaccugaagcgccucagagaucugaaccaagccgucaauaaccugguggaacucaaguccguucagcagaaaucugugcugaaggucggaacgcuuaauagcgacgaucugcucacccuggcggcugaccuugagaaacugaaguccaaagugguucggacagaacgcccccucagcucuggcguguauauggggaaccuguccagccagcaacuggaucagagacgggcccuccugaauaugauuggaauggccggcgggucucagggaaaccagccuucccgcgacggcgucgugagagugugggaugucaagaaugcugaccuucugaacaaucaauucggcaccaugccgagccucacacuggccugucuuaccaagcaggggcagguugaucugaacgacguggugcucgcucugacagaccugggacucaucuacaccgccaaauaucccaauucuuccgaucuggaccggcuuagccaaaaccauccuguccugaacaugauugaugugaauaaguccucucucaacaucagcggcuacaauuuuucccugggggcggccguuaaagcuggagccugcaugcuugacggcgggaacaugcuggagacgauuaagaucagcccccagaccguggauggaauccucaaaucuauucugaaggucaaacgcgcucugggcauguucguguccgacacaccuggcgagagaaaucccuaugaaaacauccucuacaagguuugucugagcgggaauggauggccuuauauugccucucggaccagcaucgugggccgcgcgugggagaacacagucguggaucuugaauccaauaagaaccagccgaaagucgggaauaacggaucuaauaagaugcugcagagcuccggcuuugccaccgggcucacguacagccaacugaugacacugagagacucuaugcuucagcucgaucccaccgcuaaaacauggauugacaucgagggacggccugaggaucccguggaacuggcccuguuccagccuuccagcggcugcuacauucacuuuuucagagagcccaccgaccucaagcaguuuaaacaagacgcuaaguauucucauggcaucgauguuaacgaccuguucuccgcccagccggggcuuaccagcgccgugcuggaagcucucccucgcaauaugguccugacaugucagggauccgaugacauccggaagcugcuugauucucaggacagaaaagauauuaagcucaucgacauuagccuguccaaagcggaugcccgcaaguuugagaacgacgugugggaucaauucaaagaccugugccacaugcauacgggcaucguuguggaaaagaagaaaaagggagggaaacaggagaugacaccccacugugcucuccuggauugcauuauguuugacgccgccgucucuggcgggcuuaacgugccuacccugcgggcugugcuccccaccgacaugguuuucagaacaaucaccacgaaggucgugcugugaggacuagucccuguucccagagcccacuuuuuuuucuuuuuuugaaauaaaauagccugucuuucagaucucaaaggcucuuuucagagccaccaaaaaaaaaaaaaaaaaaaaaaaaaaaaaaaaaaaaaaaaaaaaaaaaaaaaaaaaaaaaaaaaagaauu

SEQ ID NO: 19845 - RNA, 2021 nt, Artificial Sequence; identical to SEQ ID NO: 19839
  mRNA product Design a-2 (hSL-A64-N5) comprising derived and/or modified sequence from LASV(Pinneo-NIG-1969;Clade I)__AIT17837__SP-HsALB_NP(2-569) (opt5)

SEQ ID NO: 19846 - RNA, 2021 nt, Artificial Sequence
  mRNA product Design a-2 (hSL-A64-N5) comprising derived and/or modified sequence from LASV(ISTH0009-NIG-2011;Clade II)__AIT17405__SP-HsALB_NP(2-569) (opt5)
aggagaguccgcucagccagguugcagaagcggcuuagcguguguccuaaucuucucucugcguguagguaggccugugccgcaaacaagcuuaccaugaagugggugaccuucaucagccugcucuuucuguucuccucugccuacagcagcguguccaaggaggucaaaucuuuccuguggacccagagccucagacgggaacuguccggcuacugcucuaacaucaaacuucaaguugugaaggacgcccaggcucugcuccacgggcuggauuuuagcgagguguccaauguccagcgccuuaugagaaagcagaaacgggacgauucugaccugaagcgccucagagaucugaaccaagccgugaauaaccugguugaacucaagagcacacagcagaaauccauucugcgggugggaacgcuuaccagcgacgaucugcucacacuggcggcugaccuugagaagcugaaaucuaaggucauccgcaccgaaagaccccucuccagcggcguguauauggggaaucugucuacacagcaacuggagcagcggcgcgcccuccugaacaugauuggaaugguuggcggggcccagggaacccagccuggcagagauggcgugguccgggugugggacgugaaaaauccggaucuucugaacaaucaauucgggacaaugcccucccucacccuggcuugucuuacgaagcagggacaggucgaccugaacgaugccguucucgcucugaccgaccugggccucaucuacacagccaaguauccuaauagcucugaccuggaucgccuuucccaaagccaucccauucugaacaugguggacaucaaaaaguccucucucaauaucagcggguacaacuuuucccugggagcggccgugaaagcuggcgccugcaugcuugaugggggaaauaugcuggagaccauuaaggucacaccucagaccauggacggcauccucaaaagcauucugaaggugaaaagaucucugggcauguucguuuccgauacgcccggggaacggaacccuuaugagaacauccucuacaagauuugucugagcggagacggcuggccguauaucgcuucucgcacaagcauuguggggagagccugggaaaauaccacagucgaucuugaguccgacggaaagccccagaaagugggcucugcggggagcaacaagucccugcagagcgccggauuuccuaccggccucaccuacucucaacugaugacacugaaagauuccaugaugcagcuugaccccagcgcuaagacguggaucgauaucgagggccggccugaagaccccguugagauugcccucuaccagccgaugucugggugcuauauccacuucuuuagagaaccuaccgaccugaaacaguucaagcaagaugcuaaguacucccauggaauugacguggccgaucuguuucccgcccagccuggccucacaagcgcugucaucgaggcgcugccccgcaauauggugcuuaccugucagggguccgacgauauuaaacggcugcucgacucucagggaagacgcgauaucaagcugaucgacauugcccugagcaaagcugauucccggagauucgaaaacgccgucugggaccaaugcaaggaucuuugucacaugcauacaggcgugguuguggagaaaaagaagcgcgggggcaaagaggaaaucacgccccacugcgcccucauggacuguauuauguaugaugcugccgucucuggaggccugaauaucccugugcugcgggcgguucucccgagagacaugguguuucgcaccagcucccccaaggucgugcugugaggacuagucccuguucccagagcccacuuuuuuuucuuuuuuugaaauaaaauagccugucuuucagaucucaaaggcucuuuucagagccaccaaaaaaaaaaaaaaaaaaaaaaaaaaaaaaaaaaaaaaaaaaaaaaaaaaaaaaaaaaaaaaaaagaauu

SEQ ID NO: 19847 - RNA, 2021 nt, Artificial Sequence
  mRNA product Design a-2 (hSL-A64-N5) comprising derived and/or modified sequence from LASV(ISTH2010-NIG-2012;Clade II)__AIT17483__SP-HsALB_NP(2-569) (opt5)
aggagaguccgcucagccagguugcagaagcggcuuagcguguguccuaaucuucucucugcguguagguaggccugugccgcaaacaagcuuaccaugaagugggugaccuucaucagccugcucuuucuguucuccucugccuacagcagcgccuccaaggaggugaaaucuuuccuguggacccagagccucagacgggaacuguccggcuacugcucuaacaucaaacuucaagucguuaaggacgcucaggcccugcuccacgggcuggauuuuagcgagguguccaaugugcagcgccuuaugagaaagcagaaacgggacgauucugaccugaagcgccucagagaucugaaccaagcggucaauaaccugguggaacucaagagcacacagcagaaauccauucugcggguuggaacgcuuaccagcgacgaucugcucacacuggcugccgaccuugagaagcugaaaucuaaggugauccgcaccgaaagaccccucuccagcggcgucuauauggggaaucugucuacacagcaacuggagcagcggcgcgcccuccugaaccuuauuggaauggugggcggggcucagggaacccagccuggcagagauggcguugugcgggucugggacgugaaaaauccggaucugcucaacaaucaauucgggacaaugcccucccugacccuugccugucugacgaagcagggacagguggaccucaacgaugcuguccuggcccugaccgaccucggccugaucuacacagcgaaguauccuaauagcucugaccuugaucgccugucccaaagccaucccauucucaacaugguugacaccaaaaaguccucucugaauaucagcggguuuaacuucucccuuggagccgcugugaaagccggcgcuugcaugcuggaugggggaaauaugcucgagacaaucaaggugaccccucagacgauggacggcauucugaaaagcauccugaaggucaaaaagucucucggcauguuuguguccgauacacccggggaaagaaacccuuacgagaacauucuguauaagaucugucuuagcggagacggcuggccguacauugccucucggaccagcaucguugggcgcgcgugggaaaauacaaccguggaucuggaguccgacggaaaaccccacaaggucggcaccgccgggucuaacaaaagccuccaguccgcuggauucccuacaggccugacguauagccagcugaugacccuuaaggauucuaugaugcaacucgaccccuccgccaaaacauggauugauaucgagggcagaccugaagaccccguggagaucgcucuguaccagccgaugagcgggugcuacauucacuuuuuccgggaaccuaccgaccugaagcaguuuaagcaggaugccaaauauucucauggaaucgacguugccgaucucuuccccgcucaaccuggccugacauccgcggugauugaggcccuucccagaaauaugguccugaccugucaggggagcgacgauaucaagcgccuccuggacucccagggacggagagauauuaaacugaucgacaucgcucuuucuaaggccgauagccgccgguuugaaaacgccgugugggaccagugcaaagaucucugucauaugcacacgggcgucgugguugagaagaagaaaagagggggcaaggaggaaauuacaccccacugcgcucugauggacuguaucauguacgaugccgcgguguccggaggccugaauauuccuguccuccgcgcugugcugccgcgggacaugguuuucagaaccucuagccccaaagugguccuuugaggacuagucccuguucccagagcccacuuuuuuuucuuuuuuugaaauaaaauagccugucuuucagaucucaaaggcucuuuucagagccaccaaaaaaaaaaaaaaaaaaaaaaaaaaaaaaaaaaaaaaaaaaaaaaaaaaaaaaaaaaaaaaaaagaauu

SEQ ID NO: 19848 - RNA, 2021 nt, Artificial Sequence
  mRNA product Design a-2 (hSL-A64-N5) comprising derived and/or modified sequence from LASV(Lassa virus/H.sapiens-wt/NGA/2015/ISTH_0543;Clade II)__AVO03640__SP-HsALB_NP(2-569) (opt5)
aggagaguccgcucagccagguugcagaagcggcuuagcguguguccuaaucuucucucugcguguagguaggccugugccgcaaacaagcuuaccaugaagugggugaccuucaucagccugcucuuucuguucuccucugccuacagcagcgccuccaaggaggugaaaucuuuccuguggacccagagccucagacgggaacuguccggcuacugcucuaacaucaaacuucaagucguuaaggacgcucaggcccugcuccacgggcuggauuuuagcgagguguccaaugugcagcgccuuaugagaaagcagaaacgggacgauucugaccugaagcgccucagagaucugaaccaagcggucaauaaccugguggaacucaagagcacacagcagaaauccauucugcggguuggaacgcuuaccagcgacgaucugcucacacuggcugccgaccuugagaagcugaaaucuaaggugauccgcaccgaaagaccccucuccagcggcgucuauauggggaaucugucuacacagcaacuggagcagcggcgcgcccuccugaacaugauuggaauggugggcggggcucagggaacccagccuggcagagauggcguugugcgggucugggacgugaaaaauccggaucuucugaacaaucaauucgggacaaugcccucccucacccuggccugucuuacgaagcagggacagguggaccugaacgaugcuguccucgcccugaccgaccugggccucaucuacacagcgaaguauccuaauagcucugaccuggaucgccuuucccaaagccaucccauucugaacaugguugacaccaaaaaguccucucucaauaucagcggguacaacuuuucccugggagccgcugugaaagccggcgcuugcaugcuugaugggggaaauaugcuggagacaaucaaggugaccccucagacgauggacggcauucucaaaagcauccugaaggucaaaaagucucugggcauguucguguccgauacacccggggaaagaaacccuuaugagaacauucucuacaagaucugucugagcggagacggcuggccguauauugccucucggaccagcaucguugggcgcgcgugggaaaauacaaccguggaucuugaguccgacggaaaaccccagaaggucggcucugccgggagcaacaaaucccugcagagcgcuggauuuccuaccggccucacauacucucaacugaugacgcugaaggauuccaugaugcagcuugaccccagcgccaaaaccuggauugauaucgagggcagaccugaagaccccguggagaucgcucucuaccagccgaugucugggugcuauauucacuucuuucgggaaccuacagaccugaagcaguucaagcaagaugccaaauacucccauggaaucgacguugccgaucuguuucccgcucagccuggccucaccagcgcggugauugaggcccugcccagaaauaugguccuuacaugucagggguccgacgauaucaagcgccugcucgacucucagggacggaaagauauuaagcugaucgacaucgcucugagcaaagccgauuccagacgcuucgaaaacgccgugugggaccaaugcaaggaucuuugucacaugcauaccggcgucgugguugagaagaaaaagagagggggcaaagaggaaauuacgccccacugcgcucucauggacuguaucauguaugaugccgcggugucuggaggccugaauauuccuguccugcgggcugugcucccgcgcgacaugguuuuucggacaagcucccccaaggugguccugugaggacuagucccuguucccagagcccacuuuuuuuucuuuuuuugaaauaaaauagccugucuuucagaucucaaaggcucuuuucagagccaccaaaaaaaaaaaaaaaaaaaaaaaaaaaaaaaaaaaaaaaaaaaaaaaaaaaaaaaaaaaaaaaaagaauu

SEQ ID NO: 19849 - RNA, 2021 nt, Artificial Sequence
  mRNA product Design a-2 (hSL-A64-N5) comprising derived and/or modified sequence from LASV(Lassa virus/H.sapiens-wt/NGA/2016/ISTH_0009;Clade II)__AVO03572__SP-HsALB_NP(2-569) (opt5)
aggagaguccgcucagccagguugcagaagcggcuuagcguguguccuaaucuucucucugcguguagguaggccugugccgcaaacaagcuuaccaugaagugggugaccuucaucagccugcucuuucuguucuccucugccuacagcagcgccuccaaggaggugaaaucuuuccuguggacccagagccucagacgggaacuguccggcuacugcucuaacaucaaacuucaagucguuaaggacgcucaggcccugcuccacgggcuggauuuuagcgagguguccaaugugcagcgccuuaugagaaagcagaaacgggacgauucugaccugaagcgccucagagaucugaaccaagcggucaauaaccugguggaacucaagagcacacagcagaaauccauucugcggguuggaacgcuuaccagcgacgaucugcucacacuggcugccgaccuugagaagcugaaaucuaaggugauccgcaccgaaagaccccucuccagcggcgucuauauggggaaucugucuacacagcaacuggagcagcggcgcgcccuccugaacaugauuggaauggugggcggggcucagggaacccagccuggcagagauggcguugugcgggucugggacgugaaaaauccggaucuucugaacaaucaauucgggacaaugcccucccucacccuggccugucuuacgaagcagggacagguggaccugaacgaugcuguccucgcccugaccgaccugggccucaucuacacagcgaaguauccuaauagcucugaccuggaucgccuuucccaaagccaucccauucugaacaugguugacaccaaaaaguccucucucaauaucagcggguacaacuuuucccugggagccgcugugaaagccggcgcuugcaugcuugaugggggaaauaugcuggagacaaucaaggugaccccucagacgauggacggcauucucaaaagcauccugaaggucaaaaagucucugggcauguucguguccgauacacccggggaaagaaacccuuaugagaacauucucuacaagaucugucugagcggagacggcuggccguauauugccucucggaccagcaucguugggcgcgcgugggaaaauacaaccguggaucuugaguccgacggaaaaccccagaaggucggcucugccgggagcaacaaaucccugcagagcgcuggauuuccuaccggccucacauacucucaacugaugacgcugaaggauuccaugaugcagcuugaccccagcgccaaaaccuggauugauaucgagggcagaccugaagaccccguggagaucgcucucuaccagccgaugucugggugcuauauucacuucuuucgggaaccuacagaccugaagcaguucaagcaagaugccaaauacucccauggaaucgacguugccgaucuguuucccgcucagccuggccucaccagcgcggugauugaggcccugcccagaaauaugguccuuacaugucagggguccgacgauaucaagcgccugcucgacucucagggacggagagauauuaaacugaucgacaucgcucugagcaaggccgauucccgccgguucgaaaacgccgugugggaccaaugcaaagaucuuugucacaugcauaccggcgucgugguugagaagaagaaaagagggggcaaggaggaaauuacgccccacugcgcucucauggacuguaucauguaugaugccgcggugucuggaggccugaauauuccuguccugcgcgcugugcucccgcgggacaugguuuuuagaacaagcucccccaaagugguccugugaggacuagucccuguucccagagcccacuuuuuuuucuuuuuuugaaauaaaauagccugucuuucagaucucaaaggcucuuuucagagccaccaaaaaaaaaaaaaaaaaaaaaaaaaaaaaaaaaaaaaaaaaaaaaaaaaaaaaaaaaaaaaaaaagaauu

SEQ ID NO: 19850 - RNA, 2021 nt, Artificial Sequence
  mRNA product Design a-2 (hSL-A64-N5) comprising derived and/or modified sequence from LASV(Lassa virus/H.sapiens-wt/NGA/2016/ISTH_0017;Clade II)__AVO03568__SP-HsALB_NP(2-569) (opt5)
aggagaguccgcucagccagguugcagaagcggcuuagcguguguccuaaucuucucucugcguguagguaggccugugccgcaaacaagcuuaccaugaagugggugaccuucaucagccugcucuuucuguucuccucugccuacagcagcgccuccaaggaggugaaaucuuuccuguggacccagagccucagacgggaacuguccggcuacugcucuagcaucaaacuucaagucguuaaggacgcucaggcccugcuccacgggcuggauuuuuccgaggugucuaacgugcagcgccuuaugagaaagcagaaacgggacgauagcgaccugaagcgccucagagaucugaaucaagcggucaacaaucugguggaacucaaguccacacagcagaaaagcauucugcggguuggaacgcuuaccucugacgaucugcucacacuggcugccgaccuugagaagcugaaauccaaggugauccgcaccgaaagaccccucagcucuggcgucuauauggggaaccuguccacacagcaacuggagcagcggcgcgcccuccugaauaugauuggaauggcuggcggggcccagggaacccagccuggcagagauggcgugguucgggugugggacgucaaaaacccggaucuucugaauaaccaauucgggacaaugcccagccucacccuggcuugucuuacgaagcagggacagguggaccugaaugaugccgugcucgcgcugaccgaccugggccucaucuacacagccaaguauccuaacucuuccgaccuggaucgccuuagccaaucccaucccauucugaauauggucgacaccaaaaagucuagccucaacaucuccggguacaauuuuagccugggagcugccguuaaagcuggcgccugcaugcuugaugggggaaacaugcuggagacaaucaaggugaccccucagacgauggacggcauucucaaaucuauccugaaggugaaaagaucccugggcauguucgucagcgaugcgcccggggaacggaauccuuaugagaacauucucuacaagaucugucugucuggagacggcuggccguauauugccagccgcacauccaucguggggagagcuugggaaaacaccacaguugaucuugagucugacggaaagccccagaaagugggcgccaccgggagcaauaagucccugcagagcgcuggauuuccuaccggccucacauacucucaacugaugacgcugaaagauuccaugaugcagcuugaccccagcgccaagaccuggauugauaucgagggccggccugaagaccccgucgagguggcccucuaccagccgguuucugggugcuauauccacuucuuuagagaaccuacagaccugaaacaguucaagcaagaugcuaaguacucccauggaauugacguggcggaucuguuucccgcccagccuggccucaccagcgcugucaucgaggcccugccccgcaacauggugcuuacaugucagggguccgacgauauuaaaaagcugcucgacucucagggacggaaagauaucaagcugauugacaucgcccugagcaaagcugauuccagacgcuucgaaaaugccgucugggaccaaugcaaggaucuuugucacaugcauaccggcgugguuguggagaagaaaaagagagggggcaaagaggaaaucacgccccacugcgcgcucauggacuguauuauguaugaugcugccgucucuggaggccugaacaucccugugcugcgggccguucucccgcgcgacaugguguuucggacaagcucccccaaggucgugcugugaggacuagucccuguucccagagcccacuuuuuuuucuuuuuuugaaauaaaauagccugucuuucagaucucaaaggcucuuuucagagccaccaaaaaaaaaaaaaaaaaaaaaaaaaaaaaaaaaaaaaaaaaaaaaaaaaaaaaaaaaaaaaaaaagaauu

SEQ ID NO: 19851 - RNA, 2021 nt, Artificial Sequence
  mRNA product Design a-2 (hSL-A64-N5) comprising derived and/or modified sequence from LASV(Lassa virus/H.sapiens-wt/NGA/2018/ISTH_0959;Clade II)__AVV65100__SP-HsALB_NP(2-569) (opt5)
aggagaguccgcucagccagguugcagaagcggcuuagcguguguccuaaucuucucucugcguguagguaggccugugccgcaaacaagcuuaccaugaagugggugaccuucaucagccugcucuuucuguucuccucugccuacagcagcgccuccaaggaggugaaaucuuuccuguggacccagagccucagacgggaacuguccggcuacugcucuaacaucaaacuucaagucguuaaggacgcucaggcccugcuccacgggcuggauuuuagcgagguguccaaugugcagcgccuuaugagaaagcagaaacgggacgauucugaccugaagcgccucagagaucugaaccaagcggucaauaaccugguggaacucaagagcacccagcagaaauccauucugcggguuggaacgcuuaccagcgacgaucugcucacacuggcugccgaccuugagaagcugaaaucuaaggugauccgcaccgaaagaccccucuccagcggcgucuauauggggaaucugucuacacagcaacuggagcagcggcgcgcccuccugaaccuuauuggaauggugggcggggcucagggaacccagccuggcagagauggcguugugcgggucugggacgugaaaaauccggaucugcucaacaaucaauucgggacaaugcccucccugacccuugccugucugacgaagcagggacagguggaccucaacgaugucguucuggcucugaccgaccucggccugaucuacacagccaaguauccuaauagcucugaccuugaucgccugucccaaagccaucccauucucaacaugguggacaccaaaaaguccucucugaauaucagcggguuuaacuucucccuuggagcggccgugaaagcuggcgccugcaugcuggaugggggaaauaugcucgagacaaucaaggucaccccucagacgauggacggcauucugaaaagcauccugaaggugaaaaagucucucggcauguuuguuuccgauacacccggggaaagaaacccuuacgagaacauucuguauaagaucugucuuagcggagacggcuggccguacauugcuucucggaccagcaucguggggcgcgccugggaaaauacaaccgucgaucuggaguccgacggaaaaccccacaaggugggcaccgcggggucuaacaaaagccuccaguccgccggauucccuacaggccugacguauagccagcugaugacccuuaaggauucuaugaugcaacucgaccccuccgcuaaaacauggauugauaucgagggcagaccugaagaccccguugagaucgcccuguaccagccgaugagcgggugcuacauucacuuuuuccgggaaccuaccgaccugaagcaguuuaagcaggaugcuaaauauucucauggaaucgacguggccgaucucuuccccgcccaaccuggccugacauccgcugucauugaggcgcuucccagaaauauggugcugaccugucaggggagcgacgauaucaagcgccuccuggacucccagggacggaaagauauuaagcugaucgacaucgcccuuucuaaaacggauagcagacgcuuugaaaacgcugucugggaccagugcaaggaucucugucauaugcacacaggcgugguuguggagaagaaaaagagagggggcaaagaggaaauuacaccccacugcgcccugauggacuguaucauguacgaugccgcugucuccggaggccugaauauuccugugcuccgggccguucugccgcgcgacaugguguuccggaccucuagccccaaggucgugcuuugaggacuagucccuguucccagagcccacuuuuuuuucuuuuuuugaaauaaaauagccugucuuucagaucucaaaggcucuuuucagagccaccaaaaaaaaaaaaaaaaaaaaaaaaaaaaaaaaaaaaaaaaaaaaaaaaaaaaaaaaaaaaaaaaagaauu

SEQ ID NO: 19852 - RNA, 2021 nt, Artificial Sequence
  mRNA product Design a-2 (hSL-A64-N5) comprising derived and/or modified sequence from LASV(LASV003-NIG-2008;Clade II)__AIT17581__SP-HsALB_NP(2-569) (opt5)
aggagaguccgcucagccagguugcagaagcggcuuagcguguguccuaaucuucucucugcguguagguaggccugugccgcaaacaagcuuaccaugaagugggugaccuucaucagccugcucuuucuguucuccucugccuacagcagcgccuccaaggaggugaaaucuuuccuguggacccagagccucagacgggaacuguccggcuacugcucuagcaucaaacuucaagucguuaaggacgcucaggcccugcuccacgggcuggauuuuuccgaggugucuaacgugcagcgccuuaugagaaagcagaaacgggacgauagcgaccugaagcgccucagagaucugaaucaagcggucaacaaucugguggaacucaaguccacccagcagaaaagcguucugcgggugggaacgcuuaccucugacgaucugcucacacuggcugccgaccuugagaagcugaaauccaaggucauucgcaccgaaagaccccucagcucuggcguguauauggggaaccuguccgcccagcaacuggagcagcggcgcacacuccugaauaugaucggaaugguuggcggggcucagggaacccagccuggcagagauggcgugguccgggugugggacgugaaaaacccggaucuucugaauaaccaauucgggacaaugcccagccucacccuggccugucuuacgaagcagggacaggucgaccugaaugauguugugcucgcucugaccgaccugggccucauuuacacagccaaguauccuaacucuuccgaccuggaucgccuuagccaaucccaucccauccugucuaugguggacaccaaaaagagcucccucaauauuagcggguacaacuuuucucugggagcggccgucaaagcuggcgccugcaugcuugaugggggaaauaugcuggagacaaucaaggugaccccucagacgauggacggcauccucaaauccauucugaagguuaaaaagagccugggcauguucgugucugauacacccggggaaagaaacccuuaugagaauauccucuacaagauuugucugagcggagacggcuggccguauaucgcuucccggaccucuauugucgggcgcgccugggaaaacacaaccguggaucuugagagcgacggaaaaccccagaagguuggcaccgcgggguccaacaaaagccugcagucugccggauuuccuacaggccucacguacucccaacugaugacccugaaggauagcaugaugcagcuugaccccucugcuaaaacauggaucgauauugagggcagaccugaagaccccguggagaucgcccucuaccagccgauguccgggugcuauauccacuucuuucgggaaccuaccgaccugaagcaguucaagcaagaugcuaaauacagccauggaauugacgucacagaucuguuucccgcccagccuggccucaccuccgccgugaucgaggcucugcccagaaauaugguccuuacgugucaggggucugacgauauuaagcgccugcucgacagccagggacggagagauaucaaacugauugacaucgcgcuguccaaggccgauucucgccgguucgaaaacgcugugugggaccaaugcaaagaucuuugucacaugcauacaggcguuguggucgagaagaagaaaagagggggcaaggaggaaaucacaccccacugcgcccucauggacuguauuauguaugaugccgcugugagcggaggccugaauaucccuguucugcgcgccgugcucccgcgggacauggucuuuagaaccuccagccccaaaguggugcugugaggacuagucccuguucccagagcccacuuuuuuuucuuuuuuugaaauaaaauagccugucuuucagaucucaaaggcucuuuucagagccaccaaaaaaaaaaaaaaaaaaaaaaaaaaaaaaaaaaaaaaaaaaaaaaaaaaaaaaaaaaaaaaaaagaauu

SEQ ID NO: 19853 - RNA, 2021 nt, Artificial Sequence
  mRNA product Design a-2 (hSL-A64-N5) comprising derived and/or modified sequence from LASV(LASV035-NIG-2009;Clade II)__AIT17589__SP-HsALB_NP(2-569) (opt5)
aggagaguccgcucagccagguugcagaagcggcuuagcguguguccuaaucuucucucugcguguagguaggccugugccgcaaacaagcuuaccaugaagugggugaccuucaucagccugcucuuucuguucuccucugccuacagcagcgccuccaaggaggugaaaucuuuccuguggacccagagccucagacgggaacuguccggcuacugcucuagcaucaaacuucaagucguuaaagacgcucaggcccugcuccacgggcuggauuuuuccgaggugucuaacgugcagcgccuuaugagaaagcagaaacgggacgauagcgaccugaagcgccucagagaucugaaucaagcggucaacaaucugguggaacucaaguccacacagcagaaaagcauucugcggguuggaacgcuuaccucugacgaucugcucacacuggcugccgaccuugagaagcugaaauccaaggugauccgcaccgaaagaccccucagcucuggcgucuauauggggaaccuguccgcccagcaacuggagcagcggcgcgcucuccugaauaugauuggaauggugggcggggcccagggaacacagccuggcagagauggcguugugcgggucugggacgugaaaaacccggaucuucugaauaaccaauucgggaccaugcccagccucacacuggcuugucuuaccaagcagggacagguggaccugaaugaugccguccucgcgcugacggaccugggccucaucuacaccgccaaguauccuaacucuuccgaccuggaucgccuuagccaaucccaucccauucugaauaugguugacacaaagaagucuagccucaacaucuccggguacaauuuuagccugggagcugccgugaaagcuggcgccugcaugcuugaugggggaaacaugcuggagaccaucaaggugacaccucagaccauggacggcauucucaaaucuauccugaaggucaaaagaucccugggcauguucgugagcgauacgcccggggaacggaauccuuaugagaacauucucuacaagaucugucugucuggagacggcuggccguauauugcgagccgcacauccaucguugggagagccugggaaaacaccacaguggaucuugagucugacggaaagccccagaaagucggcaccaccgggagcaauaagucccugcagagcgcuggauuuccuacaggccucacguacucucaacugaugacccugaaagauuccaugaugcagcuugaccccagcgccaagacauggauugauaucgagggccggccugaagaccccguggagaucgcucucuaccagccgaugucugggugcuauauucacuucuuuagagaaccuaccgaccugaaacaguucaagcaagaugccaaguacucccauggaaucgacguugccgaucuguuucccgcucagccuggccucacaagcgcggugauugaggcccugccccgcaacaugguccuuaccugucagggguccgacgauaucaaaaagcugcucgacucucagggacggagagauauuaaacugaucgacaucgcucugagcaaggccgauucccgcaaauucgaaaaugccgugugggaccaaugcaaggaucuuugucacaugcauacgggcgucgugguugagaagaaaaagagagggggcaaagaggaaauuacaccccacugcgcucucauggacuguaucauguaugaugccgcggugucuggaggccugaacauuccuguccugcgggcugugcucccgcgcgacaugguuuuucggaccagcucccccaaggugguccugugaggacuagucccuguucccagagcccacuuuuuuuucuuuuuuugaaauaaaauagccugucuuucagaucucaaaggcucuuuucagagccaccaaaaaaaaaaaaaaaaaaaaaaaaaaaaaaaaaaaaaaaaaaaaaaaaaaaaaaaaaaaaaaaaagaauu

SEQ ID NO: 19854 - RNA, 2021 nt, Artificial Sequence
  mRNA product Design a-2 (hSL-A64-N5) comprising derived and/or modified sequence from LASV(LASV1000-NIG-2009;Clade II)__AIT17783__SP-HsALB_NP(2-569) (opt5)
aggagaguccgcucagccagguugcagaagcggcuuagcguguguccuaaucuucucucugcguguagguaggccugugccgcaaacaagcuuaccaugaagugggugaccuucaucagccugcucuuucuguucuccucugccuacagcagcgccuccaaggaggugaaaucuuuccuguggacccagagccucagacgggaacuguccggcuacugcucuaacaucaaacuucaagucguuaaggacgcucaggcccugcuccacgggcuggauuuuagcgagguguccaaugugcagcgccuuaugagaaagcagaaacgggacgauucugaccugaagcgccucagagaucugaaccaagcggucaauaaccugguggaacucaagagcacacagcagaaauccauucugcggguuggaacgcuuaccagcgacgaucugcucacacuggcugccgaccuugagaagcugaaaucuaaggugauccgcaccgaaagaccccucuccagcggcgucuauauggggaaucugucuacacagcaacuggagcagcggcgcgcccuccugaacaugauuggaauggugggcggggcucagggaacccagccuggcagagauggcguugugcgggucugggacgugaaaaauccggaucuucugaacaaucaauucgggacaaugcccucccucacccuggccugucuuacgaagcagggacagguggaccugaacgaugucguucucgcucugaccgaccugggccucaucuacacagccaaguauccuaauagcucugaccuggaucgccuuucccaaagccaucccauucugaacaugguggacaccaaaaaguccucucucaauaucagcggguacaacuuuucccugggagcggccgugaaagcuggcgccugcaugcuugaugggggaaauaugcuggagacaaucaaggucaccccucagacgauggacggcauucucaaaagcauccugaaggugaaaaagucucugggcauguucguuuccgauacacccggggaaagaaacccuuaugagaacauucucuacaagaucugucugagcggagacggcuggccguauauugcuucucggaccagcaucguggggcgcgccugggaaaauacaaccgucgaucuugaguccgacggaaaaccccagaaggugggcaccgcggggucuaacaaaagccugcaguccgccggauuuccuacaggccucacguacagccaacugaugacccugaaggauucuaugaugcagcuugaccccuccgcuaaaacauggauugauaucgagggcagaccugaagaccccguugagaucgcccucuaccagccggugagcgggugcuauauucacuucuuucgggaaccuaccgaccugaagcaguucaagcaagaugcuaaauacucucauggaaucgacgucgccgaucuguuucccgcccagccuggccucacauccgcugugauugaggcgcugcccagaaauaugguccuuaccugucaggggagcgacgauaucaagcgccugcucgacucccagggacggagagauauuaaacugaucgacaucgcccugucuaaggcugauagccgccgguucgaaaacgccgugugggaccaaugcaaagaucuuugucacaugcauacgggcguuguggucgagaagaagaaaagagggggcaaggaggaaauuacaccccacugcgcccucauggacuguaucauguaugaugcugccguguccggaggccugaauauuccuguucugcgcgcggugcucccgcgggacauggucuuuagaaccucuagccccaaaguggugcugugaggacuagucccuguucccagagcccacuuuuuuuucuuuuuuugaaauaaaauagccugucuuucagaucucaaaggcucuuuucagagccaccaaaaaaaaaaaaaaaaaaaaaaaaaaaaaaaaaaaaaaaaaaaaaaaaaaaaaaaaaaaaaaaaagaauu

SEQ ID NO: 19855 - RNA, 2021 nt, Artificial Sequence
  mRNA product Design a-2 (hSL-A64-N5) comprising derived and/or modified sequence from LASV(LASV221-NIG-2010;Clade II)__AIT17625__SP-HsALB_NP(2-569) (opt5)
aggagaguccgcucagccagguugcagaagcggcuuagcguguguccuaaucuucucucugcguguagguaggccugugccgcaaacaagcuuaccaugaagugggugaccuucaucagccugcucuuucuguucuccucugccuacagcagcgccuccaaggaggugaaaucuuuccuguggacccagagccucagacgggaacuguccggcuacugcucuagcaucaaacuucaagucguuaaggacgcucaggcccugcuccacgggcuggauuuuuccgaggugucuaacgugcagcgccuuaugagaaagcagcggcgcgacgauagcgaccugaaaagacuccgggaucugaaucaagcggucaacaaucugguggaacucaaguccacacagcaaaagagcauucugcgcguuggaacgcuuaccucugacgaucugcucacacuggcugccgaccuugagaaacugaaguccaaagugaucagaaccgaacggccccucagcucuggcgucuauauggggaaccuguccacacagcagcuggagcagcgcagagcccuccugaauaugauuggaauggugggcggggcucagggaacccagccuggccgggauggcguugugcgcgucugggacgugaagaacccggaucuucugaauaaccaauucgggacaaugcccagccucacccuggccugucuuacgaaacagggacagguggaccugaaugaugcuguccucgcccugaccgaccugggccucaucuacacagcgaaguauccuaacucuuccgaccuggauagacuuagccaaucccaucccauucugaauaugguugacaccaagaaaucuagccucaacaucuccggguacaauuuuagccugggagccgcugugaaggccggcgcuugcaugcuugaugggggaaacaugcuggagacaaucaaagugaccccucagacggucgacggcauucucaagucuauccugaaagugaagcggucccugggcauguucguuagcgauacacccggggaacgcaauccuuaugagaacauucucuacaaaaucugucugucuggagacggcuggccguauauugccagcagaaccuccaucguggggcgggcgugggaaaacacaaccgucgaucuugagucugacggaaagccccagaaggugggcaccgccgggagcaauaaaucccugcagagcgcuggauuuccuacaggccucacguacucucaacugaugacccugaaggauuccaugaugcagcuugaccccagcgccaaaacauggauugauaucgagggcagaccugaagaccccguugagaucgcucucuaccagccgaugucugggugcuauauucacuucuuucgcgaaccuaccgaccugaagcaguucaaacaagaugccaaguacucccauggaaucgacguggccgaucuguuucccgcucagccuggccucacaagcgcggucauugaggcccugccccggaacauggugcuuaccugucagggguccgacgauaucaagagacugcucgacucucagggacgccgggauauuaaacugaucgacaucgcucugagcaaggccgauuccagaaaauucgaaaaugccgucugggaccaaugcaaggaucuuugucacaugcauacgggcgugguuguggagaaaaagaagcgcgggggcaaagaggaaauuacaccccacugcgcucucauggacuguaucauguaugaugccgcggucucuggaggccugaacauuccugugcugcgggcuguucucccgagagacaugguguuucgcaccagcucccccaaggucgugcugugaggacuagucccuguucccagagcccacuuuuuuuucuuuuuuugaaauaaaauagccugucuuucagaucucaaaggcucuuuucagagccaccaaaaaaaaaaaaaaaaaaaaaaaaaaaaaaaaaaaaaaaaaaaaaaaaaaaaaaaaaaaaaaaaagaauu

SEQ ID NO: 19856 - RNA, 2021 nt, Artificial Sequence
  mRNA product Design a-2 (hSL-A64-N5) comprising derived and/or modified sequence from LASV(LASV237-NIG-2010;Clade II)__AIT17639__SP-HsALB_NP(2-569) (opt5)
aggagaguccgcucagccagguugcagaagcggcuuagcguguguccuaaucuucucucugcguguagguaggccugugccgcaaacaagcuuaccaugaagugggugaccuucaucagccugcucuuucuguucuccucugccuacagcagcgccuccaaggaggugaaaucuuuccuguggacccagagccucagacgggaacuguccggcuacugcucuaacaucaaacuucaagucguuaaggacgcucaggcccugcuccacgggcuggauuuuagcgagguguccaaugugcagcgccuuaugagaaagcagaaacgggacgauucugaccugaagcgccucagagaucugaaccaagcggucaauaaccugguggaacucaagagcacacagcagaaauccauucugcggguuggaacgcuuaccagcgacgaucugcucacacuggcugccgaccuugagaagcugaaaucuaaggugauccgcaccgaaagaccccucuccagcggcgucuauauggggaaucugucuacacagcaacuggagcagcggcgcgcccuccugaacaugauuggaauggugggcggggcucagggaacccagccuggcagagauggcguugugcgggucugggacgugaaaaauccggaucuucugaacaaucaauucgggacaaugcccucccucacccuggccugucuuacgaagcagggacagguggaccugaacgaugcuguccucgcccugaccgaccugggccucaucuacacagcgaaguauccuaauagcucugaccuggaucgccuuucccaaagccaucccauucugaacaugguugacaucaaaaaguccucucucaauaucagcggguacaacuuuucccugggagccgcugugaaagccggcgcuugcaugcuugaugggggaaauaugcuggagaccauuaaggugacaccucagaccauggacggcauccucaaaagcauucugaaggucaaaagaucucugggcauguucguguccgauacgcccggggaacggaacccuuaugagaacauccucuacaagauuugucugagcggagacggcuggccguauaucgccucucgcacaagcauuguugggagagcgugggaaaauaccacaguggaucuugaguccgacggaaagccccagaaagucggcucugccgggagcaacaagucccugcagagcgcuggauuuccuaccggccucaccuacucucaacugaugacacugaaagauuccaugaugcagcuugaccccagcgccaagacguggaucgauaucgagggccggccugaagaccccguggagauugcucucuaccagccgaugucugggugcuauauccacuucuuuagagaaccuaccgaccugaaacaguucaagcaagaugccaaguacucccauggaauugacguugccgaucuguuucccgcucagccuggccucacaagcgcggugaucgaggcccugccccgcaauaugguccuuaccugucagggguccgacgauauuaaacggcugcucgacucucagggaagacgcgauaucaagcugaucgacauugcucugagcaaagccgauucccggagauucgaaaacgccgugugggaccaaugcaaggaucuuugucacaugcauacaggcgucgugguugagaaaaagaagcgcgggggcaaagaggaaaucacgccccacugcgcucucauggacuguauuauguaugaugccgcggugucuggaggccugaauaucccuguccugcgggcugugcucccgagagacaugguuuuucgcaccagcucccccaaggugguccugugaggacuagucccuguucccagagcccacuuuuuuuucuuuuuuugaaauaaaauagccugucuuucagaucucaaaggcucuuuucagagccaccaaaaaaaaaaaaaaaaaaaaaaaaaaaaaaaaaaaaaaaaaaaaaaaaaaaaaaaaaaaaaaaaagaauu

SEQ ID NO: 19857 - RNA, 2021 nt, Artificial Sequence
  mRNA product Design a-2 (hSL-A64-N5) comprising derived and/or modified sequence from LASV(LASV253-NIG-2011;Clade II)__AIT17671__SP-HsALB_NP(2-569) (opt5)
aggagaguccgcucagccagguugcagaagcggcuuagcguguguccuaaucuucucucugcguguagguaggccugugccgcaaacaagcuuaccaugaagugggugaccuucaucagccugcucuuucuguucuccucugccuacagcagcgccuccaaggaggugaaaucuuuccuguggacccagagccucagacgggaacuguccggcuacugcucuagcaucaaacuucaagucguuaaggacgcucaggcccugcuccacgggcuggauuuuuccgaggugucuaacgugcagcgccuuaugagaaagcagaaacgggacgauagcgaccugaagcgccucagagaucugaaucaagcggucaacaaucugguggaacucaaguccacccagcagaaaagcguucugcgggugggaacgcuuaccucugacgaucugcucacacuggcugccgaccuugagaagcugaaauccaaggucauucgcaccgaaagaccccucagcucuggcguguauauggggaaccuguccacacagcaacuggagcagcggcgcgcccuccugaauaugaucggaaugguuggcggggcucagggaacccagccuggcagagauggcgugguccgggugugggacgugaaaaacccggaucuucugaauaaccaauucgggacaaugcccagccucacccuggccugucuuacgaagcagggacaggucgaccugaaugauguugugcucgcucugaccgaccugggccucauuuacacagccaaguauccuaacucuuccgaccuggaucgccuuagccaaucccaucccauccugaauaugguggacaccaaaaagucuagccucaacauuuccggguacaauuuuagccugggagcggccgucaaagcuggcgccugcaugcuugaugggggaaacaugcuggagacaaucaaggugaccccucagacgauggacggcauccucaaaucuauucugaagguuaaaaagucccugggcauguucgugagcgauacacccggggaaagaaauccuuaugagaacauccucuacaagauuugucugucuggagacggcuggccguauaucgcuagccggaccuccauugucgggcgcgccugggaaaacacaaccguggaucuugagucugacggaaaaccccagaagguuggcaccgcggggagcaauaaaucccugcagagcgccggauuuccuacaggccucacguacucucaacugaugacccugaaggauuccaugaugcagcuugaccccagcgcuaaaacauggaucgauauugagggcagaccugaagaccccguggagaucgcccucuaccagccgaugucugggugcuauauccacuucuuucgggaaccuaccgaccugaagcaguucaagcaagaugcuaaauacucccauggaauugacgucacagaucuguuucccgcccagccuggccucaccagcgccgugaucgaggcucugcccagaaacaugguccuuacgugucagggguccgacgauauuaagcgccugcucgacucucagggacggagagauaucaaacugauugacaucgcgcugagcaaggccgauucccgccgguucgaaaaugcugugugggaccaaugcaaagaucuuugucacaugcauacaggcguuguggucgagaagaagaaaagagggggcaaggaggaaaucacaccccacugcgcccucauggacuguauuauguaugaugccgcugugucuggaggccugaacaucccuguucugcgcgccgugcucccgcgggacauggucuuuagaaccagcucccccaaaguggugcugugaggacuagucccuguucccagagcccacuuuuuuuucuuuuuuugaaauaaaauagccugucuuucagaucucaaaggcucuuuucagagccaccaaaaaaaaaaaaaaaaaaaaaaaaaaaaaaaaaaaaaaaaaaaaaaaaaaaaaaaaaaaaaaaaagaauu

SEQ ID NO: 19858 - RNA, 2021 nt, Artificial Sequence
  mRNA product Design a-2 (hSL-A64-N5) comprising derived and/or modified sequence from LASV(LASV254-NIG-2011;Clade II)__AIT17675__SP-HsALB_NP(2-569) (opt5)
aggagaguccgcucagccagguugcagaagcggcuuagcguguguccuaaucuucucucugcguguagguaggccugugccgcaaacaagcuuaccaugaagugggugaccuucaucagccugcucuuucuguucuccucugccuacagcagcgccuccaaggaggugaaaucuuuccuguggacccagagccucagacgggaacuguccggcuacugcucuagcaucaaacuucaagucguuaaggacgcucaggcccugcuccacgggcuggauuuuuccgaggugucuaacgugcagcgccuuaugagaaagcagaaacgggacgauagcgaccugaagcgccucagagaucugaaucaagcggucaacaaucugguggaacucaaguccacacagcagaaaagcguucugcgggugggaacgcuuaccucugacgaucugcucacacuggcugccgaccuugagaagcugaaauccaaggucauucgcaccgaaagaccccucagcucuggcguguauauggggaaccuguccacacagcaacuggagcagcggcgcgcccuccugaauaugaucggaaugguuggcggggcucagggaacccagccuggcagagauggcgugguccgggugugggacgugaaaaacccggaucuucugaauaaccaauucgggacaaugcccagccucacccuggccugucuuacgaagcagggacaggucgaccugaaugaugcuguucucgcccugaccgaccugggccucauuuacacagcgaaguauccuaacucuuccgaccuggaucgccuuagccaaucccaucccauccugaauaugguggacaccaaaaagucuagccucaacauuuccggguacaauuuuagccugggagccgcugugaaagccggcgcuugcaugcuugaugggggaaacaugcuggagacaaucaaggucaccccucagacgauggacggcauccucaaaucuauucugaaggugaaaaagucccugggcauguucguuagcgauacacccggggaaagaaauccuuaugagaacauccucuacaagauuugucugucuggagacggcuggccguauaucgccagccggaccuccauuguggggcgcgcgugggaaaacacaaucgucgaucuugagucugacggaaaaccccagaaggugggcaccgccgggagcaauaaaucccugcagagcgcuggauuuccuaccggccucacauacucucaacugaugacgcugaaggauuccaugaugcagcuugaccccagcgccaaaaccuggauugauaucgagggcagaccugaagaccccguugagaucgcucucuaccagccgaugucugggugcuauauucacuucuuucgggaaccuacagaccugaagcaguucaagcaagaugccaaauacucccauggaaucgacguggccgaucuguuucccgcucagccuggccucaccagcgcggucauugaggcccugcccagaaacauggugcuuacaugucagggguccgacgauaucaagcgccugcucgacucucagggacggagagauauuaaacugaucgacaucgcucugagcaaggccgauucccgccgguucgaaaaugccgucugggaccaaugcaaagaucuuugucacaugcauaccggcgugguuguggagaagaagaaaagagggggcaaggaggaaauuacgccccacugcgcucucauggacuguaucauguaugaugccgcggucucuggaggccugaacauuccugugcugcgcgcuguucucccgcgggacaugguguuuagaacaagcucccccaaagucgugcugugaggacuagucccuguucccagagcccacuuuuuuuucuuuuuuugaaauaaaauagccugucuuucagaucucaaaggcucuuuucagagccaccaaaaaaaaaaaaaaaaaaaaaaaaaaaaaaaaaaaaaaaaaaaaaaaaaaaaaaaaaaaaaaaaagaauu

SEQ ID NO: 19859 - RNA, 2021 nt, Artificial Sequence
  mRNA product Design a-2 (hSL-A64-N5) comprising derived and/or modified sequence from LASV(Nig08-04;Clade II)__ADU56611__SP-HsALB_NP(2-569) (opt5)
aggagaguccgcucagccagguugcagaagcggcuuagcguguguccuaaucuucucucugcguguagguaggccugugccgcaaacaagcuuaccaugaagugggugaccuucaucagccugcucuuucuguucuccucugccuacagcagcgccuccaaggaggugaaaucuuuccuguggacccagagccucagacgggaacuguccggcuacugcucuaacaucaaacuucaagucguuaaggacgcucaggcccugcuccacgggcuggauuuuagcgagguguccaaugugcagcgccuuaugagaaagcagaaacgggacgauggagaccugaagcgccucagagaucugaaccaagcggucaauaaccugguggaacucaagucuacccagcagaaaagcguucugcgggugggcacgcuuaccuccgacgaucugcucacacuggcugccgaccuugagaagcugaaaagcaaggucauucgcaccgaaagaccccucucuuccgggguguauaugggaaaucugagcacacagcaacuggagcagcggaaagcccuccugucuaugaucggcaugguugggggagcucagggcacccagccuggccgcgaugggguggucagagugugggacgugaagaacccggaucuucugaauaaccaauucggaacaaugcccucccucacccuggccugucuuacgaagcagggccaggucgaccugaaugaugcuguucucgcccugaccgaccuggggcucauuuacacagcgaaauauccuaacagcucugaccuggaucggcuuucccaaagccaucccauccugaauaugguggacaccaagaaauccucucucaacauuagcggauacaauuuuucccugggcgccgcugugaaggccggggcuugcaugcuugauggaggcaacaugcuggagacaaucaaagucaccccucagacgauggacggcauccucaagagcauucugaaagugaagcgcucucuggggauguucguuuccgauacacccggagaaagaaauccuuaugagaacauccucuacaagauuugucugagcggcgacggguggccguauaucgccucucggaccagcauugugggacgcgcgugggaaaacacaaccgucgaucuugaguccgacggcaaaccccagaagguggggaccgccggaucuaauaaaagccugcaguccgcuggcuuuccuacaggccucacguacagccaacugaugacccugaaggauucuaugaugcagcuugaccccuccgccaaaacauggaucgauauugaggggagaccugaagaccccguugagaucgcucucuaccagccgaugagcggaugcuauauccacuucuuucgggaaccuaccgaccugaagcaguucaagcaagaugccaaauacucucauggcauugacgugacagaucuguuuuccgcccagcccgggcucaccagcgcugucaucgaggcgcugccuagaaacauggugcuuacgugucagggauccgacgauauuaagaaacugcucgacucucagggccgccgggauaucaagcugauugacaucagccugaauaaagccgauuccagacgcuucgaaaacgcugucugggaccaaugcaaggaucuuugucacaugcauacaggggugguuguggagaagaaaaagcggggcggaaaagaggaaaucacaccccacugcgcccucauggacuguauuauguuugaugccgcugucucuggcgggcugaauauccccauucugagagccgugcucccucgcgacaugguuuuccggaccagcuccccgaaggugguccugugaggacuagucccuguucccagagcccacuuuuuuuucuuuuuuugaaauaaaauagccugucuuucagaucucaaaggcucuuuucagagccaccaaaaaaaaaaaaaaaaaaaaaaaaaaaaaaaaaaaaaaaaaaaaaaaaaaaaaaaaaaaaaaaaagaauu

SEQ ID NO: 19860 - RNA, 2024 nt, Artificial Sequence
  mRNA product Design a-2 (hSL-A64-N5) comprising derived and/or modified sequence from LASV(GA391;Clade III)__AAA46284__SP-HsALB_NP(2-570) (opt5)
aggagaguccgcucagccagguugcagaagcggcuuagcguguguccuaaucuucucucugcguguagguaggccugugccgcaaacaagcuuaccaugaagugggugaccuucaucagccugcucuuucuguucuccucugccuacagcagcgccuccaaggaggugagaucuugccuguggacccagagccuccggcgcgaacuguccggcuacuguucuaacaucaaacuucaagucguuaaggacgcucaggcccugcuccacgggcuggauuucagcgagguguccaaugugcagagacuuaugcggaaacagaagcgcgacgauggagaccugaaaagacuccgggaucugaaccaagcggucaauaaccugguggaacucaagucuacacagcagaaaagcguucugcgcgugggcacgcuuuccagcgacgaucugcucauucuggcugccgaccuugagaaacugaagucuaaagucaccagaacagaacggccccucuccagcgggguguauaugggaaaucugucuucccagcaacuggaucagcgcagagcccuccugaacaugaucggcaugaccgggguuagcggaggcggcaagggggcuucuaauggaauugugcgggucugggacgugaaaaacgccgagcuucugaauaaccaguuuggcacaaugccuucccucacccuggcuugccuuacaaagcaggggcaaguggaucugaaugacgccguccaggcgcucaccgaucugggacugaucuacacggccaaguauccgaacagcuccgaccucgaccgccugucucagagccaucccauucuuaauaugaucgauaccaaaaaguccagccugaacaucucuggcuacaauuucucccucggggcugccguuaaagcuggagccuguaugcuggacggcggcaacaugcuugagacaauuaaggugagcccucaaaccauggaugggauccugaaaucuauucucaaggugaaaaagagccugggaauguuugucuccgacacacccggcgaaagaaacccuuaugagaauauccuguacaagauuugccucucuggggauggauggagcuauaucgcgucccggaccagcauugugggccgcgccugggaaaacacgguuguggaccuggagcaggauaauaaaccccagaagaucgggaacggaggcucuaauaaaucccuucagagcgcuggcuucgccgcugggcugaucuacucucaacucaugacacugaaggacuuuaaauguuucaaccugauuccuaaugccaagaccuggauggauaucgagggaagaccggaagaccccgucgagauugcccuuuaccagccuuccagcggcugcuaugugcacuuuuuccgggaacccacagaucucaagcaguuuaaacaggacgcuaaguacucccaugggagagacguuaccgaucuguucgcggcccaaccuggacugaccucugcugugaucgaggcccucccccgcaacauggucauuacaugucagggcagcgaagacauccggaaacugcuugagucccaggggagacgcgauaucaagcugauugacaucacgcucucuaaagccgauagccggaaguuugagaaugcugugugggaccaguucaaggaucugugccacaugcauaccggcgucgugguugaaaagaagaaaagaggaggcaaggaggaaauuacaccgcacugugcccugauggacugcaucauguuugaugcggcuguguccgggggacuugacgccaaaguccuccgcgugguucugccucgggauaugguguucagaaccagcacacccaaggucgugcugugaggacuagucccuguucccagagcccacuuuuuuuucuuuuuuugaaauaaaauagccugucuuucagaucucaaaggcucuuuucagagccaccaaaaaaaaaaaaaaaaaaaaaaaaaaaaaaaaaaaaaaaaaaaaaaaaaaaaaaaaaaaaaaaaagaauu

SEQ ID NO: 19861 - RNA, 2021 nt, Artificial Sequence
  mRNA product Design a-2 (hSL-A64-N5) comprising derived and/or modified sequence from LASV(Nig08-A19;Clade III)__ADU56619__SP-HsALB_NP(2-569) (opt5)
aggagaguccgcucagccagguugcagaagcggcuuagcguguguccuaaucuucucucugcguguagguaggccugugccgcaaacaagcuuaccaugaagugggugaccuucaucagccugcucuuucuguucuccucugccuacagcagcgccuccaaggaggugaaaucuuuccuguggacccagagccucagacgggaacuguccggcuacugcucuaacaucaaacuucaagucguuaaggacgcucaggcccugcuccacgggcuggauuuuagcgagguguccaaugugcagcgccuuaugagaaagcagaaacgggacgauggagaccugaagcgccucagagaucugaaccaagcggucaauaaccugguggaacucaagucuacacagcagaaaagcguucugcgggugggcacgcuuuccagcgacgaucugcucguccuggcugccgaccuugagaagcugaaaucuaaggugguucgcaccgaaagaccccucuccagcgggauuuauaugggaaaucugucuucccagcaacuggaucagcggaaagcccuccugaacaugaucggcaugacagggggaaauggcggccgcaacaccacaagcgacgggauugugagagucugggaugugaagaaugcugagcuucugaacaaucaguucggaaccaugccuucucucacacuggccugucuuaccaagcagggccaaguggaccugaacgaugcuguccaggcccucacggaccuggggcugaucuacaccgcgaaauaucccaauuccagcgaccucgaucggcuggcccagucccauccgauucuuaacaugaucgacacaaagaaaucuagccugaauaucuccggauacaacuuuagccucggcgcugccguuaaggcuggggccugcaugcuggauggaggcaacaugcuugagaccauuaaagugucuccucaaacaauggacggcauccugaaguccauucucaaagugaagcgcagccuggggauguucaucucugauacccccggagaaagaaauccuuaugagaacauucuguacaagaucugucucagcggcgacggguggcccuauauugcgucccggacgucuaucgucggacgcgccugggaaaauacagugguugaucuggagagcgacaacaaaccucagaagaccggcaaugggggauccaacaaaagccuucagucugcuggcuuugccgcuggccugacauacucccagcucaugacccugaaggauagcaugcugcaacuugacccgaaugccaaaaccuggauggauaucgaggggagacccgaagacccuguggagauugcccucuaccagcccucuuccggaugcuauauccacuucuuucgggaaccuacagaccugaagcaguucaagcaggaugcuaaauacagccauggcauugacgucacggaucuguuugcggcccaacccgggcucaccuccgcugugaucgaggcccugccgagaaacaugguuauuacaugucagggaucugaagacauccgcaaacuucuggagagccagggccggagagauaucaagcucauugacaucucccugucuaagguggauagccgcaaauucgagaaugccgucugggaccaguuuaaggaucugugccacaugcauaccgggauuguggucgaaaagaaaaagcggggcggaaaagaggaaaucacaccucacugugcucuuauggacugcauuauguucgaugccgcgguguccggcgggguugacgcuaaggugcucagagccguccugccccgcgauaugguguuucggaccagcacgccuaaaguugugcugugaggacuagucccuguucccagagcccacuuuuuuuucuuuuuuugaaauaaaauagccugucuuucagaucucaaaggcucuuuucagagccaccaaaaaaaaaaaaaaaaaaaaaaaaaaaaaaaaaaaaaaaaaaaaaaaaaaaaaaaaaaaaaaaaagaauu

SEQ ID NO: 19862 - RNA, 2021 nt, Artificial Sequence
  mRNA product Design a-2 (hSL-A64-N5) comprising derived and/or modified sequence from LASV(G1180-SLE-2010;Clade IV)__AIT17169__SP-HsALB_NP(2-569) (opt5)
aggagaguccgcucagccagguugcagaagcggcuuagcguguguccuaaucuucucucugcguguagguaggccugugccgcaaacaagcuuaccaugaagugggugaccuucaucagccugcucuuucuguucuccucugccuacagcagcgccuccaaggagaucaaaucuuuccuguggacccagagccucagacgggaacuguccggcuacugcucuaacauuaagcugcaaguggucaaagacgcucaggcccugcuccacgggcuggauuuuagcgagguuuccaaugugcagcgccuuaugagaaaggaacggcgcgacgauaacgaccugaaaagacuccgggaucugaaucaggcggugaacaaucuggucgagcucaagucuacacaacaaaagagcauccugcgcgugggaacgcuuaccuccgacgaucugcucauucuggcugccgaccuugaaaaacuuaagagcaaaguuaucagaacagagcggccccucucugccggcguguauauggggaaccuguccagccagcagcuggaucagcgcagagcucuccugucuaugauuggaauguccagcggcaaucagcgggcccaggcugggcgcgacggagucgugagaguuugggaugugaagaacgucgagcuucugaauaaccaguucggcaccaugccuucucucacacuggccugucuuaccaaacaaggccagguggaccugaaugaugcggugcaggcccucacagaccuggggcugaucuacaccgcuaaguauccgaacacguccgaccucgaucggcugacccaaagccaucccauccuuaauaugauugacacaaagaaauccucucugaacaucagcggauacaauuuuucccucggcgccgcugucaaggccggggcgugcaugcuggauggaggcaacaugcuugaaaccauuaaaguuagcccucagacaauggacgggauccugaagucuauucucaaagugaagaaagcccugggaauguucaucuccgauacccccggcgagcgcaacccuuaugaaaauauucuguacaagaucugucucagcggcgacggguggcccuauaucgcuucuagaacgagcauuacaggacgggccugggagaacaccguggucgaucuggaguccgacggcaagccucagaaagcugggucuaauaacagcaauaagucccuucagagcgugggauuuacagccggccugaccuacucucaacucaugacccugaaagaugccaugcugcagcuugacccgaacgcuaagacauggauggauaucgaagggagacccgaggacccuguugaaauugcgcucuaccagcccuccagcggaugcuauauccacuucuuucgcgagccuacggaccugaaacaguucaagcaagaugccaaguacucucauggcauugacgugaccgaucuguuugcugcccagcccggccucacauccgccgucaucgacgcucugccgcggaauauggugaucaccugucaggggagcgaugacauuagaaaacuucuggaaucccagggacgcaaggauaucaaacucauugacaucgcccugucuaagacagauagccggaaauaugagaacgcgguuugggaccaauacaaggaucugugccacaugcauaccggcguggucguggagaagaaaaagagagggggaaaagaagagauuacgccucacugugcucuuauggacugcaucauguucgaugccgccgucuccggcgggcucaauacaucugugcugcgcgcuguucugccccgggacaugguguuuagaaccagcaccccucgcgucgugcucugaggacuagucccuguucccagagcccacuuuuuuuucuuuuuuugaaauaaaauagccugucuuucagaucucaaaggcucuuuucagagccaccaaaaaaaaaaaaaaaaaaaaaaaaaaaaaaaaaaaaaaaaaaaaaaaaaaaaaaaaaaaaaaaaagaauu

SEQ ID NO: 19863 - RNA, 2021 nt, Artificial Sequence
  mRNA product Design a-2 (hSL-A64-N5) comprising derived and/or modified sequence from LASV(G1442-SLE-2011;Clade IV)__AIT17181__SP-HsALB_NP(2-569) (opt5)
aggagaguccgcucagccagguugcagaagcggcuuagcguguguccuaaucuucucucugcguguagguaggccugugccgcaaacaagcuuaccaugaagugggugaccuucaucagccugcucuuucuguucuccucugccuacagcagcgccuccaaggaggugaaaucuuuccuguggacccagagccucagacgggaacuguccggcuacugcucuaacaucaaacuucaagucguuaaggacgcucaggcccugcuccacgggcuggauuuuagcgagguguccaaugugcagcgccuuaugagaaagcagcggcgcgacgauaacgaccugaaaagacuccgggaucugaaucaagcggucaacaaucugguggaacucaagucuacacagcaaaagagcguucugcgcgugggaacgcuuaccuccgacgaucugcucguccuggcugccgaccuugagaaacuuaagagcaaagugauuagaacagaacggccccucucugccggcguuuauauggggaaccuguccagccagcagcuggaucagcgcagagcucuccugaauaugaucggaaugucuggcgggauucagggaacccggacaggccgcgacggcguggucagagugugggaugugaagaacgccgaccuucugaauaaccaguucgggaccaugccuucccucacacuggcuugucuuaccaaacaaggacaggucgaucugaaugacguugugcaggcccucacggaccugggccugaucuacaccgcgaaguauccgaacgccagcgaucucgaccggcugacacaaucucaucccauucuuaauaugaucgauaccaagaaauccagccugaacaucuccggguacaauuuuucucucggagcugccgugaaggcuggcgccugcaugcuggacgggggaaacaugcuugagacaauuaaagucagcccucagaccauggauggcauccugaaguccauucucaaagugaagaaaacgcugggcauguucaucagcgacacacccggggagcgcaacccuuaugaaaauauucuguacaagaucugucucucuggagauggcuggcccuauauugcguccagaaccagcaucacagggcgggccugggagaacaccguuguggaccuggaaucugauggaaagccucagaaagcuggcagcaauaacuccaauaagucucuucagagcgccggguuugcugccggacugaccuacucccaacucaugacacugaaagacgccaugcugcagcuugauccgaacgcuaagacguggauggacaucgagggcagacccgaggacccugucgaaauugcgcucuaccagcccagcucuggcugcuauauccacuucuuucgcgagccuaccgaucugaaacaguucaagcaagacgccaaguacucccaugggauugaugugacagaccuguuugcugcccagcccggacucaccagcgccguuaucgaagcucugccgcggaauauggugauuacaugucagggcucugaugacaucaaaaagcugcuggagucccaggggagaaaagauaucaagcucauugacaucgcccugagcaaaaccgauucccgcaaguaugaaaacgcggucugggaccaauacaaggaucugugccacaugcauacgggaguggucguggagaaaaagaaacggggcgggaaggaggaaauuacaccucacugugcucuuauggacugcaucauguucgaugccgccguuucuggcggacucaauacccuggugcugagagcuguccucccccgcgacaugguguuucggaccagcacaccuagaguugugcugugaggacuagucccuguucccagagcccacuuuuuuuucuuuuuuugaaauaaaauagccugucuuucagaucucaaaggcucuuuucagagccaccaaaaaaaaaaaaaaaaaaaaaaaaaaaaaaaaaaaaaaaaaaaaaaaaaaaaaaaaaaaaaaaaagaauu

SEQ ID NO: 19864 - RNA, 2021 nt, Artificial Sequence
  mRNA product Design a-2 (hSL-A64-N5) comprising derived and/or modified sequence from LASV(G3010-SLE-2013;Clade IV)__AIT17345__SP-HsALB_NP(2-569) (opt5)
aggagaguccgcucagccagguugcagaagcggcuuagcguguguccuaaucuucucucugcguguagguaggccugugccgcaaacaagcuuaccaugaagugggugaccuucaucagccugcucuuucuguucuccucugccuacagcagcgccuccaaggagaucaaaucuuuccuguggacccagagccucagacgggaacuguccggcuacugcucuaacauuaaacuucaaguggucaaagacgcucaggcccugcuccacgggcuggauuuuagcgagguuuccaaugugcagcgccuuaugagaaaggaacggcgcgacgauaacgaccugaaaagacuccgggaucugaaucaggcggugaacaaucuggucgagcucaagucuacacaacaaaagagcauccugcgcgugggaacgcuuaccuccgacgaucugcucauucuggcugccgaccuugaaaaacuuaagagcaaaguuacaagaaccgagcggccccucucugccggcguguauauggggaaccuguccagccagcagcuggaucagcgcagagcucuccugucuaugaucggaauguccagcggcguccagggggcccgggcuggacgcgacggcgugguuagagugugggaugucaagaaugccgagcuucugaacaaucaguucggcacaaugccuucucucacccuggcgugucuuacaaaacaggggcaaguggaccugaacgaugugguccaggcccucaccgaccugggacugauuuacacggcuaaguauccgaauaccuccgaccucgaucggcugacacagagccaucccauccuuaacaugaucgacaccaagaaauccucucugaauauuagcggcuacaacuuuucccucggggccgcuguuaaggccggagcgugcaugcuggauggcgggaauaugcuugaaacaaucaaagugagcccucaaaccauggacggcauucugaagucuauccucaaagugaagaaagcccugggaauguucauuuccgagacgcccggcgaacgcaacccuuaugagaacauccuguacaagauuugucucagcggggauggauggcccuauaucgcuucuagaacaagcaucaccggccgggccugggagaauacagucguggaccuggaauccgaugggaagccucagaaagcuggaucuaacaauagcaacaagucccuucagagcgccggcuuuaccgccgggcugaccuacucucagcucaugacacugaaagacgcuaugcugcaacuugauccgaaugcgaagacguggauggacauugagggaagacccgaagauccuguugagguggcccucuaccagcccuccagcggcugcuauauccacuucuuucgcgaaccuaccgaccugaaacaguucaagcaggacgcuaaguacucucauggcauugaugucacagaccuguuugccgcccaacccgggcucaccuccgcugugaucgaugcccugccgcggaacaugguuauuacaugucagggaagcgacgauaucaaaaagcugcuggagucccagggcagaaaagacaucaagcucauugauaucgcgcugucuaaaaccgacagccgcaaguaugagaaugcugugugggaucaguacaaggaccugugccacaugcauacgggggucguggucgaaaagaagaaacggggaggcaaggaggaaauuacaccucacugugcccuuauggauugcaucauguucgacgccgcuguguccgggggccucaacaccucuguucugagagccgugcugccccgcgauauggucuuucggaccagcacaccuagagugguucucugaggacuagucccuguucccagagcccacuuuuuuuucuuuuuuugaaauaaaauagccugucuuucagaucucaaaggcucuuuucagagccaccaaaaaaaaaaaaaaaaaaaaaaaaaaaaaaaaaaaaaaaaaaaaaaaaaaaaaaaaaaaaaaaaagaauu

SEQ ID NO: 19865 - RNA, 2021 nt, Artificial Sequence
  mRNA product Design a-2 (hSL-A64-N5) comprising derived and/or modified sequence from LASV(G502-SLE-2009;Clade IV)__AIT17127__SP-HsALB_NP(2-569) (opt5)
aggagaguccgcucagccagguugcagaagcggcuuagcguguguccuaaucuucucucugcguguagguaggccugugccgcaaacaagcuuaccaugaagugggugaccuucaucagccugcucuuucuguucuccucugccuacagcagcgccuccaaggagaucaaaucuuuccuguggacccagagccucagacgggaacuguccggcuacugcucuaacauuaagcugcaaguggucaaagacgcucaggcccugcuccacgggcuggauuuuagcgagguuuccaaugugcagcgccuuaugagaaaggaacggcgcgacgauaacgaccugaaaagacuccgggaucugaaucaggcggugaacaaucuggucgagcucaagucuacacaacaaaagagcauccugcgcgugggaacgcuuaccuccgacgaucugcucauucuggcugccgaccuugaaaaacuuaagagcaaaguuaucagaacagagcggccccucucugccggcguguauauggggaaccuguccagccagcagcuggaucagcgcagagcucuccugucuaugauuggaauguccggcgggaaucagggaguccgggccggcaaggacggcgugguucgcgugugggaugucaaaaacgcugagcuucugaauaaccaguucgggaccaugccuagccucacacuggccugucuuaccaagcagggacaaguggaccugaaugaugcggugcaggcccucacagaccugggccugaucuacaccgcuaaguauccgaacacgucugaccucgauagacugacccagucccaucccauccuuaauaugauugacaccaaaaagagcucccugaacaucucuggguacaauuuuagccucggagccgcugucaaagccggcgcgugcaugcuggaugggggaaacaugcuugaaacaauuaagguuuccccucaaacaauggacggcauccugaaaagcauucucaaggugaaaaaggcccugggcauguucaucucugauacccccggggagcggaacccuuaugaaaauauucuguacaagaucugucucuccggagacggcuggcccuauaucgcuagccgcacgucuauuacagggagagccugggagaacaccguggucgaucuggagagcgacggaaaaccucagaaggcuggcuccaauaacucuaauaaaagccuucaguccgccggguuuacagccggacugaccuacagccagcucaugacccugaaggaugcuaugcugcaacuugacccgaacacaaaaacguggauggauaucgaaggccggcccgaggacccuguggaaauugcgcucuaccagcccucuuccggcugcuauauccacuucuuuagagagccuaccgaccugaagcaguucaagcaggaugccaaauacagccaugggauugacguuacagaucuguuugcugcccaacccggacucaccucugccgugaucgacgcucugccgcgcaauauggucaucacaugucagggcuccgaugacauucggaaacuucuggaaagccaggggagaaaggauaucaagcucauugacaucgcccugaacaaaaccgauucccgcaaguaugagaaugcggugugggaccaguacaaggaucugugccacaugcauacgggaguuguggucgagaaaaagaaacggggcgggaaggaagagauuacaccucacugugcucuuauggacugcaucauguucgaugccgccgugucuggcggacucaacaccagcguccugagagcugugcugccccgcgacaugguuuuucggaccuccacaccuagagugguccucugaggacuagucccuguucccagagcccacuuuuuuuucuuuuuuugaaauaaaauagccugucuuucagaucucaaaggcucuuuucagagccaccaaaaaaaaaaaaaaaaaaaaaaaaaaaaaaaaaaaaaaaaaaaaaaaaaaaaaaaaaaaaaaaaagaauu

SEQ ID NO: 19866 - RNA, 2021 nt, Artificial Sequence
  mRNA product Design a-2 (hSL-A64-N5) comprising derived and/or modified sequence from LASV(G733-SLE-2010;Clade IV)__AIT17155__SP-HsALB_NP(2-569) (opt5)
aggagaguccgcucagccagguugcagaagcggcuuagcguguguccuaaucuucucucugcguguagguaggccugugccgcaaacaagcuuaccaugaagugggugaccuucaucagccugcucuuucuguucuccucugccuacagcagcgccuccaaggagaucaaaucuuuccuguggacccagagccucagacgggaacuguccggcuacugcucuaacauuaagcugcaaguggucaaagacgcucaggcccugcuccacgggcuggauuuuagcgagguuuccaaugugcagcgccuuaugagaaaggaacggcgcgacgauaacgaccugaaaagacuccgggaucugaaucaggcggugaacaaucuggucgagcucaagucuacacaacaaaagagcgugcugcgcguuggaacgcuuaccuccgacgaacugcucgugcuggcugccgaucuugagaaacuuaagagcaaagucaucagaacagagcggccccucucugccggcguguauauggggaaccuguccagccagcagcuggaccagcgcagagcucuccugucuaugauuggaauguccggcgggaaucagggagcccggaccggccgcgauggcguugugagagucugggacgugaagaacgcugaacuucugaauaaccaguucgggacaaugccuagccucacccuggccugucuuacaaaacagggacaaguggaucugaaugacgcgguccaggcccucaccgaucugggccugaucuacacggcuaaguauccgaacaccucugaccucgaccggcugacacagucccaucccauucuuaauaugaucgauaccaagaaaagcucccugaacaucucuggguacaauuuuagccucggagccgcuguuaaggccggcgcgugcaugcuggacgggggaaacaugcuugagacaauuaaaguguccccucaaaccauggauggcauccucaagagcauucugaaagugaagaaagcccugggcauguucaucucugacacgcccggggaacgcaacccuuaugagaauauucuguacaagaucugucucuccggagauggcuggcccuauauugcuagcagaacaucuaucaccgggcgggccugggagaacacagucguggaccuggaaagcgauggaaagccucagaaagcuggcuccaauaacucuaauaagagccuucaguccgccggguuuaccgccggacugaccuacagccagcucaugacacugaaagacgcuaugcugcaacuugauccgaacgcgaagacguggauggacaucgagggcagacccgaagauccuguugagauugcccucuaccagcccucuuccggcugcuauauccacuucuuucgcgaaccuaccgaccugaaacaguucaagcaggacgcuaaguacagccaugggauugaugugacagaccuguuugccgcccaacccggacucaccucugcugucaucgaugcccugccgcggaauauggugauuacaugucagggcuccgacgauaucagaaaacuucuggagagccaggggcgcaaggacaucaaacucauugauaucgcgcuguccaagauugacucucggaaauaugagaacgcuguuugggaucaguacaaggaccugugccacaugcauaccggaguggucguggaaaagaaaaagagaggcgggaaagaggaaaucacgccucacugugcccuuauggauugcauuauguucgacgccgcugucagcggcggacucaauucccuggugcugcgcgccguucucccccgggauaugguguuuagaacaucuaccccucgcgucgugcugugaggacuagucccuguucccagagcccacuuuuuuuucuuuuuuugaaauaaaauagccugucuuucagaucucaaaggcucuuuucagagccaccaaaaaaaaaaaaaaaaaaaaaaaaaaaaaaaaaaaaaaaaaaaaaaaaaaaaaaaaaaaaaaaaagaauu

SEQ ID NO: 19867 - RNA, 2021 nt, Artificial Sequence
  mRNA product Design a-2 (hSL-A64-N5) comprising derived and/or modified sequence from MOPV/LASV reassortant(IGS-1;Clade IV)__AFY05578__SP-HsALB_NP(2-569) (opt5)
aggagaguccgcucagccagguugcagaagcggcuuagcguguguccuaaucuucucucugcguguagguaggccugugccgcaaacaagcuuaccaugaagugggugaccuucaucagccugcucuuucuguucuccucugccuacagcagcgccuccaaggagaucaaaucuuuccuguggacccagagccucagacgggaacuguccggcuacugcucuaacauuaaacuucaaguggucaaggacgcucaggcccugcuccacgggcuggauuuuagcgagguuuccaaugugcagcgccuuaugagaaaggaacggcgcgacgauaacgaccugaaaagacuccgggaucugaaucaggcggugaacaaucuggucgagcucaagucuacacaacaaaagagcauccugcgcgugggaacgcuuaccuccgacgaucugcucauucuggcugccgaccuugaaaaacugagaagcaagguuauccggacagagcgcccccucucugccggcguguauauggggaaccuguccagccagcagcuggaucagagacgggcucuccugaauaugauuggaaugucuggcgggaaccagggagcccgcgcuggcagagacggcgucgugcggguuugggaugugaaaaaugccgagcuucuguccaaccaguucgggaccaugccuagccucacacuggcgugucuuaccaagcagggacaagucgaccugaaugaugccgugcaggcucucacagaccugggccugaucuacaccgccaaauauccgaacacgucugaccucgaucgccugacccagucccaucccauccuuaauaugauugacacaaagaaaagcucccugaacaucucuggguacaauuuuagccucggagcugccgugaaggcgggcgccugcaugcuggaugggggaaacaugcuugaaaccauuaaggucuccccucaaacaauggacggcauccugaaaagcauucucaagguuaaaaaggcucugggcauguucaucucugauacccccggggagagaaacccuuaugaaaauauucuguacaaaaucugucucuccggagacggcuggcccuauaucgccagccggacgucuauuacagggagagcuugggagaacaccgugguggaucuggagagcgacggaaagccucagaaggccgauuccaauaacucuagcaaaucccuucagagcgccggcuuuacagcugggcugaccuacucucagcucaugacccugaaggacgcgaugcugcaacuugauccgaaugccaaaacauggauggacaucgaaggacgccccgaggacccugucgaaauugcucucuaccagcccuccagcggcugcuauauccacuucuuucgggagccuacggaucugaagcaguucaaacaggacgccaaguacucucauggcauugaugugaccgaccuguuugccacacaacccgggcucaccuccgcuguuaucgaugcccugccgagaaacauggugaucacaugucagggaagcgacgauauucgcaaacuucuggaaucccagggccggaaggacaucaagcucauugauaucgaccugucuaaaaccgauagcagaaaguaugagaaugcggucugggaccaguacaaagaucugugccacaugcauacgggggugguuguggagaagaagaaacgcggaggcaaggaagagauuacaccucacugugcucuuauggacugcaucauguucgacgccgccgucuccgggggccucaacaccucugugcugcgggcuguccugcccagagauaugguguuucgcaccagcacaccucggguugugcucugaggacuagucccuguucccagagcccacuuuuuuuucuuuuuuugaaauaaaauagccugucuuucagaucucaaaggcucuuuucagagccaccaaaaaaaaaaaaaaaaaaaaaaaaaaaaaaaaaaaaaaaaaaaaaaaaaaaaaaaaaaaaaaaaagaauu

SEQ ID NO: 19868 - RNA, 2021 nt, Artificial Sequence
  mRNA product Design a-2 (hSL-A64-N5) comprising derived and/or modified sequence from LASV(LM765-SLE-2012;Clade IV)__AIT17815__SP-HsALB_NP(2-569) (opt5)
aggagaguccgcucagccagguugcagaagcggcuuagcguguguccuaaucuucucucugcguguagguaggccugugccgcaaacaagcuuaccaugaagugggugaccuucaucagccugcucuuucuguucuccucugccuacagcagcgccuccaaggagaucaaaucuuuccuguggacccagagccucagacgggaacuguccggcuacugcucuaacauuaagcugcaaguggucaaagacgcucaggcccugcuccacgggcuggauuuuagcgagguuuccaaugugcagcgccuuaugagaaaggaacggcgcgacgauaacgaccugaaaagacuccgggaucugaaucaggcggugaacaaucuggucgagcucaagucuacacaacaaaagagcauccugcgcgugggaacgcuuaccuccgacgaucugcucauucuggcugccgaccuugaaaaacuuaagagcaaaguuacaagaaccgagcggccccucucugccggcguguauauggggaaccuguccagccagcagcuggaucagcgcagagcucuccuggacaugaucggaaugucuggcuccaaucagggggcccgggcuggacgcgauggcgucgugagaguuugggacgugaagaacgccgagcuucugaauaaccaguucggcacaaugccuagccucacccuggcgugucuuacaaaacaggggcaagucgaucugaaugacgccgugcaggcucucaccgaccugggacugauuuacacggccaaguauccgaacaccucugaucucgaccggcugacacagucccaucccauccuuaauaugaucgauaccaagaaaagcucccugaacauuucuggcuacaauuuuagccucggggcugccgugaaggcgggagccugcaugcuggacggcgggaacaugcuugaaacaaucaaagucuccccucaaaccauggauggcauucucaagagcauccugaaaguuaagaaagcucugggaauguucauuucugacgcccccggcgagcgcaacccuuaugaaaauauccuguacaagauuugucucuccggggauggauggcccuauaucgcuagcagaacgucuaucacaggccgggccugggagaacaccgugguggaccuggagagcgaugggaagccucagaaagccggauccaauggcucuaacaagagccuucaguccgcuggguuuacagcgggacugaccuacagccagcucaugacccugaaagacgccaugcugcaacuugauccgaaugcuaagacauggauggacauugaaggcagacccgaggacccugucgaaaucgcccucuaccagcccucuuccggcugcuauauucacuucuuucgcgagccuacggaucugaaacaguucaagcaggacgccaaguacagccaugggaucgaugugaccgaccuguuugcugcccaacccggacucacaucugcgguuauugaugcucugccgcggaacauggugaucaccugucagggcuccgacgauaucagaaaacuuuucgaaagccaggggcgcaaggacauuaaacugaucgauauugcccucuccaagacagacucucggaaauaugagaaugccgucugggaucaguacaaggaccugugccacaugcauaccggaaucgugguugagaagaaaaagagaggcgggaaagaagagauuacgccucacugugcucugauggauugcaucauguuugacgccgcugugagcggcggacuuaacacauccguccuccgcgccgugcugccccgggacauggucuucagaaccucuaccccucgcgugguucugugaggacuagucccuguucccagagcccacuuuuuuuucuuuuuuugaaauaaaauagccugucuuucagaucucaaaggcucuuuucagagccaccaaaaaaaaaaaaaaaaaaaaaaaaaaaaaaaaaaaaaaaaaaaaaaaaaaaaaaaaaaaaaaaaagaauu

SEQ ID NO: 19869 - RNA, 2021 nt, Artificial Sequence
  mRNA product Design a-2 (hSL-A64-N5) comprising derived and/or modified sequence from LASV(LM776-SLE-2012;Clade IV)__AIT17825__SP-HsALB_NP(2-569) (opt5)
aggagaguccgcucagccagguugcagaagcggcuuagcguguguccuaaucuucucucugcguguagguaggccugugccgcaaacaagcuuaccaugaagugggugaccuucaucagccugcucuuucuguucuccucugccuacagcagcgccuccaaggagaucaaaucuuuccuguggacccagagccucagacgggaacuguccucuuacugcagcaacauuaaacuucaaguggucaaggacgcucaggcccugcuccacggccuggauuuuuccgagguuucuaaugugcagcgccuuaugagaaaggaacggcgcgacgauaacgaccugaaaagacuccgggaucugaaucaggcggugaacaaucuggucgagcucaagagcacacaacagaaguccauccugcgcguggggacgcuuaccagcgacgaucugcucauucuggcugccgaccuugaaaaacugaagucuaaaguuacaagaaccgagcggccccucuccgccggaguguauaugggcaaccugagcucucagcagcuggaucaacgcagagcucuccuguccaugaucgggaugagcggaucuaaucagggcgcccgggcugggcgcgacggagucgugagaguuugggaugugaagaacgccgagcuucugaauaaccaguucggcacaaugccuucccucacccuggcgugucuuacaaaacagggccaagucgaccugaaugaugccgugcaggcucucaccgaccuggggcugauuuacacggccaaguauccgaacaccagcgaccucgaucggcugacacagucccaucccauccuuaauaugaucgacaccaagaaaucuagccugaacauuuccggauacaauuuuagccucggcgcugccgugaaggcgggggccugcaugcuggauggaggcaacaugcuugaaacaaucaaagucucuccucaaaccauggacgggauucugaaguccauccucaaaguuaagaaagcucugggaauguucauuagcgauacgcccggcgagcgcaacccuuaugaaaauauccuguacaagauuugucucucuggcgacggguggcccuauaucgccagcagaacauccaucaccggacgggcuugggagaacacagugguggaucuggagucugacggcaagccucagaaagccgggagcaauaacuccaauaagagccuucagucugccggauuuaccgcuggccugaccuacucccagcucaugacacugaaagaugcgaugcugcaacuugacccgaacgccaagacguggauggauauugaagggagacccgaggacccugucgaaguggcucucuaccagcccagcucuggaugcuauauccacuucuuucgcgagccuaccgaccugaaacaguucaagcaggaugccaaguacucccauggcauugacguuacagaucuguuugccgcucaacccggccucaccagcgccgugaucgacgcgcugccgcggaauauggucauuacaugucagggguccgaugacaucagaaaacuucuggaaucucagggacgcaaggauaucaaacucauugacaucgcucugagcaagaccgauucccggaaauaugagaacgccgugugggaccaguacaaggaucugugccacaugcauacgggcguuguggucgagaagaaaaagagagggggaaaagaagagauuacaccucacugugcccuuauggacugcaucauguucgaugcugccgugucuggcgggcucaauaccagcguccugcgcgcugugcugccccgggacaugguuuuuagaaccuccacaccucgcgugguccucugaggacuagucccuguucccagagcccacuuuuuuuucuuuuuuugaaauaaaauagccugucuuucagaucucaaaggcucuuuucagagccaccaaaaaaaaaaaaaaaaaaaaaaaaaaaaaaaaaaaaaaaaaaaaaaaaaaaaaaaaaaaaaaaaagaauu

SEQ ID NO: 19870 - RNA, 2021 nt, Artificial Sequence
  mRNA product Design a-2 (hSL-A64-N5) comprising derived and/or modified sequence from LASV(Mad39;Clade IV)__ANH09723__SP-HsALB_NP(2-569) (opt5)
aggagaguccgcucagccagguugcagaagcggcuuagcguguguccuaaucuucucucugcguguagguaggccugugccgcaaacaagcuuaccaugaagugggugaccuucaucagccugcucuuucuguucuccucugccuacagcagcgccuccaaggagaucaaaucuuuccuguggacccagagccucagacgggaacuguccggcuacugcucuaacauuaagcugcaaguggucaaagacgcucaggcccugcuccacgggcuggauuuuagcgagguuuccaaugugcagcgccuuaugagaaagcagcggcgcgacgauaacgaccugaaaagacuccgggaucugaaucaagcggugaacaaucuggucgaacucaagucuacacagcaaaagagcgugcugcgcguuggaacgcuuaccuccgacgaucugcucacacuggcugccgaccuugagaaacuuaagagcaaagugaccagaacagaacggccccucaccgccggcgucuauauggggaaccugucuucccagcagcuggaucagcgcagagcucuccugaauaugaucggaaugagcggcgggaaccagggagcccggacaggccgcgacggcgugguuagagugugggaugucaagaaugcugagcuucugaacaaucaguucgggaccaugccuucucucacgcuggccugucuuaccaaacaaggacagguggaccugaacgaugugguccaggcgcucacagaccugggccugauuuacaccgccaaguauccgaauacauccgaccucgaucggcugacccaaagccaucccauccuuaacaugauugacacgaauaagucuucccugaacaucagcggguacaacuuuucccucggagcugccguuaaagcuggcgccugcaugcuggaugggggaaauaugcuugagacaaucaaggugucuccucagaccauggacggcauucugaaaagcauccucaaggugaaaaagucccugggcauguucauuagcgauacacccggggaacgcaacccuuaugagaauauccuguacaaaauuugucucucuggagacggcuggcccuauaucgcguccagaaccagcauuaccgggcgggccugggaaaacacagucguggaucuggagucuggaggcaagccucagaaggcugggagcaauaacuccaauaaaucucuucagagcgccggauuugcugccggccugacguacucccaacucaugacccugaaggacgccaugcugcagcuugauccgaacgcuaaaacauggauggacaucgagggcagacccgaagauccuguugagaucgcgcucuaccagcccauuagcgggugcuauauccacuucuuucgcgaaccuaccgaccugaagcaguucaaacaagacgccaaguacucucauggaauugaugugacagaccuguuugcugcccagcccggccucaccuccgccgucaucgaggcucugccgcggaauauggugauuacgugucaggggagcgaugacaucagaaaacuuuucgaaucucagggacgcaaggauaucaagcugauugacaucgcccucuccaaaacagauagccggaaguaugagaacgcgguuugggaccaauacaaagaucugugccacaugcauaccggcguggucguggagaagaagaaaaagggcgggaaagaagagauuaccccucacugugcucugauggacugcaucauguuugaugccgccgucuccggaggccuuaauacacucgugcugagagcuguucugccccgcgacaugguguuccggaccucuacaccuaaggucgugcucugaggacuagucccuguucccagagcccacuuuuuuuucuuuuuuugaaauaaaauagccugucuuucagaucucaaaggcucuuuucagagccaccaaaaaaaaaaaaaaaaaaaaaaaaaaaaaaaaaaaaaaaaaaaaaaaaaaaaaaaaaaaaaaaaagaauu

SEQ ID NO: 19871 - RNA, 2021 nt, Artificial Sequence
  mRNA product Design a-2 (hSL-A64-N5) comprising derived and/or modified sequence from LASV(Z0947-SLE-2011;Clade IV)__AIT17841__SP-HsALB_NP(2-569) (opt5)
aggagaguccgcucagccagguugcagaagcggcuuagcguguguccuaaucuucucucugcguguagguaggccugugccgcaaacaagcuuaccaugaagugggugaccuucaucagccugcucuuucuguucuccucugccuacagcagcgccuccaaggagaucaaaucuuuccuguggacccagagccucagacgggaacuguccggcuacugcucuaacauuaagcugcaaguggucaaagacgcucaggcccugcuccacgggcuggauuuuagcgagguuuccaaugugcagcgccuuaugagaaaggaacggcgcgacgauaacgaccugaaaagacuccgggaucugaaucaggcggugaacaaucuggucgagcucaagucuacacaacaaaagagcauccugcgcgugggaacgcuuaccuccgacgaucugcucauucuggcugccgaccuugaaaaacuuaagagcaaaguuacaagaaccgagcggccccucucugccggcguguauauggggaaccuguccagccagcagcuggaucagcgcagagcucuccugaauaugaucggaaugucuggcuccaaccagggggcccggacaggacgcgacggcgucgugagaguuugggaugugaagaaugcugagcuucugaacaaucaguucggcaccaugccuagccucacacuggccugucuuaccaaacaggggcaagucgaccugaacgaugcggugcaggcccucacggaccugggacugauuuacaccgcuaaguauccgaauacaucugaccucgaucggcugacccagucccaucccauccuuaacaugaucgacacaaagaaaagcucccugaauauuucuggcuacaacuuuagccucggggccgcugugaaggccggagcgugcaugcuggauggcgggaacaugcuugaaaccaucaaagucuccccucaaacgauggacggcauucucaagagcauccugaaaguuaagaaagcccugggaauguucauuucugaugcucccggcgagcgcaauccuuaugaaaacauccuguacaagauuugucucuccggggacggauggcccuauaucgccagcagaacaucuaucaccggccgggcuugggagaauacagugguggaucuggagagcgacgggaagccucagaaagccggauccaacggcucuaauaagagccuucaguccgccggguuuaccgcuggacugaccuacagccagcucaugacacugaaagaugcgaugcugcaacuugacccgaacgccaagacguggauggauauugaaggcagacccgaggacccugucgaaaucgcucucuaccagcccucuuccggcugcuauauucacuucuuucgcgagccuaccgaccugaaacaguucaagcaggaugccaaguacagccaugggaucgacgugacagaucuguuugccgcucaacccggacucaccucugccguuauugacgcgcugccgcggaauauggugaucacaugucagggcuccgaugacaucagaaaacuuuucgaaagccaggggcgcaaggauauuaaacugaucgacauugcucucuccaagaccgauucucggaaauaugagaacgccgucugggaccaguacaaggaucugugccacaugcauacgggaaucgugguugagaagaaaaagagaggcgggaaagaagagauuacaccucacugugcccugauggacugcaucauguuugaugcugccgugagcggcggacuuaauaccuccguccuccgcgcugugcugccccgggacauggucuucagaaccucuacaccucgcgugguucugugaggacuagucccuguucccagagcccacuuuuuuuucuuuuuuugaaauaaaauagccugucuuucagaucucaaaggcucuuuucagagccaccaaaaaaaaaaaaaaaaaaaaaaaaaaaaaaaaaaaaaaaaaaaaaaaaaaaaaaaaaaaaaaaaagaauu

SEQ ID NO: 19872 - RNA, 2052 nt, Artificial Sequence
  mRNA product Design a-2 (hSL-A100) comprising derived and/or modified sequence from LASV(Josiah;Clade IV)__NP_694869__SP-HsALB_NP(2-569) (opt1)
aggagaguccgcucagccagguugcagaagcggcuuagcguguguccuaaucuucucucugcguguagguaggccugugccgcaaacaagcuuaccaugaagugggugaccuucaucagccugcucuuccuguucuccagcgccuacuccagcgccuccaaggagaucaagagcuuccuguggacccagucccuccgccgggagcugagcggcuacugcuccaacaucaagcuccagguggucaaggacgcccaggcgcugcugcacgggcuggacuucagcgagguguccaacgugcagcgccucaugcggaaggagcgccgggacgacaacgaccugaagcgccugcgggaccucaaccaggccgucaacaaccugguggagcucaagagcacccagcagaaguccauccugcgcgugggcacccugaccagcgacgaccugcucauccuggccgccgaccuggagaagcucaaguccaaggucauccggaccgagcgcccccugagcgccgggguguacaugggcaaccuguccagccagcagcucgaccagcggcgcgcgcugcugaacaugaucgggauguccggcggcaaccagggggcccgggccggccgcgacggggugguccgggugugggacgugaagaacgccgagcuccugaacaaccaguucggcaccaugccgagccugacgcucgcgugccugaccaagcaggggcaggucgaccugaacgacgccgugcaggcccucaccgaccugggccugaucuacaccgccaaguaccccaacacguccgaccucgaccgccugacccagagccaccccauccugaacaugaucgacaccaagaaguccagccucaacaucagcggcuacaacuucucccugggggccgcggugaaggccggcgccugcaugcuggacgggggcaacaugcucgagaccaucaaggucagcccccagacgauggacggcauccugaaguccauccugaaggugaagaaggcccucgggauguucaucagcgacaccccgggcgagcggaaccccuacgagaacauccuguacaagaucugccuguccggggacggcuggcccuacaucgccagccgcaccuccaucaccgggcgggcgugggagaacacgguggucgaccucgagagcgacggcaagccccagaaggccgacuccaacaacagcuccaagagccugcaguccgccggcuucaccgccgggcugaccuacagccagcucaugacccugaaggacgccaugcugcagcuggacccgaacgcgaagacguggauggacaucgagggccgccccgaggaccccguggagaucgcccucuaccagcccuccagcgggugcuacauccacuucuuccgggagccgaccgaccugaagcaguucaagcaggacgccaaguacucccacggcaucgacgugaccgaccuguucgccacccagcccgggcucacgagcgccgucaucgacgcgcugccccgcaacauggugaucacgugccagggcuccgacgacauccgcaagcugcucgagagccagggccggaaggacaucaagcugaucgacaucgcccugagcaagaccgacucccgcaaguacgagaacgccgugugggaccaguacaaggaccucugccacaugcacaccggggucguggucgagaagaagaagcggggcgggaaggaggagaucaccccgcacugcgcccugauggacugcaucauguucgacgcggccgugagcggcgggcugaacaccuccgugcuccgcgccguccugccccgggacaugguguuccgcaccagcacgccccgggugguccugugaggacuagucccuguucccagagcccacuuuuuuuucuuuuuuugaaauaaaauagccugucuuucagaucucaaaggcucuuuucagagccaccaaaaaaaaaaaaaaaaaaaaaaaaaaaaaaaaaaaaaaaaaaaaaaaaaaaaaaaaaaaaaaaaaaaaaaaaaaaaaaaaaaaaaaaaaaaaaaaaaaaaa

SEQ ID NO: 19873 - RNA, 2052 nt, Artificial Sequence
  mRNA product Design a-2 (hSL-A100) comprising derived and/or modified sequence from LASV(LP;Clade I)__AAF86702__SP-HsALB_NP(2-569) (opt1)
aggagaguccgcucagccagguugcagaagcggcuuagcguguguccuaaucuucucucugcguguagguaggccugugccgcaaacaagcuuaccaugaagugggugaccuucaucagccugcucuuccuguucuccagcgccuacuccagcaacuccaaggagaucaagagcuuccuguggacccagucccuccgccgggagcugagcggcuacugcuccaacaucaagcuccagguggucaaggacgcccaggcccugcugcacgggcuggacuucagcgagguguccaacgugcagcgccucaugcggaagcagaagcgcgacgacgcggaccugaagcggcugcgcgaccucaaccaggccgucaacaaccugguggagcucaagagcacccagcagaagaacgugcugcgggucggcacgcuguccagcgacgaccugaucacccucgccgccgaccuggagaagcugaaguccaaggugauccgcaccgagcggccccucagcuccgggguguacaugggcaaccugagcucccagcagcuggaccagcgccgggcccuccugagcaugaucgggauguccggcggcccgcaggggaaccgcaccggcggggacggcgucgugcgggugugggacgucaagaacgcggagcugcucaacaaccaguucgggacgaugcccagccugacccuggccugccucaccaagcagggccagguggaccugaacgacgccgugcaggcccugaccgaccucggccugaucuacacggcgaaguaccccaacuccagcgaccuggacaugcucacccagagccaccccauccuggggauggucgacaccaagaaguccagccugaacaucuccggcuacaacuucagccucggggccgccgugaaggccggcgccugcaugcuggacggcgggaacaugcuggagaccaucaagguguccccgcagacgauggacggcauccucaagagcauccugaaggucaagcgcucccuggggauguucaucagcgacacccccggcgagcggaaccccuacgagaacauccucuacaagaucugccuguccggggagggcuggcccuacaucgcgagccgcaccuccaucaccggccgggccugggagaacacgcugguggaccucgagagcgacaacaagccgcccaagcugaacuccgccgggagcaacaagucccugcaggccgccggccucaacgcggggcugaccuacagccagcugaugacccugaaggacugcaugcuccagcuggaccccuccagcaagaccuggaucgacaucgagggccgccccgaggacccgguggagaucgcccuguuccagcccuccagcgggugcuacauccacuucuuccgggagcccacggaccucaagcaguucaagcaggacgccaaguacagccacggcaucgacgucaccgaccuguucuccacccagcccggccugaccagcgccgugaucgaggcccucccgcgcaacauggugcugacgugccagggguccgacgacaucaagaagcugcucgagagccagggccggcgcgacaucaagcugaucgacaucucccugagcaaggcggacucccgcaaguucgagaacgccgucugggaccaguacaaggaccucugccacaugcacaccgggguggucguggagaagaagaagcggggcgggaaggaggagaucacgccccacugcgcccugcuggacugcaucauguucgacgccgccaccaccggcagccucaacaucaccacccugcgcgcggugcugccccgggacauggucuuccgcaccuccacgcccaagguggugcucugaggacuagucccuguucccagagcccacuuuuuuuucuuuuuuugaaauaaaauagccugucuuucagaucucaaaggcucuuuucagagccaccaaaaaaaaaaaaaaaaaaaaaaaaaaaaaaaaaaaaaaaaaaaaaaaaaaaaaaaaaaaaaaaaaaaaaaaaaaaaaaaaaaaaaaaaaaaaaaaaaaaaa

SEQ ID NO: 19874 - RNA, 2052 nt, Artificial Sequence
  mRNA product Design a-2 (hSL-A100) comprising derived and/or modified sequence from LASV(803213;Clade II)__AAF86704__SP-HsALB_NP(2-569) (opt1)
aggagaguccgcucagccagguugcagaagcggcuuagcguguguccuaaucuucucucugcguguagguaggccugugccgcaaacaagcuuaccaugaagugggugaccuucaucagccugcucuuccuguucuccagcgccuacuccagcgccuccaaggaggugaaguccuuccuguggacccagagccuccgccgggagcugagcggcuacugcuccaacaucaagcugcaggucgugaaggacgcccaggcgcuccugcacgggcuggacuucagcgaggugaacaacguccagcgccucaugcggaagcagaagcgcgacgacggcgaccugaagcggcugcgcgaccucaaccaggccgugaacaaccugguggagcugaaguccacccagcagaaguccauccuccgggucgggacgcugaccagcgacgaccugcucacccuggccgccgaccuggagaagcucaagagcaaggugauccgcaccgagcggccccuguccagcggcguguacauggggaaccuguccacgcagcagcucgagcagcgccgggcccugcugaacaugaucggcauggucggcggggcgcagggcacccagccggggcgcgacggcguggugcgggucugggacgugaagaaccccgaccuccugaacaaccaguucgggaccaugcccagccugacccucgccugccugacgaagcagggccagguggaccugaacgacgccguccucgcccugaccgaccugggccucaucuacaccgcgaaguaccccaacuccagcgaccuggaccgccugucccagagccacccgauccucaacaugguggacaccaagaaguccagccugaacaucagcggguacaacuucucccugggcgccgccgugaaggccggggccugcaugcucgacggcggcaacaugcuggagacgaucaaggucacgccccagaccauggacgggauccucaagagcauccugaaggugaagcggucccugggcauguucgugagcgacacccccggggagcgcaaccccuacgagaacauccuguacaagaucugccucuccggcgacggguggccguacaucgcgagccggaccuccaucgucggccgcgccugggagaacaccaccguggaccuggagagcgacggcaagccccagaagguggggaccgccggcuccaacaagagccugcaguccgccggguuccccacgggccucaccuacagccagcugaugacccugaaggacuccaugaugcagcuggaccccagcgccaagaccuggaucgacaucgaggggcggccggaggaccccgucgagaucgcgcucuaccagcccauguccggcugcuacauccacuucuuccgcgagcccacggaccugaagcaguucaagcaggacgccaaguacagccacggcaucgacguggccgaccuguucccggcccagcccgggcucaccuccgccgucaucgaggcgcugccccggaacauggugcugaccugccagggcagcgacgacaucaagaagcuccuggacucccaggggcgccgcgacaucaagcugaucgacaucagccucagcaagguggacucccggaaguucgagaacgccgucugggaccagugcaaggaccugugccacaugcacaccggcgugguggucgagaagaagaagcgcgggggcaaggaggagaucacgccccacugcgcccugauggacugcaucauguucgacgccgccgugagcggcgggcucaacaucccggugcugcgggcgguccugccccgcgacaugguguuccggaccuccagccccaaggugguccucugaggacuagucccuguucccagagcccacuuuuuuuucuuuuuuugaaauaaaauagccugucuuucagaucucaaaggcucuuuucagagccaccaaaaaaaaaaaaaaaaaaaaaaaaaaaaaaaaaaaaaaaaaaaaaaaaaaaaaaaaaaaaaaaaaaaaaaaaaaaaaaaaaaaaaaaaaaaaaaaaaaaaa

SEQ ID NO: 19875 - RNA, 2055 nt, Artificial Sequence
  mRNA product Design a-2 (hSL-A100) comprising derived and/or modified sequence from LASV(GA391;Clade III)__CAA36646__SP-HsALB_NP(2-570) (opt1)
aggagaguccgcucagccagguugcagaagcggcuuagcguguguccuaaucuucucucugcguguagguaggccugugccgcaaacaagcuuaccaugaagugggugaccuucaucagccugcucuuccuguucuccagcgccuacuccagcgccuccaaggaggugcgcagcuuccuguggacccagucccuccggcgcgagcugagcggcuacugcuccaacaucaagcugcaggucgugaaggacgcccaggcgcuccugcacgggcuggacuucagcgagguguccaacguccagcggcucaugcgcaagcagaagcgggacgacggcgaccugaagcgccugcgggaccucaaccaggccgugaacaaccugguggagcucaagagcacccagcagaaguccguccugcgcguggggacccugagcuccgacgaccugcucauccuggccgccgaccuggagaagcucaagagcaaggugacccggaccgagcgcccccuguccagcggcgucuacauggggaaccuguccagccagcagcucgaccagcggcgcgcccugcugaacaugaucggcaugaccggcguguccgggggcgggaagggcgcgagcgacgggaucgugcgggucugggacgugaagaacgccgagcuccugaacaaccaguucggcacgaugccgucccugacccucgccugccugaccaagcagggccagguggaccugaacgacgccguccaggcgcucaccgaccuggggcugaucuacacggccaaguaccccaacagcagcgaccucgaccgccugucccagagccaccccauccugaacaugaucgacaccaagaaguccagccucaacaucuccggcuacaacuucagccugggggccgccgugaaggccggcgcgugcaugcuggacggcgggaacaugcucgagaccaucaaggugagcccccagaccauggacggcauccucaaguccauccugaaggucaagaagucccuggggauguucgugagcgacacgccgggcgagcggaaccccuacgagaacauccuguacaagaucugccuguccggggacggcuggcccuacaucgccagccgcaccuccaucgugggccgggccugggagaacaccgucguggaccucgagcaggacaacaagccccagaagaucgggaacggcgggagcaacaagucccugcagagcgccggcuucgccgcggggcugaccuacucccagcucaugacgcugaaggacuucaagugcuucaaccugaucccgaacgccaagaccuggauggacaucgagggccgccccgaggaccccguggagaucgcccuguaccagcccagcuccggcugcuacguccacuucuuccgggagccgaccgaccucaagcaguucaagcaggacgccaaguacagccacgggaucgacgugaccgaccuguucgccgcgcagcccggccugacgagcgccgucaucgaggcccucccccgcaacauggugaucacgugccagggguccgaggacauccggaagcugcuggagagccagggccgccgcgacaucaagcucaucgacaucacccuguccaaggccgacagccggaaguucgagaacgccgugugggaccaguucaaggaccugugccacaugcacaccggggucgugguggagaagaagaagcgcggcggcaaggaggagaucacgccccacugcgcgcucauggacugcaucauguucgacgccgccgucuccgggggccuggacgccaaggugcugcgggugguccucccgcgcgacaugguguuccggaccagcacccccaaggugguccugugaggacuagucccuguucccagagcccacuuuuuuuucuuuuuuugaaauaaaauagccugucuuucagaucucaaaggcucuuuucagagccaccaaaaaaaaaaaaaaaaaaaaaaaaaaaaaaaaaaaaaaaaaaaaaaaaaaaaaaaaaaaaaaaaaaaaaaaaaaaaaaaaaaaaaaaaaaaaaaaaaaaaa

SEQ ID NO: 19876 - RNA, 2052 nt, Artificial Sequence
  mRNA product Design a-2 (hSL-A100) comprising derived and/or modified sequence from LASV(AV;Clade V)__CCA30315__SP-HsALB_NP(2-569) (opt1)
aggagaguccgcucagccagguugcagaagcggcuuagcguguguccuaaucuucucucugcguguagguaggccugugccgcaaacaagcuuaccaugaagugggugaccuucaucagccugcucuuccuguucuccagcgccuacuccagcgccuccaaggaggugaaguccuuccuguggacccagagccuccgccgggagcugagcggcuacugcuccaacaucaagcugcaggucgugaaggacgcccaggcgcuccugcacgggcuggacuucagcgagguguccaacguccagcgccucaugcggaagcagcgccgggacgacagcgaccugaagcgccugcgggaccucaaccaggccgugaacaaccugguggagcugaaguccacccagcagaaguccguccuccgcgugggcacgcugagcagcgacgaccugcucacccuggccgccgaccuggagaagcucaaguccaaggugacccggaccgagcgcccccugagcuccggggucuacaugggcaaccugagcucccagcagcucgaccagcggcgcgcccugcugaaccucaucgggaugacgaacggcagccagggcucccaggcggggcgggacggcguggugcgcgucugggacgugaagaacgccgagcugcugaacaaccaguucgggaccaugccgagccucacccuggccugccugaccaagcagggccagguggaccucaacgacgucgugcaggcccugacggaccuggggcucaucuacaccgcgaaguaccccaacaccagcgaccuggaccggcugacccagucccaccccauccucaacaugaucgacacgaagaaguccagccugaacaucagcggcuacaacuucucccugggcgccgccgugaaggccggggccugcaugcucgacggcgggaacaugcuggagaccaucaaggucagcccccaguccauggacggcauccucaagagcauccugaaggugaagcgcgcgcugggcauguucguguccgacaccccgggggagcggaaccccuacgagaacauccuguacaagaucugccucagcggcgacggguggcccuacaucgccucccgcaccagcaucgucggccgggccugggagaacacggugguggaccuggagaccgacgggaagccccagaagaucggcuccggcaacagcaacaagucccugcagagcgccggguucuccgccggccucaccuacagccagcugaugacccugaaggacgcgaugcugcagcucgacccgaacgccaagacguggauggacaucgaggggcgccccgaggaccccgucgagguggcccuguaccagcccaucuccggcugcuacauccacuucuuccgggagccgaccgaccugaagcaguucaagcaggacgccaaguacagccacgggaucgacaucgccgaccucuucgcggcccagcccggccugaccagcgccgucaucgaggcccugccccgcaacauggugaucacgugccagggcuccgaggacaucaagaagcuccuggagagccaggggcgcaaggacaucaagcugaucgacaucgcccucuccaagaucgacagccggaaguucgagaacgcggugugggaccaguacaaggaccugugccacaugcacaccggcgucgugguggagaagaagaagcgcgggggcaaggaggagaucaccccgcacugcgcccugauggacugcaucauguucgacgccgccgucuccgggggccucaacacccuggugcugcgggcggugcucccccgcgacauggucuuccggaccagcacgccccgcguggugcugugaggacuagucccuguucccagagcccacuuuuuuuucuuuuuuugaaauaaaauagccugucuuucagaucucaaaggcucuuuucagagccaccaaaaaaaaaaaaaaaaaaaaaaaaaaaaaaaaaaaaaaaaaaaaaaaaaaaaaaaaaaaaaaaaaaaaaaaaaaaaaaaaaaaaaaaaaaaaaaaaaaaaa

SEQ ID NO: 19877 - RNA, 2052 nt, Artificial Sequence
  mRNA product Design a-2 (hSL-A100) comprising derived and/or modified sequence from LASV(Togo/2016/7082;Clade VI)__AMR44578__SP-HsALB_NP(2-569) (opt1)
aggagaguccgcucagccagguugcagaagcggcuuagcguguguccuaaucuucucucugcguguagguaggccugugccgcaaacaagcuuaccaugaagugggugaccuucaucagccugcucuuccuguucuccagcgccuacuccagcaacuccaaggaggugaaguccuuccuguggacccagagccuccgccgggagcugagcggcuacugcuccaacaucaagcugcaggucgugaaggacgcccaggcccuccugcacgggcuggacuucagcgagguguccaacguccagcgccucaugcggaagcagaagcgcgacgacggcgaccugaagcggcugcgcgaccucaaccaggcggugaacaaccugguggagcucaagagcguccagcagaaguccauccugcggguggggacccugaccagcgacgaccugcucacccuggccgccgaccuggagaagcucaaguccaaggugacccgcaccgagcggccccugagcuccggcgucuacauggggaaccugagcucccagcagcucgaccagcgccgggcccugcugagcaugaucggcauguccggcgggaaccagaacagccagccgaagggcgacgggguggugcgcgucugggacgugaagaacgccgaccuccugaacaaccaguucggcacgaugcccucccugacccucgcgugccugaccaagcagggccagguggaccugaacgacgccguccaggcccucaccgaccuggggcugaucuacacggccaaguaccccaacagcagcgaccucgaccggcugucccagagccaccccauccugaacaugaucgacaccaagaaguccagccucaacaucuccggcuacaacuucagccugggggcggccaucaagaccggcgccugcaugcuggacgggggcaacaugcucgagaccaucaaggugacgccgcagaccauggacggcauccugaaguccauccugaaggugaagcgcagccucgggauguucaucuccgacacccccggcgagcggaaccccuacgagaacauccuguacaagaucugccugagcggggacggcuggcccuacaucgccucccgcaccgccaucaucgggcgggcgugggagaacacggucguggaccucgagagcgacuccaagccgcagaagaucggcagcaacggcuccaacaagagccugcaguccgccggguucgcccccggccugaccuacagccagcucaugacccugaaggacuccaugcugcagcuggaccccaacgccaagaccuggaucgacaucgaggggcgccccgaggacccgguggaggucgcccucuuccagcccaucagcggcugcuacauccacuucuuccgggagcccacggaccugaagcaguucaagcaggacgcgaaguacagccacgggaucgacgugaccgaccuguucgccgcccagcccggccucaccuccgccgugaucgaggcccugccgcgcaacaugguccugaccugccagggcagcgacgacaucaagaagcuccuggacucccaggggcggcgcgacaucaagcugaucgacgugagccucaacaagaucgacucccgcaaguucgagaacgcggucugggaccaguacaaggaccugugccacaugcacacgggcgugguggucgagaagaagaagaagggcgggaaggaggagaucacgccccacugcgcccugcucgacugcaucauguucgacgccgccgugagcgggggccugaacgccaccgugcugcgggcgguccucccccgcgacaugguguuccggaccuccagccccaaggugguccugugaggacuagucccuguucccagagcccacuuuuuuuucuuuuuuugaaauaaaauagccugucuuucagaucucaaaggcucuuuucagagccaccaaaaaaaaaaaaaaaaaaaaaaaaaaaaaaaaaaaaaaaaaaaaaaaaaaaaaaaaaaaaaaaaaaaaaaaaaaaaaaaaaaaaaaaaaaaaaaaaaaaaa

SEQ ID NO: 19878 - RNA, 2052 nt, Artificial Sequence
  mRNA product Design a-2 (hSL-A100) comprising derived and/or modified sequence from LASV(KAK-428;Clade n.d. (VII))__ANH09741__SP-HsALB_NP(2-569) (opt1)
aggagaguccgcucagccagguugcagaagcggcuuagcguguguccuaaucuucucucugcguguagguaggccugugccgcaaacaagcuuaccaugaagugggugaccuucaucagccugcucuuccuguucuccagcgccuacuccagcaacuccaaggaggugaaguccuuccuguggacccagagccuccgccgggagcugagcggcuacugcaccaacaucaagcugcaggucgugaaggacgcccaggcccuccugcacgggcuggacuucuccgaggugagcaacguccagcgccucaugcggaagcagaagcgcgacgacaacgaccugaagcggcugcgcgaccucaaccaggcggugaacaaccugguggagcugaaguccguccagcagaaguccgugcucaaggugggcacgcugaacagcgacgaccugcucacccuggccgccgaccuggagaagcucaagagcaaggucgugcggaccgagcgcccccuguccagcgggguguacaugggcaaccuguccagccagcagcucgaccagcggcgcgcccugcugaacaugaucgggauggccggcggcucccaggggaaccagccgagccgggacggcgucgugcgcgugugggacgucaagaacgcggaccuccugaacaaccaguucgggaccaugcccucccugacgcucgccugccugaccaagcagggccagguggaccugaacgacgugguccucgcccugaccgaccuggggcucaucuacaccgccaaguaccccaacagcuccgaccuggaccggcugagccagaaccaccccgugcucaacaugaucgacgugaacaagagcucccugaacaucagcggcuacaacuucucccugggcgcggccgucaaggccggggccugcaugcucgacggcgggaacaugcuggagacgaucaagaucagcccgcagaccguggacggcauccugaaguccauccucaaggugaagcgcgcccugggcauguucgucagcgacacccccggggagcggaaccccuacgagaacauccuguacaaggugugccucuccggcaacggguggcccuacaucgcgagccgcaccuccaucgucggccgggccugggagaacacggugguggaccuggagagcaacaagaaccagccgaaggucgggaacaacggcuccaacaagaugcugcagagcuccggcuucgccaccgggcucaccuacagccagcugaugacccugcgcgacuccaugcugcagcucgaccccacggccaagaccuggaucgacaucgagggccggcccgaggaccccguggagcuggcccuguuccagccgagcuccgggugcuacauccacuucuuccgcgagcccaccgaccucaagcaguucaagcaggacgcgaaguacagccacggcaucgacgugaacgaccuguucuccgcccagcccgggcugaccagcgccguccucgaggcccugccccggaacauggugcugacgugccagggcagcgacgacauccgcaagcuccuggacucccaggaccgcaaggacaucaagcugaucgacaucagccucuccaaggccgacgcgcggaaguucgagaacgacgugugggaccaguucaaggaccugugccacaugcacaccggcaucgucguggagaagaagaagaagggcgggaagcaggagaugaccccgcacugcgcccugcucgacugcaucauguucgacgccgccgugagcgggggccugaacguccccacccugcgcgccgugcuccccacggacaugguguuccggaccaucaccaccaaggucgugcugugaggacuagucccuguucccagagcccacuuuuuuuucuuuuuuugaaauaaaauagccugucuuucagaucucaaaggcucuuuucagagccaccaaaaaaaaaaaaaaaaaaaaaaaaaaaaaaaaaaaaaaaaaaaaaaaaaaaaaaaaaaaaaaaaaaaaaaaaaaaaaaaaaaaaaaaaaaaaaaaaaaaaa

SEQ ID NO: 19879 - RNA, 2052 nt, Artificial Sequence; identical to SEQ ID NO: 19873
  mRNA product Design a-2 (hSL-A100) comprising derived and/or modified sequence from LASV(Pinneo-NIG-1969;Clade I)__AIT17837__SP-HsALB_NP(2-569) (opt1)

SEQ ID NO: 19880 - RNA, 2052 nt, Artificial Sequence
  mRNA product Design a-2 (hSL-A100) comprising derived and/or modified sequence from LASV(ISTH0009-NIG-2011;Clade II)__AIT17405__SP-HsALB_NP(2-569) (opt1)
aggagaguccgcucagccagguugcagaagcggcuuagcguguguccuaaucuucucucugcguguagguaggccugugccgcaaacaagcuuaccaugaagugggugaccuucaucagccugcucuuccuguucuccagcgccuacuccagcguguccaaggaggucaagagcuuccuguggacccagucccuccgccgggagcugagcggcuacugcuccaacaucaagcuccagguggugaaggacgcccaggcccugcugcacgggcuggacuucagcgaggucuccaacgugcagcgccucaugcggaagcagaagcgcgacgacagcgaccugaagcggcugcgcgaccucaaccaggcggugaacaaccuggucgagcugaaguccacccagcagaaguccauccuccgggugggcacccugaccagcgacgaccugcucacccuggccgccgaccuggagaagcucaagagcaaggugauccgcaccgagcggccccuguccagcggggucuacaugggcaaccuguccacgcagcagcucgagcagcgccgggcccugcugaacaugaucgggauggugggcggcgcccaggggacccagccgggccgcgacggggugguccgggugugggacgugaagaaccccgaccuccugaacaaccaguucggcaccaugcccagccugacccucgcgugccugacgaagcaggggcaggucgaccugaacgacgccgugcucgcccugaccgaccugggccucaucuacaccgccaaguaccccaacuccagcgaccuggaccgccugucccagagccacccgauccucaacaugguggacaucaagaaguccagccugaacaucagcggcuacaacuucucccugggggcggccgucaaggccggcgccugcaugcucgacgggggcaacaugcuggagaccaucaaggugacgccccagaccauggacggcauccucaagagcauccugaaggugaagcggucccuggggauguucgucagcgacacccccggcgagcgcaaccccuacgagaacauccuguacaagaucugccucuccggggacggcuggccguacaucgccagccggaccuccaucguggggcgcgcgugggagaacacgaccguggaccuggagagcgacggcaagccccagaaggucggcuccgccgggagcaacaagucccugcagagcgccggcuuccccaccgggcucaccuacucccagcugaugacgcugaaggacagcaugaugcagcuggaccccuccgccaagaccuggaucgacaucgagggccggccggaggaccccguggagaucgcccucuaccagcccaugagcgggugcuacauccacuucuuccgcgagcccaccgaccugaagcaguucaagcaggacgcgaaguacucccacggcaucgacgucgccgaccuguucccggcccagcccggccucaccagcgccgugaucgaggcccugccccggaacauggugcugacgugccaggggagcgacgacaucaagcgccuccuggacucccagggccgccgggacaucaagcugaucgacaucgcgcucagcaaggccgacucccgccgguucgagaacgccgucugggaccagugcaaggaccugugccacaugcacaccggggugguggucgagaagaagaagcgcggcgggaaggaggagaucacgccccacugcgcccugauggacugcaucauguacgacgccgcggugagcggcggccucaacaucccggugcugcgggccguccugccccgcgacaugguguuccggaccuccagccccaaggugguccucugaggacuagucccuguucccagagcccacuuuuuuuucuuuuuuugaaauaaaauagccugucuuucagaucucaaaggcucuuuucagagccaccaaaaaaaaaaaaaaaaaaaaaaaaaaaaaaaaaaaaaaaaaaaaaaaaaaaaaaaaaaaaaaaaaaaaaaaaaaaaaaaaaaaaaaaaaaaaaaaaaaaaa

SEQ ID NO: 19881 - RNA, 2052 nt, Artificial Sequence
  mRNA product Design a-2 (hSL-A100) comprising derived and/or modified sequence from LASV(ISTH2010-NIG-2012;Clade II)__AIT17483__SP-HsALB_NP(2-569) (opt1)
aggagaguccgcucagccagguugcagaagcggcuuagcguguguccuaaucuucucucugcguguagguaggccugugccgcaaacaagcuuaccaugaagugggugaccuucaucagccugcucuuccuguucuccagcgccuacuccagcgccuccaaggaggugaaguccuuccuguggacccagagccuccgccgggagcugagcggcuacugcuccaacaucaagcugcaggucgugaaggacgcccaggcgcuccugcacgggcuggacuucagcgagguguccaacguccagcgccucaugcggaagcagaagcgcgacgacagcgaccugaagcggcugcgcgaccucaaccaggccgugaacaaccugguggagcugaaguccacccagcagaaguccauccuccgggucggcacgcugaccagcgacgaccugcucacccuggccgccgaccuggagaagcucaagagcaaggugauccgcaccgagcggccccuguccagcgggguguacaugggcaaccuguccacgcagcagcucgagcagcgccgggcccugcugaaccucaucgggauggucggcggcgcgcaggggacccagccgggccgcgacgggguggugcgggucugggacgugaagaaccccgaccugcugaacaaccaguucggcaccaugcccagccucacccuggccugccugacgaagcagggccagguggaccucaacgacgccguccuggcccugaccgaccucgggcugaucuacaccgcgaaguaccccaacuccagcgaccuggaccgccucucccagagccacccgauccugaacaugguggacaccaagaaguccagccugaacaucagcggcuucaacuucucccucggggccgccgugaaggccggcgccugcaugcuggacgggggcaacaugcuggagacgaucaaggucacgccccagaccauggacggcauccucaagagcauccugaaggugaagaagucccuggggauguucgugagcgacacccccggcgagcggaaccccuacgagaacauccucuacaagaucugccuguccggggacggcuggccguacaucgcgagccgcaccuccaucgucgggcgggccugggagaacaccaccguggaccuggagagcgacggcaagccccacaaggugggcaccgccggguccaacaagagccuccaguccgccggcuuccccacggggcugaccuacagccagcugaugacccugaaggacuccaugaugcagcucgaccccagcgccaagaccuggaucgacaucgagggccgcccggaggaccccgucgagaucgcgcuguaccagcccauguccgggugcuacauccacuucuuccgggagcccacggaccugaagcaguucaagcaggacgccaaguacagccacggcaucgacguggccgaccucuucccggcccagcccggccugaccuccgccgucaucgaggcgcugccccgcaacauggugcugaccugccaggggagcgacgacaucaagcggcuccuggacagccagggccgccgcgacaucaagcucaucgacaucgcccuguccaaggccgacagccggcgcuucgagaacgccgugugggaccagugcaaggaccugugccacaugcacaccggggucgugguggagaagaagaagcggggcgggaaggaggagaucacgccccacugcgcccucauggacugcaucauguacgacgcggccgucuccggcggccugaacaucccggugcugcgcgccgugcucccccgggacauggucuuccgcaccagcucccccaagguggugcugugaggacuagucccuguucccagagcccacuuuuuuuucuuuuuuugaaauaaaauagccugucuuucagaucucaaaggcucuuuucagagccaccaaaaaaaaaaaaaaaaaaaaaaaaaaaaaaaaaaaaaaaaaaaaaaaaaaaaaaaaaaaaaaaaaaaaaaaaaaaaaaaaaaaaaaaaaaaaaaaaaaaaa

SEQ ID NO: 19882 - RNA, 2052 nt, Artificial Sequence
  mRNA product Design a-2 (hSL-A100) comprising derived and/or modified sequence from LASV(Lassa virus/H.sapiens-wt/NGA/2015/ISTH_0543;Clade II)__AVO03640__SP-HsALB_NP(2-569) (opt1)
aggagaguccgcucagccagguugcagaagcggcuuagcguguguccuaaucuucucucugcguguagguaggccugugccgcaaacaagcuuaccaugaagugggugaccuucaucagccugcucuuccuguucuccagcgccuacuccagcgccuccaaggaggugaaguccuuccuguggacccagagccuccgccgggagcugagcggcuacugcuccaacaucaagcugcaggucgugaaggacgcccaggcgcuccugcacgggcuggacuucagcgagguguccaacguccagcgccucaugcggaagcagaagcgcgacgacagcgaccugaagcggcugcgcgaccucaaccaggccgugaacaaccugguggagcugaaguccacccagcagaaguccauccuccgggucggcacgcugaccagcgacgaccugcucacccuggccgccgaccuggagaagcucaagagcaaggugauccgcaccgagcggccccuguccagcgggguguacaugggcaaccuguccacgcagcagcucgagcagcgccgggcccugcugaacaugaucgggauggucggcggcgcgcaggggacccagccgggccgcgacgggguggugcgggucugggacgugaagaaccccgaccuccugaacaaccaguucggcaccaugcccagccugacccucgccugccugacgaagcagggccagguggaccugaacgacgccguccucgcccugaccgaccuggggcucaucuacaccgcgaaguaccccaacuccagcgaccuggaccgccugucccagagccacccgauccucaacaugguggacaccaagaaguccagccugaacaucagcggcuacaacuucucccugggggccgccgugaaggccggcgccugcaugcucgacgggggcaacaugcuggagacgaucaaggucacgccccagaccauggacggcauccucaagagcauccugaaggugaagaagucccuggggauguucgugagcgacacccccggcgagcggaaccccuacgagaacauccuguacaagaucugccucuccggggacggcuggccguacaucgcgagccgcaccuccaucgucgggcgggccugggagaacaccaccguggaccuggagagcgacggcaagccccagaaggugggcuccgccgggagcaacaagucccugcagagcgccggcuuccccaccgggcucacguacucccagcugaugacccugaaggacagcaugaugcagcuggaccccuccgccaagaccuggaucgacaucgagggccgcccggaggaccccgucgagaucgcgcucuaccagcccaugagcgggugcuacauccacuucuuccgggagcccaccgaccugaagcaguucaagcaggacgccaaguacucccacggcaucgacguggccgaccuguucccggcccagcccggccucacgagcgccgucaucgaggcgcugccccgcaacauggugcugaccugccaggggagcgacgacaucaagcggcuccuggacucccagggccgcaaggacaucaagcugaucgacaucgcccucagcaaggccgacucccgccgguucgagaacgccgugugggaccagugcaaggaccugugccacaugcacaccggggucgugguggagaagaagaagcgcggcgggaaggaggagaucacgccccacugcgcccugauggacugcaucauguacgacgcggccgucagcggcggccucaacaucccggugcugcgggccgugcugccccgcgacauggucuuccggaccuccagccccaagguggugcucugaggacuagucccuguucccagagcccacuuuuuuuucuuuuuuugaaauaaaauagccugucuuucagaucucaaaggcucuuuucagagccaccaaaaaaaaaaaaaaaaaaaaaaaaaaaaaaaaaaaaaaaaaaaaaaaaaaaaaaaaaaaaaaaaaaaaaaaaaaaaaaaaaaaaaaaaaaaaaaaaaaaaa

SEQ ID NO: 19883 - RNA, 2052 nt, Artificial Sequence
  mRNA product Design a-2 (hSL-A100) comprising derived and/or modified sequence from LASV(Lassa virus/H.sapiens-wt/NGA/2016/ISTH_0009;Clade II)__AVO03572__SP-HsALB_NP(2-569) (opt1)
aggagaguccgcucagccagguugcagaagcggcuuagcguguguccuaaucuucucucugcguguagguaggccugugccgcaaacaagcuuaccaugaagugggugaccuucaucagccugcucuuccuguucuccagcgccuacuccagcgccuccaaggaggugaaguccuuccuguggacccagagccuccgccgggagcugagcggcuacugcuccaacaucaagcugcaggucgugaaggacgcccaggcgcuccugcacgggcuggacuucagcgagguguccaacguccagcgccucaugcggaagcagaagcgcgacgacagcgaccugaagcggcugcgcgaccucaaccaggccgugaacaaccugguggagcugaaguccacccagcagaaguccauccuccgggucggcacgcugaccagcgacgaccugcucacccuggccgccgaccuggagaagcucaagagcaaggugauccgcaccgagcggccccuguccagcgggguguacaugggcaaccuguccacgcagcagcucgagcagcgccgggcccugcugaacaugaucgggauggucggcggcgcgcaggggacccagccgggccgcgacgggguggugcgggucugggacgugaagaaccccgaccuccugaacaaccaguucggcaccaugcccagccugacccucgccugccugacgaagcagggccagguggaccugaacgacgccguccucgcccugaccgaccuggggcucaucuacaccgcgaaguaccccaacuccagcgaccuggaccgccugucccagagccacccgauccucaacaugguggacaccaagaaguccagccugaacaucagcggcuacaacuucucccugggggccgccgugaaggccggcgccugcaugcucgacgggggcaacaugcuggagacgaucaaggucacgccccagaccauggacggcauccucaagagcauccugaaggugaagaagucccuggggauguucgugagcgacacccccggcgagcggaaccccuacgagaacauccuguacaagaucugccucuccggggacggcuggccguacaucgcgagccgcaccuccaucgucgggcgggccugggagaacaccaccguggaccuggagagcgacggcaagccccagaaggugggcuccgccgggagcaacaagucccugcagagcgccggcuuccccaccgggcucacguacucccagcugaugacccugaaggacagcaugaugcagcuggaccccuccgccaagaccuggaucgacaucgagggccgcccggaggaccccgucgagaucgcgcucuaccagcccaugagcgggugcuacauccacuucuuccgggagcccaccgaccugaagcaguucaagcaggacgccaaguacucccacggcaucgacguggccgaccuguucccggcccagcccggccucacgagcgccgucaucgaggcgcugccccgcaacauggugcugaccugccaggggagcgacgacaucaagcggcuccuggacucccagggccgccgcgacaucaagcugaucgacaucgcccucagcaaggccgacucccggcgcuucgagaacgccgugugggaccagugcaaggaccugugccacaugcacaccggggucgugguggagaagaagaagcggggcgggaaggaggagaucacgccccacugcgcccugauggacugcaucauguacgacgcggccgucagcggcggccucaacaucccggugcugcgcgccgugcugccccgggacauggucuuccgcaccuccagccccaagguggugcucugaggacuagucccuguucccagagcccacuuuuuuuucuuuuuuugaaauaaaauagccugucuuucagaucucaaaggcucuuuucagagccaccaaaaaaaaaaaaaaaaaaaaaaaaaaaaaaaaaaaaaaaaaaaaaaaaaaaaaaaaaaaaaaaaaaaaaaaaaaaaaaaaaaaaaaaaaaaaaaaaaaaaa

SEQ ID NO: 19884 - RNA, 2052 nt, Artificial Sequence
  mRNA product Design a-2 (hSL-A100) comprising derived and/or modified sequence from LASV(Lassa virus/H.sapiens-wt/NGA/2016/ISTH_0017;Clade II)__AVO03568__SP-HsALB_NP(2-569) (opt1)
aggagaguccgcucagccagguugcagaagcggcuuagcguguguccuaaucuucucucugcguguagguaggccugugccgcaaacaagcuuaccaugaagugggugaccuucaucagccugcucuuccuguucuccagcgccuacuccagcgccuccaaggaggugaaguccuuccuguggacccagagccuccgccgggagcugagcggcuacugcuccagcaucaagcugcaggucgugaaggacgcccaggcgcuccugcacgggcuggacuucuccgaggugagcaacguccagcgccucaugcggaagcagaagcgcgacgacuccgaccugaagcggcugcgcgaccucaaccaggccgugaacaaccugguggagcucaagagcacccagcagaaguccauccugcgggucggcacgcugaccagcgacgaccugcucacccuggccgccgaccuggagaagcucaaguccaaggugauccgcaccgagcggccccugagcuccgggguguacaugggcaaccugagcacgcagcagcucgagcagcgccgggcccugcugaacaugaucgggauggcgggcggcgcccaggggacccagccgggccgcgacggggucgugcgggugugggacgucaagaaccccgaccuccugaacaaccaguucggcaccaugcccucccugacccucgccugccugacgaagcagggccagguggaccugaacgacgccgugcucgcgcugaccgaccuggggcucaucuacaccgccaaguaccccaacagcuccgaccuggaccgccugagccagagccacccgauccucaacauggucgacaccaagaaguccagccugaacaucuccggcuacaacuucagccugggggccgccgugaaggccggcgcgugcaugcucgacgggggcaacaugcuggagacgaucaaggugacgccccagaccauggacggcauccugaaguccauccucaaggucaagcggagccuggggauguucguguccgacgcccccggcgagcgcaaccccuacgagaacauccuguacaagaucugccucagcggggacggcuggccguacaucgccucccggaccagcaucguggggcgcgccugggagaacaccaccgucgaccuggaguccgacggcaagccccagaaggugggcgccaccgggagcaacaagucccugcagagcgcgggcuuccccaccgggcucacguacucccagcugaugacccugaaggacagcaugaugcagcuggaccccuccgccaagaccuggaucgacaucgagggccggccggaggaccccguggaggucgcccucuaccagcccgugagcgggugcuacauccacuucuuccgcgagcccaccgaccugaagcaguucaagcaggacgccaaguacucccacggcaucgacgucgccgaccuguucccggcgcagcccggccucacgagcgccgugaucgaggcccugccccggaacauggugcugaccugccaggggagcgacgacaucaagaagcuccuggacucccagggccgcaaggacaucaagcugaucgacaucgcccucagcaaggccgacucccgccgguucgagaacgcggucugggaccagugcaaggaccugugccacaugcacaccggggugguggucgagaagaagaagcgcggcgggaaggaggagaucacgccccacugcgcccugauggacugcaucauguacgacgccgccgugagcggcggccucaacaucccggugcugcgggcgguccugccccgcgacaugguguuccggaccuccagccccaaggugguccucugaggacuagucccuguucccagagcccacuuuuuuuucuuuuuuugaaauaaaauagccugucuuucagaucucaaaggcucuuuucagagccaccaaaaaaaaaaaaaaaaaaaaaaaaaaaaaaaaaaaaaaaaaaaaaaaaaaaaaaaaaaaaaaaaaaaaaaaaaaaaaaaaaaaaaaaaaaaaaaaaaaaaa

SEQ ID NO: 19885 - RNA, 2052 nt, Artificial Sequence
  mRNA product Design a-2 (hSL-A100) comprising derived and/or modified sequence from LASV(Lassa virus/H.sapiens-wt/NGA/2018/ISTH_0959;Clade II)__AVV65100__SP-HsALB_NP(2-569) (opt1)
aggagaguccgcucagccagguugcagaagcggcuuagcguguguccuaaucuucucucugcguguagguaggccugugccgcaaacaagcuuaccaugaagugggugaccuucaucagccugcucuuccuguucuccagcgccuacuccagcgccuccaaggaggugaaguccuuccuguggacccagagccuccgccgggagcugagcggcuacugcuccaacaucaagcugcaggucgugaaggacgcccaggcgcuccugcacgggcuggacuucagcgagguguccaacguccagcgccucaugcggaagcagaagcgcgacgacagcgaccugaagcggcugcgcgaccucaaccaggccgugaacaaccugguggagcugaaguccacccagcagaaguccauccuccgggucggcacccugaccagcgacgaccugcucacccuggccgccgaccuggagaagcucaagagcaaggugauccgcaccgagcggccccuguccagcgggguguacaugggcaaccuguccacgcagcagcucgagcagcgccgggcccugcugaaccucaucgggauggucggcggcgcgcaggggacccagccgggccgcgacgggguggugcgggucugggacgugaagaaccccgaccugcugaacaaccaguucggcaccaugcccagccucacccuggccugccugacgaagcagggccagguggaccucaacgacgucgugcuggcccugaccgaccucgggcugaucuacaccgccaaguaccccaacuccagcgaccuggaccgccucucccagagccacccgauccugaacaugguggacaccaagaaguccagccugaacaucagcggcuucaacuucucccucggggcggccgucaaggccggcgccugcaugcuggacgggggcaacaugcuggagacgaucaaggugacgccccagaccauggacggcauccucaagagcauccugaaggugaagaagucccuggggauguucgucagcgacacccccggcgagcggaaccccuacgagaacauccucuacaagaucugccuguccggggacggcuggccguacaucgccagccgcaccuccaucguggggcgggcgugggagaacaccaccguggaccuggagagcgacggcaagccccacaaggucggcaccgccggguccaacaagagccuccaguccgccggcuuccccacggggcugaccuacagccagcugaugacccugaaggacuccaugaugcagcucgaccccagcgccaagaccuggaucgacaucgagggccgcccggaggaccccguggagaucgcccuguaccagcccauguccgggugcuacauccacuucuuccgggagcccacggaccugaagcaguucaagcaggacgcgaaguacagccacggcaucgacgucgccgaccucuucccggcccagcccggccugaccuccgccgugaucgaggcccugccccgcaacauggugcugaccugccaggggagcgacgacaucaagcggcuccuggacagccagggccgcaaggacaucaagcucaucgacaucgcgcuguccaagaccgacagccgccgguucgagaacgccgucugggaccagugcaaggaccugugccacaugcacacgggggugguggucgagaagaagaagcgcggcgggaaggaggagaucacgccccacugcgcccucauggacugcaucauguacgacgccgccguguccggcggccugaacaucccggugcugcgggcgguccucccccgcgacaugguguuccggaccagcucccccaaggugguccugugaggacuagucccuguucccagagcccacuuuuuuuucuuuuuuugaaauaaaauagccugucuuucagaucucaaaggcucuuuucagagccaccaaaaaaaaaaaaaaaaaaaaaaaaaaaaaaaaaaaaaaaaaaaaaaaaaaaaaaaaaaaaaaaaaaaaaaaaaaaaaaaaaaaaaaaaaaaaaaaaaaaaa

SEQ ID NO: 19886 - RNA, 2052 nt, Artificial Sequence
  mRNA product Design a-2 (hSL-A100) comprising derived and/or modified sequence from LASV(LASV003-NIG-2008;Clade II)__AIT17581__SP-HsALB_NP(2-569) (opt1)
aggagaguccgcucagccagguugcagaagcggcuuagcguguguccuaaucuucucucugcguguagguaggccugugccgcaaacaagcuuaccaugaagugggugaccuucaucagccugcucuuccuguucuccagcgccuacuccagcgccuccaaggaggugaaguccuuccuguggacccagagccuccgccgggagcugagcggcuacugcuccagcaucaagcugcaggucgugaaggacgcccaggcgcuccugcacgggcuggacuucuccgaggugagcaacguccagcgccucaugcggaagcagaagcgcgacgacuccgaccugaagcggcugcgcgaccucaaccaggccgugaacaaccugguggagcucaagagcacccagcagaaguccguccugcgggugggcacccugaccagcgacgaccugcucacccuggccgccgaccuggagaagcucaaguccaaggugauccgcaccgagcggccccugagcuccggggucuacaugggcaaccugagcgcccagcagcucgagcagcgccggacgcugcugaacaugaucgggauggugggcggcgcgcaggggacccagccgggccgcgacggggugguccgggugugggacgugaagaaccccgaccuccugaacaaccaguucggcaccaugcccucccugacccucgccugccugacgaagcaggggcaggucgaccugaacgacguggugcucgcccugaccgaccugggccucaucuacaccgccaaguaccccaacagcuccgaccuggaccgccugagccagagccacccgauccucuccauggucgacaccaagaaguccagccugaacaucagcggcuacaacuucucccugggggcggccgugaaggccggcgccugcaugcucgacgggggcaacaugcuggagacgaucaaggugacgccccagaccauggacggcauccucaagagcauccugaaggucaagaagucccuggggauguucgugagcgacacccccggcgagcggaaccccuacgagaacauccuguacaagaucugccucuccggggacggcuggccguacaucgccagccgcaccuccaucguggggcgggcgugggagaacaccaccgucgaccuggagagcgacggcaagccccagaaggugggcaccgccggguccaacaagagccugcaguccgccggcuuccccacggggcucaccuacagccagcugaugacccugaaggacuccaugaugcagcuggaccccagcgccaagaccuggaucgacaucgagggccgcccggaggaccccgucgagaucgcccucuaccagcccauguccgggugcuacauccacuucuuccgggagcccacggaccugaagcaguucaagcaggacgcgaaguacagccacggcaucgacgugaccgaccuguucccggcccagcccggccucaccagcgccgugaucgaggcccugccccgcaacaugguccugaccugccagggguccgacgacaucaagcggcuccuggacagccagggccgccgcgacaucaagcugaucgacaucgcccucuccaaggcggacagccggcgcuucgagaacgccgugugggaccagugcaaggaccugugccacaugcacacggggguggucguggagaagaagaagcggggcgggaaggaggagaucacgccccacugcgcccugauggacugcaucauguacgacgccgccguguccggcggccucaacaucccgguccugcgcgcggugcugccccgggacaugguguuccgcaccagcucccccaaggucgugcucugaggacuagucccuguucccagagcccacuuuuuuuucuuuuuuugaaauaaaauagccugucuuucagaucucaaaggcucuuuucagagccaccaaaaaaaaaaaaaaaaaaaaaaaaaaaaaaaaaaaaaaaaaaaaaaaaaaaaaaaaaaaaaaaaaaaaaaaaaaaaaaaaaaaaaaaaaaaaaaaaaaaaa

SEQ ID NO: 19887 - RNA, 2052 nt, Artificial Sequence
  mRNA product Design a-2 (hSL-A100) comprising derived and/or modified sequence from LASV(LASV035-NIG-2009;Clade II)__AIT17589__SP-HsALB_NP(2-569) (opt1)
aggagaguccgcucagccagguugcagaagcggcuuagcguguguccuaaucuucucucugcguguagguaggccugugccgcaaacaagcuuaccaugaagugggugaccuucaucagccugcucuuccuguucuccagcgccuacuccagcgccuccaaggaggugaaguccuuccuguggacccagagccuccgccgggagcugagcggcuacugcuccagcaucaagcugcaggucgugaaggacgcccaggcgcuccugcacgggcuggacuucuccgaggugagcaacguccagcgccucaugcggaagcagaagcgcgacgacuccgaccugaagcggcugcgcgaccucaaccaggccgugaacaaccugguggagcucaagagcacccagcagaaguccauccugcgggucggcacgcugaccagcgacgaccugcucacccuggccgccgaccuggagaagcucaaguccaaggugauccgcaccgagcggccccugagcuccgggguguacaugggcaaccugagcgcccagcagcucgagcagcgccgggcgcugcugaacaugaucgggauggucggcggcgcccaggggacgcagccgggccgcgacgggguggugcgggucugggacgugaagaaccccgaccuccugaacaaccaguucggcaccaugcccucccugacccucgccugccugaccaagcagggccagguggaccugaacgacgccguccucgcgcugacggaccuggggcucaucuacaccgccaaguaccccaacagcuccgaccuggaccgccugagccagagccacccgauccucaacaugguggacaccaagaaguccagccugaacaucuccggcuacaacuucagccugggggccgccgugaaggccggcgcgugcaugcucgacgggggcaacaugcuggagaccaucaaggucacgccccagaccauggacggcauccugaaguccauccucaaggugaagcggagccuggggauguucguguccgacacccccggcgagcgcaaccccuacgagaacauccuguacaagaucugccucagcggggacggcuggccguacaucgccucccggaccagcaucgucgggcgcgccugggagaacacgaccguggaccuggaguccgacggcaagccccagaaggugggcaccaccgggagcaacaagucccugcagagcgccggcuuccccacggggcucaccuacucccagcugaugacccugaaggacagcaugaugcagcuggaccccuccgccaagaccuggaucgacaucgagggccggccggaggaccccgucgagaucgcgcucuaccagcccaugagcgggugcuacauccacuucuuccgcgagcccacggaccugaagcaguucaagcaggacgccaaguacucccacggcaucgacguggccgaccuguucccggcccagcccggccucaccagcgccgucaucgaggcgcugccccggaacauggugcugaccugccaggggagcgacgacaucaagaagcuccuggacucccagggccgccgcgacaucaagcugaucgacaucgcccucagcaaggccgacucccggaaguucgagaacgccgugugggaccagugcaaggaccugugccacaugcacaccggggucgugguggagaagaagaagcgcggcgggaaggaggagaucacgccccacugcgcccugauggacugcaucauguacgacgcggccgucagcggcggccucaacaucccggugcugcgggccgugcugccccgcgacauggucuuccggaccuccagccccaagguggugcucugaggacuagucccuguucccagagcccacuuuuuuuucuuuuuuugaaauaaaauagccugucuuucagaucucaaaggcucuuuucagagccaccaaaaaaaaaaaaaaaaaaaaaaaaaaaaaaaaaaaaaaaaaaaaaaaaaaaaaaaaaaaaaaaaaaaaaaaaaaaaaaaaaaaaaaaaaaaaaaaaaaaaa

SEQ ID NO: 19888 - RNA, 2052 nt, Artificial Sequence
  mRNA product Design a-2 (hSL-A100) comprising derived and/or modified sequence from LASV(LASV1000-NIG-2009;Clade II)__AIT17783__SP-HsALB_NP(2-569) (opt1)
aggagaguccgcucagccagguugcagaagcggcuuagcguguguccuaaucuucucucugcguguagguaggccugugccgcaaacaagcuuaccaugaagugggugaccuucaucagccugcucuuccuguucuccagcgccuacuccagcgccuccaaggaggugaaguccuuccuguggacccagagccuccgccgggagcugagcggcuacugcuccaacaucaagcugcaggucgugaaggacgcccaggcgcuccugcacgggcuggacuucagcgagguguccaacguccagcgccucaugcggaagcagaagcgcgacgacagcgaccugaagcggcugcgcgaccucaaccaggccgugaacaaccugguggagcugaaguccacccagcagaaguccauccuccgggucggcacgcugaccagcgacgaccugcucacccuggccgccgaccuggagaagcucaagagcaaggugauccgcaccgagcggccccuguccagcgggguguacaugggcaaccuguccacgcagcagcucgagcagcgccgggcccugcugaacaugaucgggauggucggcggcgcgcaggggacccagccgggccgcgacgggguggugcgggucugggacgugaagaaccccgaccuccugaacaaccaguucggcaccaugcccagccugacccucgccugccugacgaagcagggccagguggaccugaacgacgucgugcucgcccugaccgaccuggggcucaucuacaccgccaaguaccccaacuccagcgaccuggaccgccugucccagagccacccgauccucaacaugguggacaccaagaaguccagccugaacaucagcggcuacaacuucucccugggggcggccgucaaggccggcgccugcaugcucgacgggggcaacaugcuggagacgaucaaggugacgccccagaccauggacggcauccucaagagcauccugaaggugaagaagucccuggggauguucgucagcgacacccccggcgagcggaaccccuacgagaacauccuguacaagaucugccucuccggggacggcuggccguacaucgccagccgcaccuccaucguggggcgggcgugggagaacaccaccguggaccuggagagcgacggcaagccccagaaggucggcaccgccggguccaacaagagccugcaguccgccggcuuccccacggggcucaccuacagccagcugaugacccugaaggacuccaugaugcagcuggaccccagcgccaagaccuggaucgacaucgagggccgcccggaggaccccguggagaucgcccucuaccagcccgucuccgggugcuacauccacuucuuccgggagcccacggaccugaagcaguucaagcaggacgcgaaguacagccacggcaucgacguggccgaccuguucccggcccagcccggccucaccuccgccgugaucgaggcccugccccgcaacaugguccugaccugccaggggagcgacgacaucaagcggcuccuggacagccagggccgccgcgacaucaagcugaucgacaucgcgcucuccaaggccgacagccggcgcuucgagaacgccgugugggaccagugcaaggaccugugccacaugcacaccgggguggucguggagaagaagaagcggggcgggaaggaggagaucacgccccacugcgcccugauggacugcaucauguacgacgccgcgguguccggcggccucaacaucccgguccugcgcgccgugcugccccgggacaugguguuccgcaccagcucccccaaggucgugcucugaggacuagucccuguucccagagcccacuuuuuuuucuuuuuuugaaauaaaauagccugucuuucagaucucaaaggcucuuuucagagccaccaaaaaaaaaaaaaaaaaaaaaaaaaaaaaaaaaaaaaaaaaaaaaaaaaaaaaaaaaaaaaaaaaaaaaaaaaaaaaaaaaaaaaaaaaaaaaaaaaaaaa

SEQ ID NO: 19889 - RNA, 2052 nt, Artificial Sequence
  mRNA product Design a-2 (hSL-A100) comprising derived and/or modified sequence from LASV(LASV221-NIG-2010;Clade II)__AIT17625__SP-HsALB_NP(2-569) (opt1)
aggagaguccgcucagccagguugcagaagcggcuuagcguguguccuaaucuucucucugcguguagguaggccugugccgcaaacaagcuuaccaugaagugggugaccuucaucagccugcucuuccuguucuccagcgccuacuccagcgccuccaaggaggugaaguccuuccuguggacccagagccuccgccgggagcugagcggcuacugcuccagcaucaagcugcaggucgugaaggacgcccaggcgcuccugcacgggcuggacuucuccgaggugagcaacguccagcgccucaugcggaagcagcgccgggacgacuccgaccugaagcgccugcgggaccucaaccaggccgugaacaaccugguggagcucaagagcacccagcagaaguccauccugcgcgucggcacgcugaccagcgacgaccugcucacccuggccgccgaccuggagaagcucaaguccaaggugauccggaccgagcgcccccugagcuccgggguguacaugggcaaccugagcacgcagcagcucgagcagcggcgcgcccugcugaacaugaucgggauggucggcggcgcgcaggggacccagccgggccgggacgggguggugcgcgucugggacgugaagaaccccgaccuccugaacaaccaguucggcaccaugcccucccugacccucgccugccugacgaagcagggccagguggaccugaacgacgccguccucgcccugaccgaccuggggcucaucuacaccgcgaaguaccccaacagcuccgaccuggaccggcugagccagagccacccgauccucaacaugguggacaccaagaaguccagccugaacaucuccggcuacaacuucagccugggggccgccgugaaggccggcgccugcaugcucgacgggggcaacaugcuggagacgaucaaggucacgccccagaccguggacggcauccugaaguccauccucaaggugaagcgcagccuggggauguucgucuccgacacccccggcgagcggaaccccuacgagaacauccuguacaagaucugccucagcggggacggcuggccguacaucgcgucccgcaccagcaucguggggcgggccugggagaacaccaccguggaccuggaguccgacggcaagccccagaaggucggcaccgccgggagcaacaagucccugcagagcgccggcuuccccacggggcucaccuacucccagcugaugacccugaaggacagcaugaugcagcuggaccccuccgccaagaccuggaucgacaucgagggccgcccggaggaccccguggagaucgcgcucuaccagcccaugagcgggugcuacauccacuucuuccgggagcccacggaccugaagcaguucaagcaggacgccaaguacucccacggcaucgacgucgccgaccuguucccggcccagcccggccucaccagcgccgugaucgaggcgcugccccgcaacauggugcugaccugccaggggagcgacgacaucaagcgccuccuggacucccagggccggcgcgacaucaagcugaucgacaucgcccucagcaaggccgacucccggaaguucgagaacgccgucugggaccagugcaaggaccugugccacaugcacaccggggugguggucgagaagaagaagcgcggcgggaaggaggagaucacgccccacugcgcccugauggacugcaucauguacgacgcggccgugagcggcggccucaacaucccggugcugcgggccguccugccccgcgacaugguguuccggaccuccagccccaaggugguccucugaggacuagucccuguucccagagcccacuuuuuuuucuuuuuuugaaauaaaauagccugucuuucagaucucaaaggcucuuuucagagccaccaaaaaaaaaaaaaaaaaaaaaaaaaaaaaaaaaaaaaaaaaaaaaaaaaaaaaaaaaaaaaaaaaaaaaaaaaaaaaaaaaaaaaaaaaaaaaaaaaaaaa

SEQ ID NO: 19890 - RNA, 2052 nt, Artificial Sequence
  mRNA product Design a-2 (hSL-A100) comprising derived and/or modified sequence from LASV(LASV237-NIG-2010;Clade II)__AIT17639__SP-HsALB_NP(2-569) (opt1)
aggagaguccgcucagccagguugcagaagcggcuuagcguguguccuaaucuucucucugcguguagguaggccugugccgcaaacaagcuuaccaugaagugggugaccuucaucagccugcucuuccuguucuccagcgccuacuccagcgccuccaaggaggugaaguccuuccuguggacccagagccuccgccgggagcugagcggcuacugcuccaacaucaagcugcaggucgugaaggacgcccaggcgcuccugcacgggcuggacuucagcgagguguccaacguccagcgccucaugcggaagcagaagcgcgacgacagcgaccugaagcggcugcgcgaccucaaccaggccgugaacaaccugguggagcugaaguccacccagcagaaguccauccuccgggucggcacccugaccagcgacgaccugcucacccuggccgccgaccuggagaagcucaagagcaaggugauccgcaccgagcggccccuguccagcgggguguacaugggcaaccuguccacgcagcagcucgagcagcgccgggcccugcugaacaugaucgggauggucggcggcgcgcaggggacccagccgggccgcgacgggguggugcgggucugggacgugaagaaccccgaccuccugaacaaccaguucggcaccaugcccagccugacccucgccugccugacgaagcagggccagguggaccugaacgacgccguccucgcccugaccgaccuggggcucaucuacaccgcgaaguaccccaacuccagcgaccuggaccgccugucccagagccacccgauccucaacaugguggacaucaagaaguccagccugaacaucagcggcuacaacuucucccugggggccgccgugaaggccggcgccugcaugcucgacgggggcaacaugcuggagaccaucaaggucacgccccagaccauggacggcauccucaagagcauccugaaggugaagcggucccuggggauguucgugagcgacacccccggcgagcgcaaccccuacgagaacauccuguacaagaucugccucuccggggacggcuggccguacaucgcgagccggaccuccaucgucgggcgcgccugggagaacacgaccguggaccuggagagcgacggcaagccccagaaggugggcuccgccgggagcaacaagucccugcagagcgccggcuuccccaccgggcucaccuacucccagcugaugacgcugaaggacagcaugaugcagcuggaccccuccgccaagaccuggaucgacaucgagggccggccggaggaccccgucgagaucgcgcucuaccagcccaugagcgggugcuacauccacuucuuccgcgagcccaccgaccugaagcaguucaagcaggacgccaaguacucccacggcaucgacguggccgaccuguucccggcccagcccggccucaccagcgccgucaucgaggcgcugccccggaacauggugcugacgugccaggggagcgacgacaucaagcgccuccuggacucccagggccgccgggacaucaagcugaucgacaucgcccucagcaaggccgacucccgccgguucgagaacgccgugugggaccagugcaaggaccugugccacaugcacaccggggucgugguggagaagaagaagcgcggcgggaaggaggagaucacgccccacugcgcccugauggacugcaucauguacgacgcggccgucagcggcggccucaacaucccggugcugcgggccgugcugccccgcgacauggucuuccggaccuccagccccaagguggugcucugaggacuagucccuguucccagagcccacuuuuuuuucuuuuuuugaaauaaaauagccugucuuucagaucucaaaggcucuuuucagagccaccaaaaaaaaaaaaaaaaaaaaaaaaaaaaaaaaaaaaaaaaaaaaaaaaaaaaaaaaaaaaaaaaaaaaaaaaaaaaaaaaaaaaaaaaaaaaaaaaaaaaa

SEQ ID NO: 19891 - RNA, 2052 nt, Artificial Sequence
  mRNA product Design a-2 (hSL-A100) comprising derived and/or modified sequence from LASV(LASV253-NIG-2011;Clade II)__AIT17671__SP-HsALB_NP(2-569) (opt1)
aggagaguccgcucagccagguugcagaagcggcuuagcguguguccuaaucuucucucugcguguagguaggccugugccgcaaacaagcuuaccaugaagugggugaccuucaucagccugcucuuccuguucuccagcgccuacuccagcgccuccaaggaggugaaguccuuccuguggacccagagccuccgccgggagcugagcggcuacugcuccagcaucaagcugcaggucgugaaggacgcccaggcgcuccugcacgggcuggacuucuccgaggugagcaacguccagcgccucaugcggaagcagaagcgcgacgacuccgaccugaagcggcugcgcgaccucaaccaggccgugaacaaccugguggagcucaagagcacccagcagaaguccguccugcgggugggcacccugaccagcgacgaccugcucacccuggccgccgaccuggagaagcucaaguccaaggugauccgcaccgagcggccccugagcuccggggucuacaugggcaaccugagcacgcagcagcucgagcagcgccgggcccugcugaacaugaucgggauggugggcggcgcgcaggggacccagccgggccgcgacggggugguccgggugugggacgugaagaaccccgaccuccugaacaaccaguucggcaccaugcccucccugacccucgccugccugacgaagcaggggcaggucgaccugaacgacguggugcucgcccugaccgaccugggccucaucuacaccgccaaguaccccaacagcuccgaccuggaccgccugagccagagccacccgauccucaacauggucgacaccaagaaguccagccugaacaucuccggcuacaacuucagccugggggcggccgugaaggccggcgccugcaugcucgacgggggcaacaugcuggagacgaucaaggugacgccccagaccauggacggcauccugaaguccauccucaaggucaagaagucccuggggauguucgugagcgacacccccggcgagcggaaccccuacgagaacauccuguacaagaucugccucagcggggacggcuggccguacaucgccucccgcaccagcaucguggggcgggcgugggagaacaccaccgucgaccuggaguccgacggcaagccccagaaggugggcaccgccgggagcaacaagucccugcagagcgccggcuuccccacggggcucaccuacucccagcugaugacccugaaggacagcaugaugcagcuggaccccuccgccaagaccuggaucgacaucgagggccgcccggaggaccccgucgagaucgcccucuaccagcccaugagcgggugcuacauccacuucuuccgggagcccacggaccugaagcaguucaagcaggacgcgaaguacucccacggcaucgacgugaccgaccuguucccggcccagcccggccucaccagcgccgugaucgaggcccugccccgcaacaugguccugaccugccaggggagcgacgacaucaagcggcuccuggacucccagggccgccgcgacaucaagcugaucgacaucgcccucagcaaggcggacucccggcgcuucgagaacgccgugugggaccagugcaaggaccugugccacaugcacacggggguggucguggagaagaagaagcggggcgggaaggaggagaucacgccccacugcgcccugauggacugcaucauguacgacgccgccgugagcggcggccucaacaucccgguccugcgcgcggugcugccccgggacaugguguuccgcaccuccagccccaaggucgugcucugaggacuagucccuguucccagagcccacuuuuuuuucuuuuuuugaaauaaaauagccugucuuucagaucucaaaggcucuuuucagagccaccaaaaaaaaaaaaaaaaaaaaaaaaaaaaaaaaaaaaaaaaaaaaaaaaaaaaaaaaaaaaaaaaaaaaaaaaaaaaaaaaaaaaaaaaaaaaaaaaaaaaa

SEQ ID NO: 19892 - RNA, 2052 nt, Artificial Sequence
  mRNA product Design a-2 (hSL-A100) comprising derived and/or modified sequence from LASV(LASV254-NIG-2011;Clade II)__AIT17675__SP-HsALB_NP(2-569) (opt1)
aggagaguccgcucagccagguugcagaagcggcuuagcguguguccuaaucuucucucugcguguagguaggccugugccgcaaacaagcuuaccaugaagugggugaccuucaucagccugcucuuccuguucuccagcgccuacuccagcgccuccaaggaggugaaguccuuccuguggacccagagccuccgccgggagcugagcggcuacugcuccagcaucaagcugcaggucgugaaggacgcccaggcgcuccugcacgggcuggacuucuccgaggugagcaacguccagcgccucaugcggaagcagaagcgcgacgacuccgaccugaagcggcugcgcgaccucaaccaggccgugaacaaccugguggagcucaagagcacccagcagaaguccguccugcgggugggcacgcugaccagcgacgaccugcucacccuggccgccgaccuggagaagcucaaguccaaggugauccgcaccgagcggccccugagcuccggggucuacaugggcaaccugagcacgcagcagcucgagcagcgccgggcccugcugaacaugaucgggauggugggcggcgcgcaggggacccagccgggccgcgacggggugguccgggugugggacgugaagaaccccgaccuccugaacaaccaguucggcaccaugcccucccugacccucgccugccugacgaagcaggggcaggucgaccugaacgacgccgugcucgcccugaccgaccugggccucaucuacaccgcgaaguaccccaacagcuccgaccuggaccgccugagccagagccacccgauccucaacaugguggacaccaagaaguccagccugaacaucuccggcuacaacuucagccugggggccgccgucaaggccggcgccugcaugcucgacgggggcaacaugcuggagacgaucaaggugacgccccagaccauggacggcauccugaaguccauccucaaggugaagaagucccuggggauguucgucagcgacacccccggcgagcggaaccccuacgagaacauccuguacaagaucugccucagcggggacggcuggccguacaucgcgucccgcaccagcaucguggggcgggccugggagaacaccaucguggaccuggaguccgacggcaagccccagaaggucggcaccgccgggagcaacaagucccugcagagcgccggcuuccccaccgggcucacguacucccagcugaugacccugaaggacagcaugaugcagcuggaccccuccgccaagaccuggaucgacaucgagggccgcccggaggaccccguggagaucgcgcucuaccagcccaugagcgggugcuacauccacuucuuccgggagcccaccgaccugaagcaguucaagcaggacgccaaguacucccacggcaucgacgucgccgaccuguucccggcccagcccggccucacgagcgccgugaucgaggcgcugccccgcaacauggugcugaccugccaggggagcgacgacaucaagcggcuccuggacucccagggccgccgcgacaucaagcugaucgacaucgcccucagcaaggccgacucccggcgcuucgagaacgccgucugggaccagugcaaggaccugugccacaugcacaccggggugguggucgagaagaagaagcggggcgggaaggaggagaucacgccccacugcgcccugauggacugcaucauguacgacgcggccgugagcggcggccucaacaucccggugcugcgcgccguccugccccgggacaugguguuccgcaccuccagccccaaggugguccucugaggacuagucccuguucccagagcccacuuuuuuuucuuuuuuugaaauaaaauagccugucuuucagaucucaaaggcucuuuucagagccaccaaaaaaaaaaaaaaaaaaaaaaaaaaaaaaaaaaaaaaaaaaaaaaaaaaaaaaaaaaaaaaaaaaaaaaaaaaaaaaaaaaaaaaaaaaaaaaaaaaaaa

SEQ ID NO: 19893 - RNA, 2052 nt, Artificial Sequence
  mRNA product Design a-2 (hSL-A100) comprising derived and/or modified sequence from LASV(Nig08-04;Clade II)__ADU56611__SP-HsALB_NP(2-569) (opt1)
aggagaguccgcucagccagguugcagaagcggcuuagcguguguccuaaucuucucucugcguguagguaggccugugccgcaaacaagcuuaccaugaagugggugaccuucaucagccugcucuuccuguucuccagcgccuacuccagcgccuccaaggaggugaaguccuuccuguggacccagagccuccgccgggagcugagcggcuacugcuccaacaucaagcugcaggucgugaaggacgcccaggcgcuccugcacgggcuggacuucagcgagguguccaacguccagcgccucaugcggaagcagaagcgcgacgacggcgaccugaagcggcugcgcgaccucaaccaggccgugaacaaccugguggagcucaagagcacccagcagaaguccguccugcggguggggacccugaccagcgacgaccugcucacccuggccgccgaccuggagaagcucaaguccaaggugauccgcaccgagcggccccugagcuccggcgucuacauggggaaccugagcacgcagcagcucgagcagcgcaaggcccugcuguccaugaucggcauggugggcggggcgcagggcacccagccggggcgggacggcgugguccgcgugugggacgugaagaaccccgaccuccugaacaaccaguucgggaccaugcccagccugacccucgccugccugacgaagcagggccaggucgaccugaacgacgccgugcucgcccugaccgaccugggccucaucuacaccgcgaaguaccccaacuccagcgaccuggaccggcugucccagagccacccgauccucaacaugguggacaccaagaaguccagccugaacaucagcggguacaacuucucccugggcgccgccgucaaggccggggccugcaugcucgacggcggcaacaugcuggagacgaucaaggugacgccccagaccauggacgggauccucaagagcauccugaaggugaagcgcucccugggcauguucgucagcgacacccccggggagcggaaccccuacgagaacauccuguacaagaucugccucuccggcgacggguggccguacaucgcgagccgcaccuccaucgugggccgggccugggagaacaccaccguggaccuggagagcgacggcaagccccagaaggucgggaccgccggcuccaacaagagccugcaguccgccggguuccccacgggccucaccuacagccagcugaugacccugaaggacuccaugaugcagcuggaccccagcgccaagaccuggaucgacaucgaggggcgcccggaggaccccguggagaucgcgcucuaccagcccauguccggcugcuacauccacuucuuccgggagcccacggaccugaagcaguucaagcaggacgccaaguacagccacggcaucgacgucaccgaccuguucuccgcccagccggggcucaccagcgccgugaucgaggcccugccccgcaacauggugcugaccugccagggcagcgacgacaucaagaagcuccuggacucccaggggcggcgcgacaucaagcugaucgacaucagccucaacaaggcggacucccgccgguucgagaacgccgucugggaccagugcaaggaccugugccacaugcacacgggcgugguggucgagaagaagaagcgcgggggcaaggaggagaucacgccccacugcgcccugauggacugcaucauguucgacgccgccgugagcggcgggcucaacauccccauccugcgggcggugcugccgcgcgacauggucuuccggaccuccagccccaagguggugcucugaggacuagucccuguucccagagcccacuuuuuuuucuuuuuuugaaauaaaauagccugucuuucagaucucaaaggcucuuuucagagccaccaaaaaaaaaaaaaaaaaaaaaaaaaaaaaaaaaaaaaaaaaaaaaaaaaaaaaaaaaaaaaaaaaaaaaaaaaaaaaaaaaaaaaaaaaaaaaaaaaaaaa

SEQ ID NO: 19894 - RNA, 2055 nt, Artificial Sequence
  mRNA product Design a-2 (hSL-A100) comprising derived and/or modified sequence from LASV(GA391;Clade III)__AAA46284__SP-HsALB_NP(2-570) (opt1)
aggagaguccgcucagccagguugcagaagcggcuuagcguguguccuaaucuucucucugcguguagguaggccugugccgcaaacaagcuuaccaugaagugggugaccuucaucagccugcucuuccuguucuccagcgccuacuccagcgccuccaaggaggugcgcagcugccuguggacccagucccuccggcgcgagcugagcggcuacugcuccaacaucaagcugcaggucgugaaggacgcccaggcgcuccugcacgggcuggacuucagcgagguguccaacguccagcggcucaugcgcaagcagaagcgggacgacggcgaccugaagcgccugcgggaccucaaccaggccgugaacaaccugguggagcugaaguccacccagcagaaguccguccuccgcguggggacgcugagcuccgacgaccugcucauccuggccgccgaccuggagaagcucaagagcaaggugacccggaccgagcgcccccuguccagcggcgucuacauggggaaccuguccagccagcagcucgaccagcggcgcgcccugcugaacaugaucggcaugaccggcguguccgggggcgggaagggcgcgagcaacgggaucgugcgggucugggacgugaagaacgccgagcuccugaacaaccaguucggcacgaugccgucccugacccucgccugccugaccaagcagggccagguggaccugaacgacgccguccaggcgcucaccgaccuggggcugaucuacacggccaaguaccccaacagcagcgaccucgaccgccugucccagagccaccccauccugaacaugaucgacaccaagaaguccagccucaacaucuccggcuacaacuucagccugggggccgccgugaaggccggcgcgugcaugcuggacggcgggaacaugcucgagaccaucaaggugagcccccagaccauggacggcauccucaagagcauccugaaggucaagaagucccuggggauguucgugagcgacacgccgggcgagcggaaccccuacgagaacauccuguacaagaucugccuguccggggacggcuggagcuacaucgccucccgcaccagcaucgugggccgggccugggagaacaccgucguggaccucgagcaggacaacaagccccagaagaucgggaacggcggguccaacaagagccugcaguccgccggcuucgccgcggggcugaucuacagccagcucaugacccugaaggacuucaagugcuucaaccugauccccaacgccaagacguggauggacaucgagggccgcccggaggaccccguggagaucgcccuguaccagcccuccagcggcugcuacguccacuucuuccgggagcccaccgaccucaagcaguucaagcaggacgccaaguacagccacgggcgcgacgugaccgaccuguucgccgcgcagccgggccugaccuccgccgucaucgaggcccucccccggaacauggugaucacgugccaggggagcgaggacauccgcaagcugcuggagucccagggccgccgggacaucaagcucaucgacaucacccugagcaaggccgacucccgcaaguucgagaacgccgugugggaccaguucaaggaccugugccacaugcacaccggggucgugguggagaagaagaagcggggcggcaaggaggagaucacgccccacugcgcgcucauggacugcaucauguucgacgccgccgucagcgggggccuggacgccaaggugcugcgcgugguccucccccgggacaugguguuccgcaccuccaccccgaaggugguccugugaggacuagucccuguucccagagcccacuuuuuuuucuuuuuuugaaauaaaauagccugucuuucagaucucaaaggcucuuuucagagccaccaaaaaaaaaaaaaaaaaaaaaaaaaaaaaaaaaaaaaaaaaaaaaaaaaaaaaaaaaaaaaaaaaaaaaaaaaaaaaaaaaaaaaaaaaaaaaaaaaaaaa

SEQ ID NO: 19895 - RNA, 2052 nt, Artificial Sequence
  mRNA product Design a-2 (hSL-A100) comprising derived and/or modified sequence from LASV(Nig08-A19;Clade III)__ADU56619__SP-HsALB_NP(2-569) (opt1)
aggagaguccgcucagccagguugcagaagcggcuuagcguguguccuaaucuucucucugcguguagguaggccugugccgcaaacaagcuuaccaugaagugggugaccuucaucagccugcucuuccuguucuccagcgccuacuccagcgccuccaaggaggugaaguccuuccuguggacccagucccuccgccgggagcugagcggcuacugcuccaacaucaagcugcaggucgugaaggacgcccaggcgcuccugcacgggcuggacuucagcgagguguccaacguccagcgccucaugcggaagcagaagcgcgacgacggcgaccugaagcggcugcgcgaccucaaccaggccgugaacaaccugguggagcucaagagcacccagcagaaguccguccugcggguggggacccugagcuccgacgaccugcucgugcuggccgccgaccuggagaagcucaagagcaaggucgugcgcaccgagcggccccuguccagcggcaucuacauggggaaccuguccagccagcagcucgaccagcgcaaggcccugcugaacaugaucggcaugaccggcgggaacggcgggcggaacaccacguccgacggcaucgugcgcgucugggacgugaagaacgcggagcuccugaacaaccaguucgggaccaugccgagccugacccucgccugccugaccaagcagggccagguggaccugaacgacgccguccaggcccucacggaccugggccugaucuacaccgcgaaguaccccaacuccagcgaccucgaccggcuggcccagagccaccccauccugaacaugaucgacaccaagaaguccagccucaacaucuccggguacaacuucagccugggcgccgccgugaaggccggggcgugcaugcuggacggcggcaacaugcucgagaccaucaaggugagcccccagacgauggacgggauccucaagagcauccugaaggucaagcgcucccugggcauguucaucagcgacaccccgggggagcggaaccccuacgagaacauccuguacaagaucugccuguccggcgacggguggcccuacaucgccagccgcaccuccaucgugggccgggccugggagaacaccguggucgaccucgagagcgacaacaagccccagaagacgggcaacgggggcuccaacaagagccugcaguccgccggguucgccgcgggccugaccuacagccagcucaugacccugaaggacuccaugcugcagcuggacccgaacgccaagaccuggauggacaucgaggggcgccccgaggaccccguggagaucgcccucuaccagcccagcuccggcugcuacauccacuucuuccgggagccgacggaccugaagcaguucaagcaggacgccaaguacagccacggcaucgacgugaccgaccuguucgccgcgcagcccgggcucaccagcgccgucaucgaggcccugccccgcaacauggugaucacgugccagggcuccgaggacauccggaagcugcucgagagccaggggcgccgcgacaucaagcugaucgacaucucccugagcaaggucgacucccggaaguucgagaacgccgugugggaccaguucaaggaccucugccacaugcacaccggcaucguggucgagaagaagaagcgcgggggcaaggaggagaucacgccccacugcgcccugauggacugcaucauguucgacgcggccgugagcggcgggguggacgccaagguccugcgggccgugcucccgcgcgacaugguguuccggaccuccacccccaaggucgugcugugaggacuagucccuguucccagagcccacuuuuuuuucuuuuuuugaaauaaaauagccugucuuucagaucucaaaggcucuuuucagagccaccaaaaaaaaaaaaaaaaaaaaaaaaaaaaaaaaaaaaaaaaaaaaaaaaaaaaaaaaaaaaaaaaaaaaaaaaaaaaaaaaaaaaaaaaaaaaaaaaaaaaa

SEQ ID NO: 19896 - RNA, 2052 nt, Artificial Sequence
  mRNA product Design a-2 (hSL-A100) comprising derived and/or modified sequence from LASV(G1180-SLE-2010;Clade IV)__AIT17169__SP-HsALB_NP(2-569) (opt1)
aggagaguccgcucagccagguugcagaagcggcuuagcguguguccuaaucuucucucugcguguagguaggccugugccgcaaacaagcuuaccaugaagugggugaccuucaucagccugcucuuccuguucuccagcgccuacuccagcgccuccaaggagaucaagagcuuccuguggacccagucccuccgccgggagcugagcggcuacugcuccaacaucaagcuccagguggucaaggacgcccaggcgcugcugcacgggcuggacuucagcgagguguccaacgugcagcgccucaugcggaaggagcgccgggacgacaacgaccugaagcgccugcgggaccucaaccaggccgucaacaaccugguggagcucaagagcacccagcagaaguccauccugcgcgugggcacccugaccagcgacgaccugcucauccuggccgccgaccuggagaagcucaaguccaaggucauccggaccgagcgcccccugagcgccgggguguacaugggcaaccuguccagccagcagcucgaccagcggcgcgcgcugcuguccaugaucgggaugagcuccggcaaccagcgggcccaggccggccgcgacggggugguccgggugugggacgugaagaacgucgagcuccugaacaaccaguucggcaccaugccgagccugacgcucgccugccugaccaagcagggccagguggaccugaacgacgcggugcaggcccucaccgaccuggggcugaucuacaccgccaaguaccccaacacguccgaccucgaccgccugacccagagccaccccauccugaacaugaucgacaccaagaaguccagccucaacaucagcggguacaacuucucccugggcgccgccgucaaggcgggcgccugcaugcuggacgggggcaacaugcucgagaccaucaaggugagcccccagacgauggacgggauccugaaguccauccugaaggugaagaaggcccucggcauguucaucagcgacaccccgggcgagcggaaccccuacgagaacauccuguacaagaucugccuguccggggacggcuggcccuacaucgccagccgcaccuccaucaccgggcgggccugggagaacacggucguggaccucgagagcgacggcaagccccagaaggcgggguccaacaacagcaacaagucccugcagagcgugggcuucaccgccggccugaccuacucccagcucaugacccugaaggacgccaugcugcagcuggacccgaacgccaagacguggauggacaucgaggggcgccccgaggaccccgucgagaucgcccucuaccagcccagcuccggcugcuacauccacuucuuccgggagccgaccgaccugaagcaguucaagcaggacgcgaaguacagccacgggaucgacgugaccgaccuguucgccgcccagcccggccucaccuccgccgugaucgacgcccugccccgcaacauggucaucacgugccaggggagcgacgacauccgcaagcugcucgagagccagggccggaaggacaucaagcugaucgacaucgcgcuguccaagaccgacagccgcaaguacgagaacgccgugugggaccaguacaaggaccucugccacaugcacaccggcgucgugguggagaagaagaagcgcgggggcaaggaggagaucacgccccacugcgcccugauggacugcaucauguucgacgccgcggucuccgggggccugaacaccagcgugcuccgggccgugcugccgcgggacauggucuuccgcaccuccacgccccggguggugcugugaggacuagucccuguucccagagcccacuuuuuuuucuuuuuuugaaauaaaauagccugucuuucagaucucaaaggcucuuuucagagccaccaaaaaaaaaaaaaaaaaaaaaaaaaaaaaaaaaaaaaaaaaaaaaaaaaaaaaaaaaaaaaaaaaaaaaaaaaaaaaaaaaaaaaaaaaaaaaaaaaaaaa

SEQ ID NO: 19897 - RNA, 2052 nt, Artificial Sequence
  mRNA product Design a-2 (hSL-A100) comprising derived and/or modified sequence from LASV(G1442-SLE-2011;Clade IV)__AIT17181__SP-HsALB_NP(2-569) (opt1)
aggagaguccgcucagccagguugcagaagcggcuuagcguguguccuaaucuucucucugcguguagguaggccugugccgcaaacaagcuuaccaugaagugggugaccuucaucagccugcucuuccuguucuccagcgccuacuccagcgccuccaaggaggugaaguccuuccuguggacccagagccuccgccgggagcugagcggcuacugcuccaacaucaagcugcaggucgugaaggacgcccaggcgcuccugcacgggcuggacuucagcgagguguccaacguccagcgccucaugcggaagcagcgccgggacgacaacgaccugaagcgccugcgggaccucaaccaggccgugaacaaccugguggagcucaagagcacccagcagaaguccguccugcgcgugggcacccugaccagcgacgaccugcucgugcuggccgccgaccuggagaagcucaaguccaaggucauccggaccgagcgcccccugagcgccgggguguacaugggcaaccuguccagccagcagcucgaccagcggcgcgcgcugcugaacaugaucgggauguccggcggcauccaggggacccggacgggccgcgacggggugguccgggugugggacgugaagaacgccgaccuccugaacaaccaguucggcaccaugccgagccugacccucgccugccugaccaagcaggggcaggucgaccugaacgacguggugcaggcccucacggaccugggccugaucuacaccgcgaaguaccccaacgccuccgaccucgaccgccugacccagagccaccccauccugaacaugaucgacaccaagaaguccagccucaacaucagcggcuacaacuucucccugggggccgccgucaaggccggcgcgugcaugcuggacgggggcaacaugcucgagacgaucaaggugagcccccagaccauggacggcauccugaaguccauccugaaggugaagaagacccucgggauguucaucagcgacaccccgggcgagcggaaccccuacgagaacauccuguacaagaucugccuguccggggacggcuggcccuacaucgccagccgcacguccaucaccgggcgggccugggagaacaccgucguggaccucgagagcgacggcaagccccagaaggccggcuccaacaacagcaacaagucccugcagagcgccggguucgcggccggccugaccuacucccagcucaugacgcugaaggacgccaugcugcagcuggacccgaacgccaagaccuggauggacaucgaggggcgccccgaggaccccguggagaucgcccucuaccagcccagcuccggcugcuacauccacuucuuccgggagccgaccgaccugaagcaguucaagcaggacgcgaaguacagccacgggaucgacgucaccgaccuguucgccgcccagcccggccucacguccgccgugaucgaggcccugccccgcaacauggucaucacgugccagggcagcgacgacaucaagaagcugcucgagucccaggggcgcaaggacaucaagcugaucgacaucgcgcugagcaagaccgacagccggaaguacgagaacgccgugugggaccaguacaaggaccucugccacaugcacaccggcguggucguggagaagaagaagcgcgggggcaaggaggagaucaccccgcacugcgcccugauggacugcaucauguucgacgccgcgguguccgggggccugaacacccucguccugcgggccgugcugccccgcgacaugguguuccggaccagcacgccccgcgucgugcucugaggacuagucccuguucccagagcccacuuuuuuuucuuuuuuugaaauaaaauagccugucuuucagaucucaaaggcucuuuucagagccaccaaaaaaaaaaaaaaaaaaaaaaaaaaaaaaaaaaaaaaaaaaaaaaaaaaaaaaaaaaaaaaaaaaaaaaaaaaaaaaaaaaaaaaaaaaaaaaaaaaaaa

SEQ ID NO: 19898 - RNA, 2052 nt, Artificial Sequence
  mRNA product Design a-2 (hSL-A100) comprising derived and/or modified sequence from LASV(G3010-SLE-2013;Clade IV)__AIT17345__SP-HsALB_NP(2-569) (opt1)
aggagaguccgcucagccagguugcagaagcggcuuagcguguguccuaaucuucucucugcguguagguaggccugugccgcaaacaagcuuaccaugaagugggugaccuucaucagccugcucuuccuguucuccagcgccuacuccagcgccuccaaggagaucaagagcuuccuguggacccagucccuccgccgggagcugagcggcuacugcuccaacaucaagcuccagguggucaaggacgcccaggcgcugcugcacgggcuggacuucagcgagguguccaacgugcagcgccucaugcggaaggagcgccgggacgacaacgaccugaagcgccugcgggaccucaaccaggccgucaacaaccugguggagcucaagagcacccagcagaaguccauccugcgcgugggcacccugaccagcgacgaccugcucauccuggccgccgaccuggagaagcucaaguccaaggucacccggaccgagcgcccccugagcgccgggguguacaugggcaaccuguccagccagcagcucgaccagcggcgcgcgcugcuguccaugaucgggaugagcuccggcgugcagggcgcccgggccgggcgcgacggcgucgugcgggugugggacgucaagaacgccgagcuccugaacaaccaguucgggacgaugccgagccugacccucgcgugccugaccaagcagggccagguggaccugaacgacgugguccaggcccucaccgaccuggggcugaucuacacggccaaguaccccaacaccuccgaccucgaccgccugacccagagccaccccauccugaacaugaucgacaccaagaaguccagccucaacaucagcggcuacaacuucucccugggcgccgccgugaaggcgggggccugcaugcuggacggcgggaacaugcucgagacgaucaaggugagcccccagaccauggacggcauccugaaguccauccugaaggucaagaaggcccucggcauguucaucagcgagaccccgggggagcggaaccccuacgagaacauccuguacaagaucugccuguccggcgacggguggcccuacaucgccagccgcaccuccaucacgggccgggccugggagaacaccgugguggaccucgagagcgacgggaagccccagaaggcgggcuccaacaacagcaacaagucccugcagagcgccggcuucaccgccgggcugaccuacucccagcucaugacgcugaaggacgccaugcugcagcuggacccgaacgccaagaccuggauggacaucgagggccgccccgaggaccccgucgagguggcgcucuaccagcccagcuccgggugcuacauccacuucuuccgggagccgaccgaccugaagcaguucaagcaggacgccaaguacagccacggcaucgacgugaccgaccuguucgccgcccagcccgggcucacguccgccgucaucgacgcgcugccccgcaacauggugaucacgugccagggcagcgacgacaucaagaagcugcucgagagccagggccgcaaggacaucaagcugaucgacaucgcccuguccaagaccgacagccggaaguacgagaacgccgucugggaccaguacaaggaccucugccacaugcacaccggggugguggucgagaagaagaagcgcggcgggaaggaggagaucaccccgcacugcgcccugauggacugcaucauguucgacgcggccguguccggcgggcugaacaccagcgugcuccgggccguccugccccgcgacaugguguuccggaccuccacgccccgcgugguccugugaggacuagucccuguucccagagcccacuuuuuuuucuuuuuuugaaauaaaauagccugucuuucagaucucaaaggcucuuuucagagccaccaaaaaaaaaaaaaaaaaaaaaaaaaaaaaaaaaaaaaaaaaaaaaaaaaaaaaaaaaaaaaaaaaaaaaaaaaaaaaaaaaaaaaaaaaaaaaaaaaaaaa

SEQ ID NO: 19899 - RNA, 2052 nt, Artificial Sequence
  mRNA product Design a-2 (hSL-A100) comprising derived and/or modified sequence from LASV(G502-SLE-2009;Clade IV)__AIT17127__SP-HsALB_NP(2-569) (opt1)
aggagaguccgcucagccagguugcagaagcggcuuagcguguguccuaaucuucucucugcguguagguaggccugugccgcaaacaagcuuaccaugaagugggugaccuucaucagccugcucuuccuguucuccagcgccuacuccagcgccuccaaggagaucaagagcuuccuguggacccagucccuccgccgggagcugagcggcuacugcuccaacaucaagcuccagguggucaaggacgcccaggcgcugcugcacgggcuggacuucagcgagguguccaacgugcagcgccucaugcggaaggagcgccgggacgacaacgaccugaagcgccugcgggaccucaaccaggccgucaacaaccugguggagcucaagagcacccagcagaaguccauccugcgcgugggcacccugaccagcgacgaccugcucauccuggccgccgaccuggagaagcucaaguccaaggucauccggaccgagcgcccccugagcgccgggguguacaugggcaaccuguccagccagcagcucgaccagcggcgcgcgcugcuguccaugaucgggaugagcggcggcaaccagggggugcgggccggcaaggacggggucgugcgcgugugggacgucaagaacgccgagcuccugaacaaccaguucggcaccaugccgucccugacgcucgccugccugaccaagcagggccagguggaccugaacgacgcggugcaggcccucaccgaccuggggcugaucuacaccgccaaguaccccaacacgagcgaccucgaccggcugacccagucccaccccauccugaacaugaucgacaccaagaaguccagccucaacaucuccggcuacaacuucagccugggggccgccgucaaggcgggcgccugcaugcuggacgggggcaacaugcucgagaccaucaaggugagcccccagacgauggacggcauccucaagagcauccugaaggugaagaaggcccuggggauguucaucuccgacaccccgggcgagcgcaaccccuacgagaacauccuguacaagaucugccugagcggggacggcuggcccuacaucgccucccggaccagcaucaccgggcgcgccugggagaacacggucguggaccucgaguccgacggcaagccccagaaggcgggcagcaacaacuccaacaagagccugcaguccgccggguucaccgccggccugaccuacagccagcucaugacccugaaggacgccaugcugcagcuggacccgaacacgaagaccuggauggacaucgaggggcggcccgaggaccccguggagaucgcccucuaccagcccuccagcggcugcuacauccacuucuuccgcgagccgaccgaccugaagcaguucaagcaggacgcgaaguacucccacgggaucgacgucaccgaccuguucgccgcccagcccggccucacgagcgccgugaucgacgcccugccccggaacauggugaucacgugccagggcuccgacgacauccgcaagcugcucgagagccaggggcgcaaggacaucaagcugaucgacaucgcgcugaacaagaccgacagccggaaguacgagaacgccgucugggaccaguacaaggaccucugccacaugcacaccggcguggucguggagaagaagaagcgcgggggcaaggaggagaucaccccgcacugcgcccugauggacugcaucauguucgacgccgcgguguccgggggccugaacaccagcguccuccgggccgugcugccccgcgacaugguguuccggaccuccacgccccgcgucgugcugugaggacuagucccuguucccagagcccacuuuuuuuucuuuuuuugaaauaaaauagccugucuuucagaucucaaaggcucuuuucagagccaccaaaaaaaaaaaaaaaaaaaaaaaaaaaaaaaaaaaaaaaaaaaaaaaaaaaaaaaaaaaaaaaaaaaaaaaaaaaaaaaaaaaaaaaaaaaaaaaaaaaaa

SEQ ID NO: 19900 - RNA, 2052 nt, Artificial Sequence
  mRNA product Design a-2 (hSL-A100) comprising derived and/or modified sequence from LASV(G733-SLE-2010;Clade IV)__AIT17155__SP-HsALB_NP(2-569) (opt1)
aggagaguccgcucagccagguugcagaagcggcuuagcguguguccuaaucuucucucugcguguagguaggccugugccgcaaacaagcuuaccaugaagugggugaccuucaucagccugcucuuccuguucuccagcgccuacuccagcgccuccaaggagaucaagagcuuccuguggacccagucccuccgccgggagcugagcggcuacugcuccaacaucaagcuccagguggucaaggacgcccaggcgcugcugcacgggcuggacuucagcgagguguccaacgugcagcgccucaugcggaaggagcgccgggacgacaacgaccugaagcgccugcgggaccucaaccaggccgucaacaaccugguggagcucaagagcacccagcagaaguccgugcugcgcgucggcacccugaccagcgacgagcugcucgugcuggccgccgaccuggagaagcucaaguccaaggugauccggaccgagcgcccccugagcgccggggucuacaugggcaaccuguccagccagcagcucgaccagcggcgcgcgcugcuguccaugaucgggaugagcggcggcaaccagggggcccggaccggccgcgacgggguggugcgggucugggacgugaagaacgccgagcuccugaacaaccaguucggcaccaugccgucccugacccucgccugccugaccaagcagggccagguggaccugaacgacgcgguccaggcccucaccgaccuggggcugaucuacacggccaaguaccccaacaccagcgaccucgaccgccugacccagucccaccccauccugaacaugaucgacaccaagaaguccagccucaacaucuccggcuacaacuucagccugggggccgccgugaaggcgggcgccugcaugcuggacgggggcaacaugcucgagacgaucaaggugagcccccagaccauggacggcauccucaagagcauccugaaggucaagaaggcccuggggauguucaucuccgacaccccgggcgagcggaaccccuacgagaacauccuguacaagaucugccugagcggggacggcuggcccuacaucgccucccgcaccagcaucacggggcgggccugggagaacaccgugguggaccucgaguccgacggcaagccccagaaggcgggcagcaacaacuccaacaagagccugcaguccgccggguucaccgccggccugaccuacagccagcucaugacgcugaaggacgccaugcugcagcuggacccgaacgccaagaccuggauggacaucgaggggcgccccgaggaccccgucgagaucgcgcucuaccagcccuccagcggcugcuacauccacuucuuccgggagccgaccgaccugaagcaguucaagcaggacgccaaguacucccacgggaucgacgugaccgaccuguucgccgcccagcccggccucacgagcgccgugaucgacgcgcugccccgcaacauggucaucacgugccagggcuccgacgacauccgcaagcugcucgagagccaggggcggaaggacaucaagcugaucgacaucgcccugagcaagaucgacucccgcaaguacgagaacgccgugugggaccaguacaaggaccucugccacaugcacaccggcgucgugguggagaagaagaagcgcgggggcaaggaggagaucacgccccacugcgcccugauggacugcaucauguucgacgcggccgucagcgggggccugaacucccucgugcugcgggccgugcugccgcgggacauggucuuccgcaccagcacgccccggguggugcucugaggacuagucccuguucccagagcccacuuuuuuuucuuuuuuugaaauaaaauagccugucuuucagaucucaaaggcucuuuucagagccaccaaaaaaaaaaaaaaaaaaaaaaaaaaaaaaaaaaaaaaaaaaaaaaaaaaaaaaaaaaaaaaaaaaaaaaaaaaaaaaaaaaaaaaaaaaaaaaaaaaaaa

SEQ ID NO: 19901 - RNA, 2052 nt, Artificial Sequence
  mRNA product Design a-2 (hSL-A100) comprising derived and/or modified sequence from MOPV/LASV reassortant(IGS-1;Clade IV)__AFY05578__SP-HsALB_NP(2-569) (opt1)
aggagaguccgcucagccagguugcagaagcggcuuagcguguguccuaaucuucucucugcguguagguaggccugugccgcaaacaagcuuaccaugaagugggugaccuucaucagccugcucuuccuguucuccagcgccuacuccagcgccuccaaggagaucaagagcuuccuguggacccagucccuccgccgggagcugagcggcuacugcuccaacaucaagcuccagguggucaaggacgcccaggcgcugcugcacgggcuggacuucagcgagguguccaacgugcagcgccucaugcggaaggagcgccgggacgacaacgaccugaagcgccugcgggaccucaaccaggccgucaacaaccugguggagcucaagagcacccagcagaaguccauccugcgcgugggcacccugaccagcgacgaccugcucauccuggccgccgaccuggagaagcuccgguccaaggucauccgcaccgagcggccccugagcgccgggguguacaugggcaaccuguccagccagcagcucgaccagcgccgggcgcugcugaacaugaucgggauguccggcggcaaccagggggcccgcgccggccgggacggggugguccgcgugugggacgugaagaacgccgagcuccugagcaaccaguucggcaccaugccgucccugacgcucgcgugccugaccaagcaggggcaggucgaccugaacgacgccgugcaggcccucaccgaccugggccugaucuacaccgccaaguaccccaacacgagcgaccucgaccggcugacccagucccaccccauccugaacaugaucgacaccaagaaguccagccucaacaucuccggcuacaacuucagccugggggccgcggugaaggccggcgccugcaugcuggacgggggcaacaugcucgagaccaucaaggucagcccccagacgauggacggcauccucaagagcauccugaaggugaagaaggcccuggggauguucaucuccgacaccccgggcgagcgcaaccccuacgagaacauccuguacaagaucugccugagcggggacggcuggcccuacaucgccucccggaccagcaucaccgggcgcgcgugggagaacacgguggucgaccucgaguccgacggcaagccccagaaggccgacagcaacaacuccagcaagucccugcagagcgccggcuucaccgccgggcugaccuacucccagcucaugacccugaaggacgccaugcugcagcuggacccgaacgcgaagacguggauggacaucgagggccggcccgaggaccccguggagaucgcccucuaccagcccagcuccgggugcuacauccacuucuuccgcgagccgaccgaccugaagcaguucaagcaggacgccaaguacagccacggcaucgacgugaccgaccuguucgccacccagcccgggcucacguccgccgucaucgacgcgcugccccgcaacauggugaucacgugccagggcagcgacgacauccggaagcugcucgagagccagggccgcaaggacaucaagcugaucgacaucgaccuguccaagaccgacagccggaaguacgagaacgccgugugggaccaguacaaggaccucugccacaugcacaccggggucguggucgagaagaagaagcgcggcgggaaggaggagaucaccccgcacugcgcccugauggacugcaucauguucgacgccgcgguguccggcgggcugaacaccagcgugcuccgggccguccugccccgcgacaugguguuccggaccuccacgccccgcgugguccugugaggacuagucccuguucccagagcccacuuuuuuuucuuuuuuugaaauaaaauagccugucuuucagaucucaaaggcucuuuucagagccaccaaaaaaaaaaaaaaaaaaaaaaaaaaaaaaaaaaaaaaaaaaaaaaaaaaaaaaaaaaaaaaaaaaaaaaaaaaaaaaaaaaaaaaaaaaaaaaaaaaaaa

SEQ ID NO: 19902 - RNA, 2052 nt, Artificial Sequence
  mRNA product Design a-2 (hSL-A100) comprising derived and/or modified sequence from LASV(LM765-SLE-2012;Clade IV)__AIT17815__SP-HsALB_NP(2-569) (opt1)
aggagaguccgcucagccagguugcagaagcggcuuagcguguguccuaaucuucucucugcguguagguaggccugugccgcaaacaagcuuaccaugaagugggugaccuucaucagccugcucuuccuguucuccagcgccuacuccagcgccuccaaggagaucaagagcuuccuguggacccagucccuccgccgggagcugagcggcuacugcuccaacaucaagcuccagguggucaaggacgcccaggcgcugcugcacgggcuggacuucagcgagguguccaacgugcagcgccucaugcggaaggagcgccgggacgacaacgaccugaagcgccugcgggaccucaaccaggccgucaacaaccugguggagcucaagagcacccagcagaaguccauccugcgcgugggcacccugaccagcgacgaccugcucauccuggccgccgaccuggagaagcucaaguccaaggucacccggaccgagcgcccccugagcgccgggguguacaugggcaaccuguccagccagcagcucgaccagcggcgcgcgcugcuggacaugaucgggauguccggcagcaaccagggcgcccgggccgggcgcgacggcgugguccgggugugggacgugaagaacgccgagcuccugaacaaccaguucgggacgaugccgucccugacccucgcgugccugaccaagcagggccaggucgaccugaacgacgccgugcaggcccucaccgaccuggggcugaucuacacggccaaguaccccaacaccagcgaccucgaccgccugacccagucccaccccauccugaacaugaucgacaccaagaaguccagccucaacaucuccggcuacaacuucagccugggcgccgcggugaaggccggggccugcaugcuggacggcgggaacaugcucgagacgaucaaggucagcccccagaccauggacggcauccucaagagcauccugaaggugaagaaggcccugggcauguucaucuccgacgccccgggggagcggaaccccuacgagaacauccuguacaagaucugccugagcggcgacggguggcccuacaucgcgucccgcaccagcaucaccggccgggccugggagaacacgguggucgaccucgaguccgacgggaagccccagaaggccggcagcaacggcuccaacaagagccugcaguccgccggguucaccgccggccugaccuacagccagcucaugacccugaaggacgcgaugcugcagcuggacccgaacgccaagacguggauggacaucgaggggcgccccgaggaccccguggagaucgcccucuaccagcccuccagcggcugcuacauccacuucuuccgggagccgaccgaccugaagcaguucaagcaggacgccaaguacucccacgggaucgacgugaccgaccuguucgccgcgcagcccggccucaccagcgccgucaucgacgcccugccccgcaacauggugaucacgugccagggcuccgacgacauccgcaagcuguucgagagccaggggcggaaggacaucaagcucaucgacaucgcccugagcaagaccgacucccgcaaguacgagaacgcggugugggaccaguacaaggaccugugccacaugcacaccggcaucgucguggagaagaagaagcgcgggggcaaggaggagaucacgccccacugcgcccucauggacugcaucauguucgacgccgccgucagcgggggccugaacaccuccgugcugcgggccgugcucccgcgggacauggucuuccgcaccagcacgccccggguggugcugugaggacuagucccuguucccagagcccacuuuuuuuucuuuuuuugaaauaaaauagccugucuuucagaucucaaaggcucuuuucagagccaccaaaaaaaaaaaaaaaaaaaaaaaaaaaaaaaaaaaaaaaaaaaaaaaaaaaaaaaaaaaaaaaaaaaaaaaaaaaaaaaaaaaaaaaaaaaaaaaaaaaaa

SEQ ID NO: 19903 - RNA, 2052 nt, Artificial Sequence
  mRNA product Design a-2 (hSL-A100) comprising derived and/or modified sequence from LASV(LM776-SLE-2012;Clade IV)__AIT17825__SP-HsALB_NP(2-569) (opt1)
aggagaguccgcucagccagguugcagaagcggcuuagcguguguccuaaucuucucucugcguguagguaggccugugccgcaaacaagcuuaccaugaagugggugaccuucaucagccugcucuuccuguucuccagcgccuacuccagcgccuccaaggagaucaagagcuuccuguggacccagucccuccgccgggagcugagcuccuacugcagcaacaucaagcuccagguggucaaggacgcccaggcgcugcugcacggccuggacuucuccgaggugagcaacgugcagcgccucaugcggaaggagcgccgggacgacaacgaccugaagcgccugcgggaccucaaccaggccgucaacaaccugguggagcugaaguccacccagcagaaguccauccuccgcguggggacccugaccuccgacgaccugcucauccuggccgccgaccuggagaagcucaagagcaaggucacccggaccgagcgcccccuguccgccggcguguacauggggaaccugagcucccagcagcucgaccagcggcgcgcgcugcugagcaugaucggcauguccgggagcaaccagggcgcccgggccggccgcgacggggugguccgggugugggacgugaagaacgccgagcuccugaacaaccaguucggcacgaugccgucccugacccucgcgugccugaccaagcaggggcaggucgaccugaacgacgccgugcaggcccucaccgaccugggccugaucuacacggccaaguaccccaacaccagcgaccucgaccgccugacccagagccaccccauccugaacaugaucgacaccaagaaguccagccucaacaucuccggguacaacuucagccugggcgccgcggugaaggccggcgccugcaugcuggacgggggcaacaugcucgagacgaucaaggucagcccccagaccauggacgggauccucaagagcauccugaaggugaagaaggcccugggcauguucaucuccgacaccccgggcgagcggaaccccuacgagaacauccuguacaagaucugccugagcggggacggcuggcccuacaucgccucccgcaccagcaucacggggcgggcgugggagaacaccguggucgaccucgaguccgacggcaagccccagaaggccgggagcaacaacuccaacaagagccugcaguccgccggcuucaccgccggccugaccuacagccagcucaugacgcugaaggacgccaugcugcagcuggacccgaacgcgaagaccuggauggacaucgaggggcgccccgaggaccccguggagguggcccucuaccagcccuccagcggcugcuacauccacuucuuccgggagccgaccgaccugaagcaguucaagcaggacgccaaguacucccacgggaucgacgucaccgaccuguucgccgcccagcccggccucacgagcgcggugaucgacgcccugccccgcaacauggugaucacgugccaggggagcgacgacauccgcaagcugcucgagucccagggccggaaggacaucaagcugaucgacaucgcccugagcaagaccgacucccgcaaguacgagaacgccgucugggaccaguacaaggaccucugccacaugcacaccggcguggucguggagaagaagaagcgcgggggcaaggaggagaucaccccgcacugcgcgcugauggacugcaucauguucgacgccgccgugagcgggggccugaacaccuccguccuccgggccgugcugccccgggacaugguguuccgcaccagcacgccccgggucgugcugugaggacuagucccuguucccagagcccacuuuuuuuucuuuuuuugaaauaaaauagccugucuuucagaucucaaaggcucuuuucagagccaccaaaaaaaaaaaaaaaaaaaaaaaaaaaaaaaaaaaaaaaaaaaaaaaaaaaaaaaaaaaaaaaaaaaaaaaaaaaaaaaaaaaaaaaaaaaaaaaaaaaaa

SEQ ID NO: 19904 - RNA, 2052 nt, Artificial Sequence
  mRNA product Design a-2 (hSL-A100) comprising derived and/or modified sequence from LASV(Mad39;Clade IV)__ANH09723__SP-HsALB_NP(2-569) (opt1)
aggagaguccgcucagccagguugcagaagcggcuuagcguguguccuaaucuucucucugcguguagguaggccugugccgcaaacaagcuuaccaugaagugggugaccuucaucagccugcucuuccuguucuccagcgccuacuccagcgccuccaaggagaucaagagcuuccuguggacccagucccuccgccgggagcugagcggcuacugcuccaacaucaagcuccagguggucaaggacgcccaggcgcugcugcacgggcuggacuucagcgagguguccaacgugcagcgccucaugcggaagcagcgccgggacgacaacgaccugaagcgccugcgggaccucaaccaggccgucaacaaccugguggagcugaaguccacccagcagaaguccgugcuccgcgucggcacgcugaccagcgacgaccugcucacccuggccgccgaccuggagaagcucaaguccaaggugacccggacggagcgcccccugaccgccgggguguacaugggcaaccugagcucccagcagcucgaccagcggcgcgcgcugcugaacaugaucgggaugagcggcggcaaccagggggcccggaccggccgcgacggggucgugcgggugugggacgucaagaacgccgagcuccugaacaaccaguucggcaccaugccgucccugacgcucgccugccugaccaagcagggccagguggaccugaacgacgugguccaggcgcucaccgaccuggggcugaucuacaccgccaaguaccccaacacgagcgaccucgaccgccugacccagucccaccccauccugaacaugaucgacaccaacaagagcucccucaacaucagcggcuacaacuucagccugggggccgccgugaaggccggcgcgugcaugcuggacgggggcaacaugcucgagaccaucaaggugagcccccagacgauggacggcauccucaagagcauccugaaggucaagaagucccuggggauguucaucagcgacaccccgggcgagcggaaccccuacgagaacauccuguacaagaucugccuguccggggacggcuggcccuacaucgccagccgcaccuccaucaccgggcgggccugggagaacacggugguggaccucgagagcggcggcaagccccagaaggccggguccaacaacagcaacaagucccugcagagcgccggcuucgcggccgggcugaccuacucccagcucaugacccugaaggacgccaugcugcagcuggacccgaacgccaagaccuggauggacaucgagggccgccccgaggaccccgucgagaucgcccucuaccagcccaucagcgggugcuacauccacuucuuccgggagccgacggaccugaagcaguucaagcaggacgcgaaguacucccacggcaucgacgugaccgaccuguucgccgcccagcccggccucaccagcgccgugaucgaggcccugccccgcaacauggucaucacgugccagggguccgacgacauccgcaagcuguucgagagccagggccggaaggacaucaagcucaucgacaucgcgcuguccaagaccgacagccgcaaguacgagaacgccgugugggaccaguacaaggaccugugccacaugcacaccggggucgugguggagaagaagaagaagggcgggaaggaggagaucacgccccacugcgcccucauggacugcaucauguucgacgccgcggucagcggcggccugaacacccuggugcuccgggccgugcugccgcgcgacauggucuuccggaccuccacccccaagguggugcugugaggacuagucccuguucccagagcccacuuuuuuuucuuuuuuugaaauaaaauagccugucuuucagaucucaaaggcucuuuucagagccaccaaaaaaaaaaaaaaaaaaaaaaaaaaaaaaaaaaaaaaaaaaaaaaaaaaaaaaaaaaaaaaaaaaaaaaaaaaaaaaaaaaaaaaaaaaaaaaaaaaaaa

SEQ ID NO: 19905 - RNA, 2052 nt, Artificial Sequence
  mRNA product Design a-2 (hSL-A100) comprising derived and/or modified sequence from LASV(Z0947-SLE-2011;Clade IV)__AIT17841__SP-HsALB_NP(2-569) (opt1)
aggagaguccgcucagccagguugcagaagcggcuuagcguguguccuaaucuucucucugcguguagguaggccugugccgcaaacaagcuuaccaugaagugggugaccuucaucagccugcucuuccuguucuccagcgccuacuccagcgccuccaaggagaucaagagcuuccuguggacccagucccuccgccgggagcugagcggcuacugcuccaacaucaagcuccagguggucaaggacgcccaggcgcugcugcacgggcuggacuucagcgagguguccaacgugcagcgccucaugcggaaggagcgccgggacgacaacgaccugaagcgccugcgggaccucaaccaggccgucaacaaccugguggagcucaagagcacccagcagaaguccauccugcgcgugggcacccugaccagcgacgaccugcucauccuggccgccgaccuggagaagcucaaguccaaggucacccggaccgagcgcccccugagcgccgggguguacaugggcaaccuguccagccagcagcucgaccagcggcgcgcgcugcugaacaugaucgggauguccggcagcaaccagggcgcccggacggggcgcgacggcgugguccgggugugggacgugaagaacgccgagcuccugaacaaccaguucgggaccaugccgucccugacccucgccugccugaccaagcagggccaggucgaccugaacgacgcggugcaggcccucacggaccuggggcugaucuacaccgccaaguaccccaacaccagcgaccucgaccgccugacccagucccaccccauccugaacaugaucgacacgaagaaguccagccucaacaucuccggcuacaacuucagccugggcgccgccgugaaggcgggggccugcaugcuggacggcgggaacaugcucgagaccaucaaggucagcccccagaccauggacggcauccucaagagcauccugaaggugaagaaggcccugggcauguucaucuccgacgccccgggggagcggaaccccuacgagaacauccuguacaagaucugccugagcggcgacggguggcccuacaucgccucccgcaccagcaucacgggccgggcgugggagaacaccguggucgaccucgaguccgacgggaagccccagaaggccggcagcaacggcuccaacaagagccugcaguccgccggguucaccgccggccugaccuacagccagcucaugacgcugaaggacgccaugcugcagcuggacccgaacgcgaagaccuggauggacaucgaggggcgccccgaggaccccguggagaucgcccucuaccagcccuccagcggcugcuacauccacuucuuccgggagccgaccgaccugaagcaguucaagcaggacgccaaguacucccacgggaucgacgugaccgaccuguucgccgcccagcccggccucacgagcgcggucaucgacgcccugccccgcaacauggugaucacgugccagggcuccgacgacauccgcaagcuguucgagagccaggggcggaaggacaucaagcucaucgacaucgcccugagcaagaccgacucccgcaaguacgagaacgccgugugggaccaguacaaggaccugugccacaugcacaccggcaucgucguggagaagaagaagcgcgggggcaaggaggagaucaccccgcacugcgcgcucauggacugcaucauguucgacgccgccgucagcgggggccugaacaccuccgugcugcgggccgugcucccccgggacauggucuuccgcaccagcacgccccggguggugcugugaggacuagucccuguucccagagcccacuuuuuuuucuuuuuuugaaauaaaauagccugucuuucagaucucaaaggcucuuuucagagccaccaaaaaaaaaaaaaaaaaaaaaaaaaaaaaaaaaaaaaaaaaaaaaaaaaaaaaaaaaaaaaaaaaaaaaaaaaaaaaaaaaaaaaaaaaaaaaaaaaaaaa

SEQ ID NO: 19906 - RNA, 2052 nt, Artificial Sequence
  mRNA product Design a-2 (hSL-A100) comprising derived and/or modified sequence from LASV(Josiah;Clade IV)__NP_694869__SP-HsALB_NP(2-569) (opt4)
aggagaguccgcucagccagguugcagaagcggcuuagcguguguccuaaucuucucucugcguguagguaggccugugccgcaaacaagcuuaccaugaagugggugaccuucaucagccugcuguuccuguucagcagcgccuacagcagcgccagcaaggagaucaagagcuuccuguggacccagagccugagaagagagcugagcggcuacugcagcaacaucaagcugcagguggugaaggacgcccaggcccugcugcacggccuggacuucagcgaggugagcaacgugcagagacugaugagaaaggagagaagagacgacaacgaccugaagagacugagagaccugaaccaggccgugaacaaccugguggagcugaagagcacccagcagaagagcauccugagagugggcacccugaccagcgacgaccugcugauccuggccgccgaccuggagaagcugaagagcaaggugaucagaaccgagagaccccugagcgccggcguguacaugggcaaccugagcagccagcagcuggaccagagaagagcccugcugaacaugaucggcaugagcggcggcaaccagggcgccagagccggcagagacggcguggugagagugugggacgugaagaacgccgagcugcugaacaaccaguucggcaccaugcccagccugacccuggccugccugaccaagcagggccagguggaccugaacgacgccgugcaggcccugaccgaccugggccugaucuacaccgccaaguaccccaacaccagcgaccuggacagacugacccagagccaccccauccugaacaugaucgacaccaagaagagcagccugaacaucagcggcuacaacuucagccugggcgccgccgugaaggccggcgccugcaugcuggacggcggcaacaugcuggagaccaucaaggugagcccccagaccauggacggcauccugaagagcauccugaaggugaagaaggcccugggcauguucaucagcgacacccccggcgagagaaaccccuacgagaacauccuguacaagaucugccugagcggcgacggcuggcccuacaucgccagcagaaccagcaucaccggcagagccugggagaacaccgugguggaccuggagagcgacggcaagccccagaaggccgacagcaacaacagcagcaagagccugcagagcgccggcuucaccgccggccugaccuacagccagcugaugacccugaaggacgccaugcugcagcuggaccccaacgccaagaccuggauggacaucgagggcagacccgaggaccccguggagaucgcccuguaccagcccagcagcggcugcuacauccacuucuucagagagcccaccgaccugaagcaguucaagcaggacgccaaguacagccacggcaucgacgugaccgaccuguucgccacccagcccggccugaccagcgccgugaucgacgcccugcccagaaacauggugaucaccugccagggcagcgacgacaucagaaagcugcuggagagccagggcagaaaggacaucaagcugaucgacaucgcccugagcaagaccgacagcagaaaguacgagaacgccgugugggaccaguacaaggaccugugccacaugcacaccggcguggugguggagaagaagaagagaggcggcaaggaggagaucaccccccacugcgcccugauggacugcaucauguucgacgccgccgugagcggcggccugaacaccagcgugcugagagccgugcugcccagagacaugguguucagaaccagcacccccagaguggugcugugaggacuagucccuguucccagagcccacuuuuuuuucuuuuuuugaaauaaaauagccugucuuucagaucucaaaggcucuuuucagagccaccaaaaaaaaaaaaaaaaaaaaaaaaaaaaaaaaaaaaaaaaaaaaaaaaaaaaaaaaaaaaaaaaaaaaaaaaaaaaaaaaaaaaaaaaaaaaaaaaaaaaa

SEQ ID NO: 19907 - RNA, 2052 nt, Artificial Sequence
  mRNA product Design a-2 (hSL-A100) comprising derived and/or modified sequence from LASV(LP;Clade I)__AAF86702__SP-HsALB_NP(2-569) (opt4)
aggagaguccgcucagccagguugcagaagcggcuuagcguguguccuaaucuucucucugcguguagguaggccugugccgcaaacaagcuuaccaugaagugggugaccuucaucagccugcuguuccuguucagcagcgccuacagcagcaacagcaaggagaucaagagcuuccuguggacccagagccugagaagagagcugagcggcuacugcagcaacaucaagcugcagguggugaaggacgcccaggcccugcugcacggccuggacuucagcgaggugagcaacgugcagagacugaugagaaagcagaagagagacgacgccgaccugaagagacugagagaccugaaccaggccgugaacaaccugguggagcugaagagcacccagcagaagaacgugcugagagugggcacccugagcagcgacgaccugaucacccuggccgccgaccuggagaagcugaagagcaaggugaucagaaccgagagaccccugagcagcggcguguacaugggcaaccugagcagccagcagcuggaccagagaagagcccugcugagcaugaucggcaugagcggcggcccccagggcaacagaaccggcggcgacggcguggugagagugugggacgugaagaacgccgagcugcugaacaaccaguucggcaccaugcccagccugacccuggccugccugaccaagcagggccagguggaccugaacgacgccgugcaggcccugaccgaccugggccugaucuacaccgccaaguaccccaacagcagcgaccuggacaugcugacccagagccaccccauccugggcaugguggacaccaagaagagcagccugaacaucagcggcuacaacuucagccugggcgccgccgugaaggccggcgccugcaugcuggacggcggcaacaugcuggagaccaucaaggugagcccccagaccauggacggcauccugaagagcauccugaaggugaagagaagccugggcauguucaucagcgacacccccggcgagagaaaccccuacgagaacauccuguacaagaucugccugagcggcgagggcuggcccuacaucgccagcagaaccagcaucaccggcagagccugggagaacacccugguggaccuggagagcgacaacaagccccccaagcugaacagcgccggcagcaacaagagccugcaggccgccggccugaacgccggccugaccuacagccagcugaugacccugaaggacugcaugcugcagcuggaccccagcagcaagaccuggaucgacaucgagggcagacccgaggaccccguggagaucgcccuguuccagcccagcagcggcugcuacauccacuucuucagagagcccaccgaccugaagcaguucaagcaggacgccaaguacagccacggcaucgacgugaccgaccuguucagcacccagcccggccugaccagcgccgugaucgaggcccugcccagaaacauggugcugaccugccagggcagcgacgacaucaagaagcugcuggagagccagggcagaagagacaucaagcugaucgacaucagccugagcaaggccgacagcagaaaguucgagaacgccgugugggaccaguacaaggaccugugccacaugcacaccggcguggugguggagaagaagaagagaggcggcaaggaggagaucaccccccacugcgcccugcuggacugcaucauguucgacgccgccaccaccggcagccugaacaucaccacccugagagccgugcugcccagagacaugguguucagaaccagcacccccaagguggugcugugaggacuagucccuguucccagagcccacuuuuuuuucuuuuuuugaaauaaaauagccugucuuucagaucucaaaggcucuuuucagagccaccaaaaaaaaaaaaaaaaaaaaaaaaaaaaaaaaaaaaaaaaaaaaaaaaaaaaaaaaaaaaaaaaaaaaaaaaaaaaaaaaaaaaaaaaaaaaaaaaaaaaa

SEQ ID NO: 19908 - RNA, 2052 nt, Artificial Sequence
  mRNA product Design a-2 (hSL-A100) comprising derived and/or modified sequence from LASV(803213;Clade II)__AAF86704__SP-HsALB_NP(2-569) (opt4)
aggagaguccgcucagccagguugcagaagcggcuuagcguguguccuaaucuucucucugcguguagguaggccugugccgcaaacaagcuuaccaugaagugggugaccuucaucagccugcuguuccuguucagcagcgccuacagcagcgccagcaaggaggugaagagcuuccuguggacccagagccugagaagagagcugagcggcuacugcagcaacaucaagcugcagguggugaaggacgcccaggcccugcugcacggccuggacuucagcgaggugaacaacgugcagagacugaugagaaagcagaagagagacgacggcgaccugaagagacugagagaccugaaccaggccgugaacaaccugguggagcugaagagcacccagcagaagagcauccugagagugggcacccugaccagcgacgaccugcugacccuggccgccgaccuggagaagcugaagagcaaggugaucagaaccgagagaccccugagcagcggcguguacaugggcaaccugagcacccagcagcuggagcagagaagagcccugcugaacaugaucggcauggugggcggcgcccagggcacccagcccggcagagacggcguggugagagugugggacgugaagaaccccgaccugcugaacaaccaguucggcaccaugcccagccugacccuggccugccugaccaagcagggccagguggaccugaacgacgccgugcuggcccugaccgaccugggccugaucuacaccgccaaguaccccaacagcagcgaccuggacagacugagccagagccaccccauccugaacaugguggacaccaagaagagcagccugaacaucagcggcuacaacuucagccugggcgccgccgugaaggccggcgccugcaugcuggacggcggcaacaugcuggagaccaucaaggugaccccccagaccauggacggcauccugaagagcauccugaaggugaagagaagccugggcauguucgugagcgacacccccggcgagagaaaccccuacgagaacauccuguacaagaucugccugagcggcgacggcuggcccuacaucgccagcagaaccagcaucgugggcagagccugggagaacaccaccguggaccuggagagcgacggcaagccccagaaggugggcaccgccggcagcaacaagagccugcagagcgccggcuuccccaccggccugaccuacagccagcugaugacccugaaggacagcaugaugcagcuggaccccagcgccaagaccuggaucgacaucgagggcagacccgaggaccccguggagaucgcccuguaccagcccaugagcggcugcuacauccacuucuucagagagcccaccgaccugaagcaguucaagcaggacgccaaguacagccacggcaucgacguggccgaccuguuccccgcccagcccggccugaccagcgccgugaucgaggcccugcccagaaacauggugcugaccugccagggcagcgacgacaucaagaagcugcuggacagccagggcagaagagacaucaagcugaucgacaucagccugagcaagguggacagcagaaaguucgagaacgccgugugggaccagugcaaggaccugugccacaugcacaccggcguggugguggagaagaagaagagaggcggcaaggaggagaucaccccccacugcgcccugauggacugcaucauguucgacgccgccgugagcggcggccugaacauccccgugcugagagccgugcugcccagagacaugguguucagaaccagcagccccaagguggugcugugaggacuagucccuguucccagagcccacuuuuuuuucuuuuuuugaaauaaaauagccugucuuucagaucucaaaggcucuuuucagagccaccaaaaaaaaaaaaaaaaaaaaaaaaaaaaaaaaaaaaaaaaaaaaaaaaaaaaaaaaaaaaaaaaaaaaaaaaaaaaaaaaaaaaaaaaaaaaaaaaaaaaa

SEQ ID NO: 19909 - RNA, 2055 nt, Artificial Sequence
  mRNA product Design a-2 (hSL-A100) comprising derived and/or modified sequence from LASV(GA391;Clade III)__CAA36646__SP-HsALB_NP(2-570) (opt4)
aggagaguccgcucagccagguugcagaagcggcuuagcguguguccuaaucuucucucugcguguagguaggccugugccgcaaacaagcuuaccaugaagugggugaccuucaucagccugcuguuccuguucagcagcgccuacagcagcgccagcaaggaggugagaagcuuccuguggacccagagccugagaagagagcugagcggcuacugcagcaacaucaagcugcagguggugaaggacgcccaggcccugcugcacggccuggacuucagcgaggugagcaacgugcagagacugaugagaaagcagaagagagacgacggcgaccugaagagacugagagaccugaaccaggccgugaacaaccugguggagcugaagagcacccagcagaagagcgugcugagagugggcacccugagcagcgacgaccugcugauccuggccgccgaccuggagaagcugaagagcaaggugaccagaaccgagagaccccugagcagcggcguguacaugggcaaccugagcagccagcagcuggaccagagaagagcccugcugaacaugaucggcaugaccggcgugagcggcggcggcaagggcgccagcgacggcaucgugagagugugggacgugaagaacgccgagcugcugaacaaccaguucggcaccaugcccagccugacccuggccugccugaccaagcagggccagguggaccugaacgacgccgugcaggcccugaccgaccugggccugaucuacaccgccaaguaccccaacagcagcgaccuggacagacugagccagagccaccccauccugaacaugaucgacaccaagaagagcagccugaacaucagcggcuacaacuucagccugggcgccgccgugaaggccggcgccugcaugcuggacggcggcaacaugcuggagaccaucaaggugagcccccagaccauggacggcauccugaagagcauccugaaggugaagaagagccugggcauguucgugagcgacacccccggcgagagaaaccccuacgagaacauccuguacaagaucugccugagcggcgacggcuggcccuacaucgccagcagaaccagcaucgugggcagagccugggagaacaccgugguggaccuggagcaggacaacaagccccagaagaucggcaacggcggcagcaacaagagccugcagagcgccggcuucgccgccggccugaccuacagccagcugaugacccugaaggacuucaagugcuucaaccugauccccaacgccaagaccuggauggacaucgagggcagacccgaggaccccguggagaucgcccuguaccagcccagcagcggcugcuacgugcacuucuucagagagcccaccgaccugaagcaguucaagcaggacgccaaguacagccacggcaucgacgugaccgaccuguucgccgcccagcccggccugaccagcgccgugaucgaggcccugcccagaaacauggugaucaccugccagggcagcgaggacaucagaaagcugcuggagagccagggcagaagagacaucaagcugaucgacaucacccugagcaaggccgacagcagaaaguucgagaacgccgugugggaccaguucaaggaccugugccacaugcacaccggcguggugguggagaagaagaagagaggcggcaaggaggagaucaccccccacugcgcccugauggacugcaucauguucgacgccgccgugagcggcggccuggacgccaaggugcugagaguggugcugcccagagacaugguguucagaaccagcacccccaagguggugcugugaggacuagucccuguucccagagcccacuuuuuuuucuuuuuuugaaauaaaauagccugucuuucagaucucaaaggcucuuuucagagccaccaaaaaaaaaaaaaaaaaaaaaaaaaaaaaaaaaaaaaaaaaaaaaaaaaaaaaaaaaaaaaaaaaaaaaaaaaaaaaaaaaaaaaaaaaaaaaaaaaaaaa

SEQ ID NO: 19910 - RNA, 2052 nt, Artificial Sequence
  mRNA product Design a-2 (hSL-A100) comprising derived and/or modified sequence from LASV(AV;Clade V)__CCA30315__SP-HsALB_NP(2-569) (opt4)
aggagaguccgcucagccagguugcagaagcggcuuagcguguguccuaaucuucucucugcguguagguaggccugugccgcaaacaagcuuaccaugaagugggugaccuucaucagccugcuguuccuguucagcagcgccuacagcagcgccagcaaggaggugaagagcuuccuguggacccagagccugagaagagagcugagcggcuacugcagcaacaucaagcugcagguggugaaggacgcccaggcccugcugcacggccuggacuucagcgaggugagcaacgugcagagacugaugagaaagcagagaagagacgacagcgaccugaagagacugagagaccugaaccaggccgugaacaaccugguggagcugaagagcacccagcagaagagcgugcugagagugggcacccugagcagcgacgaccugcugacccuggccgccgaccuggagaagcugaagagcaaggugaccagaaccgagagaccccugagcagcggcguguacaugggcaaccugagcagccagcagcuggaccagagaagagcccugcugaaccugaucggcaugaccaacggcagccagggcagccaggccggcagagacggcguggugagagugugggacgugaagaacgccgagcugcugaacaaccaguucggcaccaugcccagccugacccuggccugccugaccaagcagggccagguggaccugaacgacguggugcaggcccugaccgaccugggccugaucuacaccgccaaguaccccaacaccagcgaccuggacagacugacccagagccaccccauccugaacaugaucgacaccaagaagagcagccugaacaucagcggcuacaacuucagccugggcgccgccgugaaggccggcgccugcaugcuggacggcggcaacaugcuggagaccaucaaggugagcccccagagcauggacggcauccugaagagcauccugaaggugaagagagcccugggcauguucgugagcgacacccccggcgagagaaaccccuacgagaacauccuguacaagaucugccugagcggcgacggcuggcccuacaucgccagcagaaccagcaucgugggcagagccugggagaacaccgugguggaccuggagaccgacggcaagccccagaagaucggcagcggcaacagcaacaagagccugcagagcgccggcuucagcgccggccugaccuacagccagcugaugacccugaaggacgccaugcugcagcuggaccccaacgccaagaccuggauggacaucgagggcagacccgaggaccccguggagguggcccuguaccagcccaucagcggcugcuacauccacuucuucagagagcccaccgaccugaagcaguucaagcaggacgccaaguacagccacggcaucgacaucgccgaccuguucgccgcccagcccggccugaccagcgccgugaucgaggcccugcccagaaacauggugaucaccugccagggcagcgaggacaucaagaagcugcuggagagccagggcagaaaggacaucaagcugaucgacaucgcccugagcaagaucgacagcagaaaguucgagaacgccgugugggaccaguacaaggaccugugccacaugcacaccggcguggugguggagaagaagaagagaggcggcaaggaggagaucaccccccacugcgcccugauggacugcaucauguucgacgccgccgugagcggcggccugaacacccuggugcugagagccgugcugcccagagacaugguguucagaaccagcacccccagaguggugcugugaggacuagucccuguucccagagcccacuuuuuuuucuuuuuuugaaauaaaauagccugucuuucagaucucaaaggcucuuuucagagccaccaaaaaaaaaaaaaaaaaaaaaaaaaaaaaaaaaaaaaaaaaaaaaaaaaaaaaaaaaaaaaaaaaaaaaaaaaaaaaaaaaaaaaaaaaaaaaaaaaaaaa

SEQ ID NO: 19911 - RNA, 2052 nt, Artificial Sequence
  mRNA product Design a-2 (hSL-A100) comprising derived and/or modified sequence from LASV(Togo/2016/7082;Clade VI)__AMR44578__SP-HsALB_NP(2-569) (opt4)
aggagaguccgcucagccagguugcagaagcggcuuagcguguguccuaaucuucucucugcguguagguaggccugugccgcaaacaagcuuaccaugaagugggugaccuucaucagccugcuguuccuguucagcagcgccuacagcagcaacagcaaggaggugaagagcuuccuguggacccagagccugagaagagagcugagcggcuacugcagcaacaucaagcugcagguggugaaggacgcccaggcccugcugcacggccuggacuucagcgaggugagcaacgugcagagacugaugagaaagcagaagagagacgacggcgaccugaagagacugagagaccugaaccaggccgugaacaaccugguggagcugaagagcgugcagcagaagagcauccugagagugggcacccugaccagcgacgaccugcugacccuggccgccgaccuggagaagcugaagagcaaggugaccagaaccgagagaccccugagcagcggcguguacaugggcaaccugagcagccagcagcuggaccagagaagagcccugcugagcaugaucggcaugagcggcggcaaccagaacagccagcccaagggcgacggcguggugagagugugggacgugaagaacgccgaccugcugaacaaccaguucggcaccaugcccagccugacccuggccugccugaccaagcagggccagguggaccugaacgacgccgugcaggcccugaccgaccugggccugaucuacaccgccaaguaccccaacagcagcgaccuggacagacugagccagagccaccccauccugaacaugaucgacaccaagaagagcagccugaacaucagcggcuacaacuucagccugggcgccgccaucaagaccggcgccugcaugcuggacggcggcaacaugcuggagaccaucaaggugaccccccagaccauggacggcauccugaagagcauccugaaggugaagagaagccugggcauguucaucagcgacacccccggcgagagaaaccccuacgagaacauccuguacaagaucugccugagcggcgacggcuggcccuacaucgccagcagaaccgccaucaucggcagagccugggagaacaccgugguggaccuggagagcgacagcaagccccagaagaucggcagcaacggcagcaacaagagccugcagagcgccggcuucgcccccggccugaccuacagccagcugaugacccugaaggacagcaugcugcagcuggaccccaacgccaagaccuggaucgacaucgagggcagacccgaggaccccguggagguggcccuguuccagcccaucagcggcugcuacauccacuucuucagagagcccaccgaccugaagcaguucaagcaggacgccaaguacagccacggcaucgacgugaccgaccuguucgccgcccagcccggccugaccagcgccgugaucgaggcccugcccagaaacauggugcugaccugccagggcagcgacgacaucaagaagcugcuggacagccagggcagaagagacaucaagcugaucgacgugagccugaacaagaucgacagcagaaaguucgagaacgccgugugggaccaguacaaggaccugugccacaugcacaccggcguggugguggagaagaagaagaagggcggcaaggaggagaucaccccccacugcgcccugcuggacugcaucauguucgacgccgccgugagcggcggccugaacgccaccgugcugagagccgugcugcccagagacaugguguucagaaccagcagccccaagguggugcugugaggacuagucccuguucccagagcccacuuuuuuuucuuuuuuugaaauaaaauagccugucuuucagaucucaaaggcucuuuucagagccaccaaaaaaaaaaaaaaaaaaaaaaaaaaaaaaaaaaaaaaaaaaaaaaaaaaaaaaaaaaaaaaaaaaaaaaaaaaaaaaaaaaaaaaaaaaaaaaaaaaaaa

SEQ ID NO: 19912 - RNA, 2052 nt, Artificial Sequence
  mRNA product Design a-2 (hSL-A100) comprising derived and/or modified sequence from LASV(KAK-428;Clade n.d. (VII))__ANH09741__SP-HsALB_NP(2-569) (opt4)
aggagaguccgcucagccagguugcagaagcggcuuagcguguguccuaaucuucucucugcguguagguaggccugugccgcaaacaagcuuaccaugaagugggugaccuucaucagccugcuguuccuguucagcagcgccuacagcagcaacagcaaggaggugaagagcuuccuguggacccagagccugagaagagagcugagcggcuacugcaccaacaucaagcugcagguggugaaggacgcccaggcccugcugcacggccuggacuucagcgaggugagcaacgugcagagacugaugagaaagcagaagagagacgacaacgaccugaagagacugagagaccugaaccaggccgugaacaaccugguggagcugaagagcgugcagcagaagagcgugcugaaggugggcacccugaacagcgacgaccugcugacccuggccgccgaccuggagaagcugaagagcaagguggugagaaccgagagaccccugagcagcggcguguacaugggcaaccugagcagccagcagcuggaccagagaagagcccugcugaacaugaucggcauggccggcggcagccagggcaaccagcccagcagagacggcguggugagagugugggacgugaagaacgccgaccugcugaacaaccaguucggcaccaugcccagccugacccuggccugccugaccaagcagggccagguggaccugaacgacguggugcuggcccugaccgaccugggccugaucuacaccgccaaguaccccaacagcagcgaccuggacagacugagccagaaccaccccgugcugaacaugaucgacgugaacaagagcagccugaacaucagcggcuacaacuucagccugggcgccgccgugaaggccggcgccugcaugcuggacggcggcaacaugcuggagaccaucaagaucagcccccagaccguggacggcauccugaagagcauccugaaggugaagagagcccugggcauguucgugagcgacacccccggcgagagaaaccccuacgagaacauccuguacaaggugugccugagcggcaacggcuggcccuacaucgccagcagaaccagcaucgugggcagagccugggagaacaccgugguggaccuggagagcaacaagaaccagcccaaggugggcaacaacggcagcaacaagaugcugcagagcagcggcuucgccaccggccugaccuacagccagcugaugacccugagagacagcaugcugcagcuggaccccaccgccaagaccuggaucgacaucgagggcagacccgaggaccccguggagcuggcccuguuccagcccagcagcggcugcuacauccacuucuucagagagcccaccgaccugaagcaguucaagcaggacgccaaguacagccacggcaucgacgugaacgaccuguucagcgcccagcccggccugaccagcgccgugcuggaggcccugcccagaaacauggugcugaccugccagggcagcgacgacaucagaaagcugcuggacagccaggacagaaaggacaucaagcugaucgacaucagccugagcaaggccgacgccagaaaguucgagaacgacgugugggaccaguucaaggaccugugccacaugcacaccggcaucgugguggagaagaagaagaagggcggcaagcaggagaugaccccccacugcgcccugcuggacugcaucauguucgacgccgccgugagcggcggccugaacgugcccacccugagagccgugcugcccaccgacaugguguucagaaccaucaccaccaagguggugcugugaggacuagucccuguucccagagcccacuuuuuuuucuuuuuuugaaauaaaauagccugucuuucagaucucaaaggcucuuuucagagccaccaaaaaaaaaaaaaaaaaaaaaaaaaaaaaaaaaaaaaaaaaaaaaaaaaaaaaaaaaaaaaaaaaaaaaaaaaaaaaaaaaaaaaaaaaaaaaaaaaaaaa

SEQ ID NO: 19913 - RNA, 2052 nt, Artificial Sequence; identical to SEQ ID NO: 19907
  mRNA product Design a-2 (hSL-A100) comprising derived and/or modified sequence from LASV(Pinneo-NIG-1969;Clade I)__AIT17837__SP-HsALB_NP(2-569) (opt4)

SEQ ID NO: 19914 - RNA, 2052 nt, Artificial Sequence
  mRNA product Design a-2 (hSL-A100) comprising derived and/or modified sequence from LASV(ISTH0009-NIG-2011;Clade II)__AIT17405__SP-HsALB_NP(2-569) (opt4)
aggagaguccgcucagccagguugcagaagcggcuuagcguguguccuaaucuucucucugcguguagguaggccugugccgcaaacaagcuuaccaugaagugggugaccuucaucagccugcuguuccuguucagcagcgccuacagcagcgugagcaaggaggugaagagcuuccuguggacccagagccugagaagagagcugagcggcuacugcagcaacaucaagcugcagguggugaaggacgcccaggcccugcugcacggccuggacuucagcgaggugagcaacgugcagagacugaugagaaagcagaagagagacgacagcgaccugaagagacugagagaccugaaccaggccgugaacaaccugguggagcugaagagcacccagcagaagagcauccugagagugggcacccugaccagcgacgaccugcugacccuggccgccgaccuggagaagcugaagagcaaggugaucagaaccgagagaccccugagcagcggcguguacaugggcaaccugagcacccagcagcuggagcagagaagagcccugcugaacaugaucggcauggugggcggcgcccagggcacccagcccggcagagacggcguggugagagugugggacgugaagaaccccgaccugcugaacaaccaguucggcaccaugcccagccugacccuggccugccugaccaagcagggccagguggaccugaacgacgccgugcuggcccugaccgaccugggccugaucuacaccgccaaguaccccaacagcagcgaccuggacagacugagccagagccaccccauccugaacaugguggacaucaagaagagcagccugaacaucagcggcuacaacuucagccugggcgccgccgugaaggccggcgccugcaugcuggacggcggcaacaugcuggagaccaucaaggugaccccccagaccauggacggcauccugaagagcauccugaaggugaagagaagccugggcauguucgugagcgacacccccggcgagagaaaccccuacgagaacauccuguacaagaucugccugagcggcgacggcuggcccuacaucgccagcagaaccagcaucgugggcagagccugggagaacaccaccguggaccuggagagcgacggcaagccccagaaggugggcagcgccggcagcaacaagagccugcagagcgccggcuuccccaccggccugaccuacagccagcugaugacccugaaggacagcaugaugcagcuggaccccagcgccaagaccuggaucgacaucgagggcagacccgaggaccccguggagaucgcccuguaccagcccaugagcggcugcuacauccacuucuucagagagcccaccgaccugaagcaguucaagcaggacgccaaguacagccacggcaucgacguggccgaccuguuccccgcccagcccggccugaccagcgccgugaucgaggcccugcccagaaacauggugcugaccugccagggcagcgacgacaucaagagacugcuggacagccagggcagaagagacaucaagcugaucgacaucgcccugagcaaggccgacagcagaagauucgagaacgccgugugggaccagugcaaggaccugugccacaugcacaccggcguggugguggagaagaagaagagaggcggcaaggaggagaucaccccccacugcgcccugauggacugcaucauguacgacgccgccgugagcggcggccugaacauccccgugcugagagccgugcugcccagagacaugguguucagaaccagcagccccaagguggugcugugaggacuagucccuguucccagagcccacuuuuuuuucuuuuuuugaaauaaaauagccugucuuucagaucucaaaggcucuuuucagagccaccaaaaaaaaaaaaaaaaaaaaaaaaaaaaaaaaaaaaaaaaaaaaaaaaaaaaaaaaaaaaaaaaaaaaaaaaaaaaaaaaaaaaaaaaaaaaaaaaaaaaa

SEQ ID NO: 19915 - RNA, 2052 nt, Artificial Sequence
  mRNA product Design a-2 (hSL-A100) comprising derived and/or modified sequence from LASV(ISTH2010-NIG-2012;Clade II)__AIT17483__SP-HsALB_NP(2-569) (opt4)
aggagaguccgcucagccagguugcagaagcggcuuagcguguguccuaaucuucucucugcguguagguaggccugugccgcaaacaagcuuaccaugaagugggugaccuucaucagccugcuguuccuguucagcagcgccuacagcagcgccagcaaggaggugaagagcuuccuguggacccagagccugagaagagagcugagcggcuacugcagcaacaucaagcugcagguggugaaggacgcccaggcccugcugcacggccuggacuucagcgaggugagcaacgugcagagacugaugagaaagcagaagagagacgacagcgaccugaagagacugagagaccugaaccaggccgugaacaaccugguggagcugaagagcacccagcagaagagcauccugagagugggcacccugaccagcgacgaccugcugacccuggccgccgaccuggagaagcugaagagcaaggugaucagaaccgagagaccccugagcagcggcguguacaugggcaaccugagcacccagcagcuggagcagagaagagcccugcugaaccugaucggcauggugggcggcgcccagggcacccagcccggcagagacggcguggugagagugugggacgugaagaaccccgaccugcugaacaaccaguucggcaccaugcccagccugacccuggccugccugaccaagcagggccagguggaccugaacgacgccgugcuggcccugaccgaccugggccugaucuacaccgccaaguaccccaacagcagcgaccuggacagacugagccagagccaccccauccugaacaugguggacaccaagaagagcagccugaacaucagcggcuucaacuucagccugggcgccgccgugaaggccggcgccugcaugcuggacggcggcaacaugcuggagaccaucaaggugaccccccagaccauggacggcauccugaagagcauccugaaggugaagaagagccugggcauguucgugagcgacacccccggcgagagaaaccccuacgagaacauccuguacaagaucugccugagcggcgacggcuggcccuacaucgccagcagaaccagcaucgugggcagagccugggagaacaccaccguggaccuggagagcgacggcaagccccacaaggugggcaccgccggcagcaacaagagccugcagagcgccggcuuccccaccggccugaccuacagccagcugaugacccugaaggacagcaugaugcagcuggaccccagcgccaagaccuggaucgacaucgagggcagacccgaggaccccguggagaucgcccuguaccagcccaugagcggcugcuacauccacuucuucagagagcccaccgaccugaagcaguucaagcaggacgccaaguacagccacggcaucgacguggccgaccuguuccccgcccagcccggccugaccagcgccgugaucgaggcccugcccagaaacauggugcugaccugccagggcagcgacgacaucaagagacugcuggacagccagggcagaagagacaucaagcugaucgacaucgcccugagcaaggccgacagcagaagauucgagaacgccgugugggaccagugcaaggaccugugccacaugcacaccggcguggugguggagaagaagaagagaggcggcaaggaggagaucaccccccacugcgcccugauggacugcaucauguacgacgccgccgugagcggcggccugaacauccccgugcugagagccgugcugcccagagacaugguguucagaaccagcagccccaagguggugcugugaggacuagucccuguucccagagcccacuuuuuuuucuuuuuuugaaauaaaauagccugucuuucagaucucaaaggcucuuuucagagccaccaaaaaaaaaaaaaaaaaaaaaaaaaaaaaaaaaaaaaaaaaaaaaaaaaaaaaaaaaaaaaaaaaaaaaaaaaaaaaaaaaaaaaaaaaaaaaaaaaaaaa

SEQ ID NO: 19916 - RNA, 2052 nt, Artificial Sequence
  mRNA product Design a-2 (hSL-A100) comprising derived and/or modified sequence from LASV(Lassa virus/H.sapiens-wt/NGA/2015/ISTH_0543;Clade II)__AVO03640__SP-HsALB_NP(2-569) (opt4)
aggagaguccgcucagccagguugcagaagcggcuuagcguguguccuaaucuucucucugcguguagguaggccugugccgcaaacaagcuuaccaugaagugggugaccuucaucagccugcuguuccuguucagcagcgccuacagcagcgccagcaaggaggugaagagcuuccuguggacccagagccugagaagagagcugagcggcuacugcagcaacaucaagcugcagguggugaaggacgcccaggcccugcugcacggccuggacuucagcgaggugagcaacgugcagagacugaugagaaagcagaagagagacgacagcgaccugaagagacugagagaccugaaccaggccgugaacaaccugguggagcugaagagcacccagcagaagagcauccugagagugggcacccugaccagcgacgaccugcugacccuggccgccgaccuggagaagcugaagagcaaggugaucagaaccgagagaccccugagcagcggcguguacaugggcaaccugagcacccagcagcuggagcagagaagagcccugcugaacaugaucggcauggugggcggcgcccagggcacccagcccggcagagacggcguggugagagugugggacgugaagaaccccgaccugcugaacaaccaguucggcaccaugcccagccugacccuggccugccugaccaagcagggccagguggaccugaacgacgccgugcuggcccugaccgaccugggccugaucuacaccgccaaguaccccaacagcagcgaccuggacagacugagccagagccaccccauccugaacaugguggacaccaagaagagcagccugaacaucagcggcuacaacuucagccugggcgccgccgugaaggccggcgccugcaugcuggacggcggcaacaugcuggagaccaucaaggugaccccccagaccauggacggcauccugaagagcauccugaaggugaagaagagccugggcauguucgugagcgacacccccggcgagagaaaccccuacgagaacauccuguacaagaucugccugagcggcgacggcuggcccuacaucgccagcagaaccagcaucgugggcagagccugggagaacaccaccguggaccuggagagcgacggcaagccccagaaggugggcagcgccggcagcaacaagagccugcagagcgccggcuuccccaccggccugaccuacagccagcugaugacccugaaggacagcaugaugcagcuggaccccagcgccaagaccuggaucgacaucgagggcagacccgaggaccccguggagaucgcccuguaccagcccaugagcggcugcuacauccacuucuucagagagcccaccgaccugaagcaguucaagcaggacgccaaguacagccacggcaucgacguggccgaccuguuccccgcccagcccggccugaccagcgccgugaucgaggcccugcccagaaacauggugcugaccugccagggcagcgacgacaucaagagacugcuggacagccagggcagaaaggacaucaagcugaucgacaucgcccugagcaaggccgacagcagaagauucgagaacgccgugugggaccagugcaaggaccugugccacaugcacaccggcguggugguggagaagaagaagagaggcggcaaggaggagaucaccccccacugcgcccugauggacugcaucauguacgacgccgccgugagcggcggccugaacauccccgugcugagagccgugcugcccagagacaugguguucagaaccagcagccccaagguggugcugugaggacuagucccuguucccagagcccacuuuuuuuucuuuuuuugaaauaaaauagccugucuuucagaucucaaaggcucuuuucagagccaccaaaaaaaaaaaaaaaaaaaaaaaaaaaaaaaaaaaaaaaaaaaaaaaaaaaaaaaaaaaaaaaaaaaaaaaaaaaaaaaaaaaaaaaaaaaaaaaaaaaaa

SEQ ID NO: 19917 - RNA, 2052 nt, Artificial Sequence
  mRNA product Design a-2 (hSL-A100) comprising derived and/or modified sequence from LASV(Lassa virus/H.sapiens-wt/NGA/2016/ISTH_0009;Clade II)__AVO03572__SP-HsALB_NP(2-569) (opt4)
aggagaguccgcucagccagguugcagaagcggcuuagcguguguccuaaucuucucucugcguguagguaggccugugccgcaaacaagcuuaccaugaagugggugaccuucaucagccugcuguuccuguucagcagcgccuacagcagcgccagcaaggaggugaagagcuuccuguggacccagagccugagaagagagcugagcggcuacugcagcaacaucaagcugcagguggugaaggacgcccaggcccugcugcacggccuggacuucagcgaggugagcaacgugcagagacugaugagaaagcagaagagagacgacagcgaccugaagagacugagagaccugaaccaggccgugaacaaccugguggagcugaagagcacccagcagaagagcauccugagagugggcacccugaccagcgacgaccugcugacccuggccgccgaccuggagaagcugaagagcaaggugaucagaaccgagagaccccugagcagcggcguguacaugggcaaccugagcacccagcagcuggagcagagaagagcccugcugaacaugaucggcauggugggcggcgcccagggcacccagcccggcagagacggcguggugagagugugggacgugaagaaccccgaccugcugaacaaccaguucggcaccaugcccagccugacccuggccugccugaccaagcagggccagguggaccugaacgacgccgugcuggcccugaccgaccugggccugaucuacaccgccaaguaccccaacagcagcgaccuggacagacugagccagagccaccccauccugaacaugguggacaccaagaagagcagccugaacaucagcggcuacaacuucagccugggcgccgccgugaaggccggcgccugcaugcuggacggcggcaacaugcuggagaccaucaaggugaccccccagaccauggacggcauccugaagagcauccugaaggugaagaagagccugggcauguucgugagcgacacccccggcgagagaaaccccuacgagaacauccuguacaagaucugccugagcggcgacggcuggcccuacaucgccagcagaaccagcaucgugggcagagccugggagaacaccaccguggaccuggagagcgacggcaagccccagaaggugggcagcgccggcagcaacaagagccugcagagcgccggcuuccccaccggccugaccuacagccagcugaugacccugaaggacagcaugaugcagcuggaccccagcgccaagaccuggaucgacaucgagggcagacccgaggaccccguggagaucgcccuguaccagcccaugagcggcugcuacauccacuucuucagagagcccaccgaccugaagcaguucaagcaggacgccaaguacagccacggcaucgacguggccgaccuguuccccgcccagcccggccugaccagcgccgugaucgaggcccugcccagaaacauggugcugaccugccagggcagcgacgacaucaagagacugcuggacagccagggcagaagagacaucaagcugaucgacaucgcccugagcaaggccgacagcagaagauucgagaacgccgugugggaccagugcaaggaccugugccacaugcacaccggcguggugguggagaagaagaagagaggcggcaaggaggagaucaccccccacugcgcccugauggacugcaucauguacgacgccgccgugagcggcggccugaacauccccgugcugagagccgugcugcccagagacaugguguucagaaccagcagccccaagguggugcugugaggacuagucccuguucccagagcccacuuuuuuuucuuuuuuugaaauaaaauagccugucuuucagaucucaaaggcucuuuucagagccaccaaaaaaaaaaaaaaaaaaaaaaaaaaaaaaaaaaaaaaaaaaaaaaaaaaaaaaaaaaaaaaaaaaaaaaaaaaaaaaaaaaaaaaaaaaaaaaaaaaaaa

SEQ ID NO: 19918 - RNA, 2052 nt, Artificial Sequence
  mRNA product Design a-2 (hSL-A100) comprising derived and/or modified sequence from LASV(Lassa virus/H.sapiens-wt/NGA/2016/ISTH_0017;Clade II)__AVO03568__SP-HsALB_NP(2-569) (opt4)
aggagaguccgcucagccagguugcagaagcggcuuagcguguguccuaaucuucucucugcguguagguaggccugugccgcaaacaagcuuaccaugaagugggugaccuucaucagccugcuguuccuguucagcagcgccuacagcagcgccagcaaggaggugaagagcuuccuguggacccagagccugagaagagagcugagcggcuacugcagcagcaucaagcugcagguggugaaggacgcccaggcccugcugcacggccuggacuucagcgaggugagcaacgugcagagacugaugagaaagcagaagagagacgacagcgaccugaagagacugagagaccugaaccaggccgugaacaaccugguggagcugaagagcacccagcagaagagcauccugagagugggcacccugaccagcgacgaccugcugacccuggccgccgaccuggagaagcugaagagcaaggugaucagaaccgagagaccccugagcagcggcguguacaugggcaaccugagcacccagcagcuggagcagagaagagcccugcugaacaugaucggcauggccggcggcgcccagggcacccagcccggcagagacggcguggugagagugugggacgugaagaaccccgaccugcugaacaaccaguucggcaccaugcccagccugacccuggccugccugaccaagcagggccagguggaccugaacgacgccgugcuggcccugaccgaccugggccugaucuacaccgccaaguaccccaacagcagcgaccuggacagacugagccagagccaccccauccugaacaugguggacaccaagaagagcagccugaacaucagcggcuacaacuucagccugggcgccgccgugaaggccggcgccugcaugcuggacggcggcaacaugcuggagaccaucaaggugaccccccagaccauggacggcauccugaagagcauccugaaggugaagagaagccugggcauguucgugagcgacgcccccggcgagagaaaccccuacgagaacauccuguacaagaucugccugagcggcgacggcuggcccuacaucgccagcagaaccagcaucgugggcagagccugggagaacaccaccguggaccuggagagcgacggcaagccccagaaggugggcgccaccggcagcaacaagagccugcagagcgccggcuuccccaccggccugaccuacagccagcugaugacccugaaggacagcaugaugcagcuggaccccagcgccaagaccuggaucgacaucgagggcagacccgaggaccccguggagguggcccuguaccagcccgugagcggcugcuacauccacuucuucagagagcccaccgaccugaagcaguucaagcaggacgccaaguacagccacggcaucgacguggccgaccuguuccccgcccagcccggccugaccagcgccgugaucgaggcccugcccagaaacauggugcugaccugccagggcagcgacgacaucaagaagcugcuggacagccagggcagaaaggacaucaagcugaucgacaucgcccugagcaaggccgacagcagaagauucgagaacgccgugugggaccagugcaaggaccugugccacaugcacaccggcguggugguggagaagaagaagagaggcggcaaggaggagaucaccccccacugcgcccugauggacugcaucauguacgacgccgccgugagcggcggccugaacauccccgugcugagagccgugcugcccagagacaugguguucagaaccagcagccccaagguggugcugugaggacuagucccuguucccagagcccacuuuuuuuucuuuuuuugaaauaaaauagccugucuuucagaucucaaaggcucuuuucagagccaccaaaaaaaaaaaaaaaaaaaaaaaaaaaaaaaaaaaaaaaaaaaaaaaaaaaaaaaaaaaaaaaaaaaaaaaaaaaaaaaaaaaaaaaaaaaaaaaaaaaaa

SEQ ID NO: 19919 - RNA, 2052 nt, Artificial Sequence
  mRNA product Design a-2 (hSL-A100) comprising derived and/or modified sequence from LASV(Lassa virus/H.sapiens-wt/NGA/2018/ISTH_0959;Clade II)__AVV65100__SP-HsALB_NP(2-569) (opt4)
aggagaguccgcucagccagguugcagaagcggcuuagcguguguccuaaucuucucucugcguguagguaggccugugccgcaaacaagcuuaccaugaagugggugaccuucaucagccugcuguuccuguucagcagcgccuacagcagcgccagcaaggaggugaagagcuuccuguggacccagagccugagaagagagcugagcggcuacugcagcaacaucaagcugcagguggugaaggacgcccaggcccugcugcacggccuggacuucagcgaggugagcaacgugcagagacugaugagaaagcagaagagagacgacagcgaccugaagagacugagagaccugaaccaggccgugaacaaccugguggagcugaagagcacccagcagaagagcauccugagagugggcacccugaccagcgacgaccugcugacccuggccgccgaccuggagaagcugaagagcaaggugaucagaaccgagagaccccugagcagcggcguguacaugggcaaccugagcacccagcagcuggagcagagaagagcccugcugaaccugaucggcauggugggcggcgcccagggcacccagcccggcagagacggcguggugagagugugggacgugaagaaccccgaccugcugaacaaccaguucggcaccaugcccagccugacccuggccugccugaccaagcagggccagguggaccugaacgacguggugcuggcccugaccgaccugggccugaucuacaccgccaaguaccccaacagcagcgaccuggacagacugagccagagccaccccauccugaacaugguggacaccaagaagagcagccugaacaucagcggcuucaacuucagccugggcgccgccgugaaggccggcgccugcaugcuggacggcggcaacaugcuggagaccaucaaggugaccccccagaccauggacggcauccugaagagcauccugaaggugaagaagagccugggcauguucgugagcgacacccccggcgagagaaaccccuacgagaacauccuguacaagaucugccugagcggcgacggcuggcccuacaucgccagcagaaccagcaucgugggcagagccugggagaacaccaccguggaccuggagagcgacggcaagccccacaaggugggcaccgccggcagcaacaagagccugcagagcgccggcuuccccaccggccugaccuacagccagcugaugacccugaaggacagcaugaugcagcuggaccccagcgccaagaccuggaucgacaucgagggcagacccgaggaccccguggagaucgcccuguaccagcccaugagcggcugcuacauccacuucuucagagagcccaccgaccugaagcaguucaagcaggacgccaaguacagccacggcaucgacguggccgaccuguuccccgcccagcccggccugaccagcgccgugaucgaggcccugcccagaaacauggugcugaccugccagggcagcgacgacaucaagagacugcuggacagccagggcagaaaggacaucaagcugaucgacaucgcccugagcaagaccgacagcagaagauucgagaacgccgugugggaccagugcaaggaccugugccacaugcacaccggcguggugguggagaagaagaagagaggcggcaaggaggagaucaccccccacugcgcccugauggacugcaucauguacgacgccgccgugagcggcggccugaacauccccgugcugagagccgugcugcccagagacaugguguucagaaccagcagccccaagguggugcugugaggacuagucccuguucccagagcccacuuuuuuuucuuuuuuugaaauaaaauagccugucuuucagaucucaaaggcucuuuucagagccaccaaaaaaaaaaaaaaaaaaaaaaaaaaaaaaaaaaaaaaaaaaaaaaaaaaaaaaaaaaaaaaaaaaaaaaaaaaaaaaaaaaaaaaaaaaaaaaaaaaaaa

SEQ ID NO: 19920 - RNA, 2052 nt, Artificial Sequence
  mRNA product Design a-2 (hSL-A100) comprising derived and/or modified sequence from LASV(LASV003-NIG-2008;Clade II)__AIT17581__SP-HsALB_NP(2-569) (opt4)
aggagaguccgcucagccagguugcagaagcggcuuagcguguguccuaaucuucucucugcguguagguaggccugugccgcaaacaagcuuaccaugaagugggugaccuucaucagccugcuguuccuguucagcagcgccuacagcagcgccagcaaggaggugaagagcuuccuguggacccagagccugagaagagagcugagcggcuacugcagcagcaucaagcugcagguggugaaggacgcccaggcccugcugcacggccuggacuucagcgaggugagcaacgugcagagacugaugagaaagcagaagagagacgacagcgaccugaagagacugagagaccugaaccaggccgugaacaaccugguggagcugaagagcacccagcagaagagcgugcugagagugggcacccugaccagcgacgaccugcugacccuggccgccgaccuggagaagcugaagagcaaggugaucagaaccgagagaccccugagcagcggcguguacaugggcaaccugagcgcccagcagcuggagcagagaagaacccugcugaacaugaucggcauggugggcggcgcccagggcacccagcccggcagagacggcguggugagagugugggacgugaagaaccccgaccugcugaacaaccaguucggcaccaugcccagccugacccuggccugccugaccaagcagggccagguggaccugaacgacguggugcuggcccugaccgaccugggccugaucuacaccgccaaguaccccaacagcagcgaccuggacagacugagccagagccaccccauccugagcaugguggacaccaagaagagcagccugaacaucagcggcuacaacuucagccugggcgccgccgugaaggccggcgccugcaugcuggacggcggcaacaugcuggagaccaucaaggugaccccccagaccauggacggcauccugaagagcauccugaaggugaagaagagccugggcauguucgugagcgacacccccggcgagagaaaccccuacgagaacauccuguacaagaucugccugagcggcgacggcuggcccuacaucgccagcagaaccagcaucgugggcagagccugggagaacaccaccguggaccuggagagcgacggcaagccccagaaggugggcaccgccggcagcaacaagagccugcagagcgccggcuuccccaccggccugaccuacagccagcugaugacccugaaggacagcaugaugcagcuggaccccagcgccaagaccuggaucgacaucgagggcagacccgaggaccccguggagaucgcccuguaccagcccaugagcggcugcuacauccacuucuucagagagcccaccgaccugaagcaguucaagcaggacgccaaguacagccacggcaucgacgugaccgaccuguuccccgcccagcccggccugaccagcgccgugaucgaggcccugcccagaaacauggugcugaccugccagggcagcgacgacaucaagagacugcuggacagccagggcagaagagacaucaagcugaucgacaucgcccugagcaaggccgacagcagaagauucgagaacgccgugugggaccagugcaaggaccugugccacaugcacaccggcguggugguggagaagaagaagagaggcggcaaggaggagaucaccccccacugcgcccugauggacugcaucauguacgacgccgccgugagcggcggccugaacauccccgugcugagagccgugcugcccagagacaugguguucagaaccagcagccccaagguggugcugugaggacuagucccuguucccagagcccacuuuuuuuucuuuuuuugaaauaaaauagccugucuuucagaucucaaaggcucuuuucagagccaccaaaaaaaaaaaaaaaaaaaaaaaaaaaaaaaaaaaaaaaaaaaaaaaaaaaaaaaaaaaaaaaaaaaaaaaaaaaaaaaaaaaaaaaaaaaaaaaaaaaaa

SEQ ID NO: 19921 - RNA, 2052 nt, Artificial Sequence
  mRNA product Design a-2 (hSL-A100) comprising derived and/or modified sequence from LASV(LASV035-NIG-2009;Clade II)__AIT17589__SP-HsALB_NP(2-569) (opt4)
aggagaguccgcucagccagguugcagaagcggcuuagcguguguccuaaucuucucucugcguguagguaggccugugccgcaaacaagcuuaccaugaagugggugaccuucaucagccugcuguuccuguucagcagcgccuacagcagcgccagcaaggaggugaagagcuuccuguggacccagagccugagaagagagcugagcggcuacugcagcagcaucaagcugcagguggugaaggacgcccaggcccugcugcacggccuggacuucagcgaggugagcaacgugcagagacugaugagaaagcagaagagagacgacagcgaccugaagagacugagagaccugaaccaggccgugaacaaccugguggagcugaagagcacccagcagaagagcauccugagagugggcacccugaccagcgacgaccugcugacccuggccgccgaccuggagaagcugaagagcaaggugaucagaaccgagagaccccugagcagcggcguguacaugggcaaccugagcgcccagcagcuggagcagagaagagcccugcugaacaugaucggcauggugggcggcgcccagggcacccagcccggcagagacggcguggugagagugugggacgugaagaaccccgaccugcugaacaaccaguucggcaccaugcccagccugacccuggccugccugaccaagcagggccagguggaccugaacgacgccgugcuggcccugaccgaccugggccugaucuacaccgccaaguaccccaacagcagcgaccuggacagacugagccagagccaccccauccugaacaugguggacaccaagaagagcagccugaacaucagcggcuacaacuucagccugggcgccgccgugaaggccggcgccugcaugcuggacggcggcaacaugcuggagaccaucaaggugaccccccagaccauggacggcauccugaagagcauccugaaggugaagagaagccugggcauguucgugagcgacacccccggcgagagaaaccccuacgagaacauccuguacaagaucugccugagcggcgacggcuggcccuacaucgccagcagaaccagcaucgugggcagagccugggagaacaccaccguggaccuggagagcgacggcaagccccagaaggugggcaccaccggcagcaacaagagccugcagagcgccggcuuccccaccggccugaccuacagccagcugaugacccugaaggacagcaugaugcagcuggaccccagcgccaagaccuggaucgacaucgagggcagacccgaggaccccguggagaucgcccuguaccagcccaugagcggcugcuacauccacuucuucagagagcccaccgaccugaagcaguucaagcaggacgccaaguacagccacggcaucgacguggccgaccuguuccccgcccagcccggccugaccagcgccgugaucgaggcccugcccagaaacauggugcugaccugccagggcagcgacgacaucaagaagcugcuggacagccagggcagaagagacaucaagcugaucgacaucgcccugagcaaggccgacagcagaaaguucgagaacgccgugugggaccagugcaaggaccugugccacaugcacaccggcguggugguggagaagaagaagagaggcggcaaggaggagaucaccccccacugcgcccugauggacugcaucauguacgacgccgccgugagcggcggccugaacauccccgugcugagagccgugcugcccagagacaugguguucagaaccagcagccccaagguggugcugugaggacuagucccuguucccagagcccacuuuuuuuucuuuuuuugaaauaaaauagccugucuuucagaucucaaaggcucuuuucagagccaccaaaaaaaaaaaaaaaaaaaaaaaaaaaaaaaaaaaaaaaaaaaaaaaaaaaaaaaaaaaaaaaaaaaaaaaaaaaaaaaaaaaaaaaaaaaaaaaaaaaaa

SEQ ID NO: 19922 - RNA, 2052 nt, Artificial Sequence
  mRNA product Design a-2 (hSL-A100) comprising derived and/or modified sequence from LASV(LASV1000-NIG-2009;Clade II)__AIT17783__SP-HsALB_NP(2-569) (opt4)
aggagaguccgcucagccagguugcagaagcggcuuagcguguguccuaaucuucucucugcguguagguaggccugugccgcaaacaagcuuaccaugaagugggugaccuucaucagccugcuguuccuguucagcagcgccuacagcagcgccagcaaggaggugaagagcuuccuguggacccagagccugagaagagagcugagcggcuacugcagcaacaucaagcugcagguggugaaggacgcccaggcccugcugcacggccuggacuucagcgaggugagcaacgugcagagacugaugagaaagcagaagagagacgacagcgaccugaagagacugagagaccugaaccaggccgugaacaaccugguggagcugaagagcacccagcagaagagcauccugagagugggcacccugaccagcgacgaccugcugacccuggccgccgaccuggagaagcugaagagcaaggugaucagaaccgagagaccccugagcagcggcguguacaugggcaaccugagcacccagcagcuggagcagagaagagcccugcugaacaugaucggcauggugggcggcgcccagggcacccagcccggcagagacggcguggugagagugugggacgugaagaaccccgaccugcugaacaaccaguucggcaccaugcccagccugacccuggccugccugaccaagcagggccagguggaccugaacgacguggugcuggcccugaccgaccugggccugaucuacaccgccaaguaccccaacagcagcgaccuggacagacugagccagagccaccccauccugaacaugguggacaccaagaagagcagccugaacaucagcggcuacaacuucagccugggcgccgccgugaaggccggcgccugcaugcuggacggcggcaacaugcuggagaccaucaaggugaccccccagaccauggacggcauccugaagagcauccugaaggugaagaagagccugggcauguucgugagcgacacccccggcgagagaaaccccuacgagaacauccuguacaagaucugccugagcggcgacggcuggcccuacaucgccagcagaaccagcaucgugggcagagccugggagaacaccaccguggaccuggagagcgacggcaagccccagaaggugggcaccgccggcagcaacaagagccugcagagcgccggcuuccccaccggccugaccuacagccagcugaugacccugaaggacagcaugaugcagcuggaccccagcgccaagaccuggaucgacaucgagggcagacccgaggaccccguggagaucgcccuguaccagcccgugagcggcugcuacauccacuucuucagagagcccaccgaccugaagcaguucaagcaggacgccaaguacagccacggcaucgacguggccgaccuguuccccgcccagcccggccugaccagcgccgugaucgaggcccugcccagaaacauggugcugaccugccagggcagcgacgacaucaagagacugcuggacagccagggcagaagagacaucaagcugaucgacaucgcccugagcaaggccgacagcagaagauucgagaacgccgugugggaccagugcaaggaccugugccacaugcacaccggcguggugguggagaagaagaagagaggcggcaaggaggagaucaccccccacugcgcccugauggacugcaucauguacgacgccgccgugagcggcggccugaacauccccgugcugagagccgugcugcccagagacaugguguucagaaccagcagccccaagguggugcugugaggacuagucccuguucccagagcccacuuuuuuuucuuuuuuugaaauaaaauagccugucuuucagaucucaaaggcucuuuucagagccaccaaaaaaaaaaaaaaaaaaaaaaaaaaaaaaaaaaaaaaaaaaaaaaaaaaaaaaaaaaaaaaaaaaaaaaaaaaaaaaaaaaaaaaaaaaaaaaaaaaaaa

SEQ ID NO: 19923 - RNA, 2052 nt, Artificial Sequence
  mRNA product Design a-2 (hSL-A100) comprising derived and/or modified sequence from LASV(LASV221-NIG-2010;Clade II)__AIT17625__SP-HsALB_NP(2-569) (opt4)
aggagaguccgcucagccagguugcagaagcggcuuagcguguguccuaaucuucucucugcguguagguaggccugugccgcaaacaagcuuaccaugaagugggugaccuucaucagccugcuguuccuguucagcagcgccuacagcagcgccagcaaggaggugaagagcuuccuguggacccagagccugagaagagagcugagcggcuacugcagcagcaucaagcugcagguggugaaggacgcccaggcccugcugcacggccuggacuucagcgaggugagcaacgugcagagacugaugagaaagcagagaagagacgacagcgaccugaagagacugagagaccugaaccaggccgugaacaaccugguggagcugaagagcacccagcagaagagcauccugagagugggcacccugaccagcgacgaccugcugacccuggccgccgaccuggagaagcugaagagcaaggugaucagaaccgagagaccccugagcagcggcguguacaugggcaaccugagcacccagcagcuggagcagagaagagcccugcugaacaugaucggcauggugggcggcgcccagggcacccagcccggcagagacggcguggugagagugugggacgugaagaaccccgaccugcugaacaaccaguucggcaccaugcccagccugacccuggccugccugaccaagcagggccagguggaccugaacgacgccgugcuggcccugaccgaccugggccugaucuacaccgccaaguaccccaacagcagcgaccuggacagacugagccagagccaccccauccugaacaugguggacaccaagaagagcagccugaacaucagcggcuacaacuucagccugggcgccgccgugaaggccggcgccugcaugcuggacggcggcaacaugcuggagaccaucaaggugaccccccagaccguggacggcauccugaagagcauccugaaggugaagagaagccugggcauguucgugagcgacacccccggcgagagaaaccccuacgagaacauccuguacaagaucugccugagcggcgacggcuggcccuacaucgccagcagaaccagcaucgugggcagagccugggagaacaccaccguggaccuggagagcgacggcaagccccagaaggugggcaccgccggcagcaacaagagccugcagagcgccggcuuccccaccggccugaccuacagccagcugaugacccugaaggacagcaugaugcagcuggaccccagcgccaagaccuggaucgacaucgagggcagacccgaggaccccguggagaucgcccuguaccagcccaugagcggcugcuacauccacuucuucagagagcccaccgaccugaagcaguucaagcaggacgccaaguacagccacggcaucgacguggccgaccuguuccccgcccagcccggccugaccagcgccgugaucgaggcccugcccagaaacauggugcugaccugccagggcagcgacgacaucaagagacugcuggacagccagggcagaagagacaucaagcugaucgacaucgcccugagcaaggccgacagcagaaaguucgagaacgccgugugggaccagugcaaggaccugugccacaugcacaccggcguggugguggagaagaagaagagaggcggcaaggaggagaucaccccccacugcgcccugauggacugcaucauguacgacgccgccgugagcggcggccugaacauccccgugcugagagccgugcugcccagagacaugguguucagaaccagcagccccaagguggugcugugaggacuagucccuguucccagagcccacuuuuuuuucuuuuuuugaaauaaaauagccugucuuucagaucucaaaggcucuuuucagagccaccaaaaaaaaaaaaaaaaaaaaaaaaaaaaaaaaaaaaaaaaaaaaaaaaaaaaaaaaaaaaaaaaaaaaaaaaaaaaaaaaaaaaaaaaaaaaaaaaaaaaa

SEQ ID NO: 19924 - RNA, 2052 nt, Artificial Sequence
  mRNA product Design a-2 (hSL-A100) comprising derived and/or modified sequence from LASV(LASV237-NIG-2010;Clade II)__AIT17639__SP-HsALB_NP(2-569) (opt4)
aggagaguccgcucagccagguugcagaagcggcuuagcguguguccuaaucuucucucugcguguagguaggccugugccgcaaacaagcuuaccaugaagugggugaccuucaucagccugcuguuccuguucagcagcgccuacagcagcgccagcaaggaggugaagagcuuccuguggacccagagccugagaagagagcugagcggcuacugcagcaacaucaagcugcagguggugaaggacgcccaggcccugcugcacggccuggacuucagcgaggugagcaacgugcagagacugaugagaaagcagaagagagacgacagcgaccugaagagacugagagaccugaaccaggccgugaacaaccugguggagcugaagagcacccagcagaagagcauccugagagugggcacccugaccagcgacgaccugcugacccuggccgccgaccuggagaagcugaagagcaaggugaucagaaccgagagaccccugagcagcggcguguacaugggcaaccugagcacccagcagcuggagcagagaagagcccugcugaacaugaucggcauggugggcggcgcccagggcacccagcccggcagagacggcguggugagagugugggacgugaagaaccccgaccugcugaacaaccaguucggcaccaugcccagccugacccuggccugccugaccaagcagggccagguggaccugaacgacgccgugcuggcccugaccgaccugggccugaucuacaccgccaaguaccccaacagcagcgaccuggacagacugagccagagccaccccauccugaacaugguggacaucaagaagagcagccugaacaucagcggcuacaacuucagccugggcgccgccgugaaggccggcgccugcaugcuggacggcggcaacaugcuggagaccaucaaggugaccccccagaccauggacggcauccugaagagcauccugaaggugaagagaagccugggcauguucgugagcgacacccccggcgagagaaaccccuacgagaacauccuguacaagaucugccugagcggcgacggcuggcccuacaucgccagcagaaccagcaucgugggcagagccugggagaacaccaccguggaccuggagagcgacggcaagccccagaaggugggcagcgccggcagcaacaagagccugcagagcgccggcuuccccaccggccugaccuacagccagcugaugacccugaaggacagcaugaugcagcuggaccccagcgccaagaccuggaucgacaucgagggcagacccgaggaccccguggagaucgcccuguaccagcccaugagcggcugcuacauccacuucuucagagagcccaccgaccugaagcaguucaagcaggacgccaaguacagccacggcaucgacguggccgaccuguuccccgcccagcccggccugaccagcgccgugaucgaggcccugcccagaaacauggugcugaccugccagggcagcgacgacaucaagagacugcuggacagccagggcagaagagacaucaagcugaucgacaucgcccugagcaaggccgacagcagaagauucgagaacgccgugugggaccagugcaaggaccugugccacaugcacaccggcguggugguggagaagaagaagagaggcggcaaggaggagaucaccccccacugcgcccugauggacugcaucauguacgacgccgccgugagcggcggccugaacauccccgugcugagagccgugcugcccagagacaugguguucagaaccagcagccccaagguggugcugugaggacuagucccuguucccagagcccacuuuuuuuucuuuuuuugaaauaaaauagccugucuuucagaucucaaaggcucuuuucagagccaccaaaaaaaaaaaaaaaaaaaaaaaaaaaaaaaaaaaaaaaaaaaaaaaaaaaaaaaaaaaaaaaaaaaaaaaaaaaaaaaaaaaaaaaaaaaaaaaaaaaaa

SEQ ID NO: 19925 - RNA, 2052 nt, Artificial Sequence
  mRNA product Design a-2 (hSL-A100) comprising derived and/or modified sequence from LASV(LASV253-NIG-2011;Clade II)__AIT17671__SP-HsALB_NP(2-569) (opt4)
aggagaguccgcucagccagguugcagaagcggcuuagcguguguccuaaucuucucucugcguguagguaggccugugccgcaaacaagcuuaccaugaagugggugaccuucaucagccugcuguuccuguucagcagcgccuacagcagcgccagcaaggaggugaagagcuuccuguggacccagagccugagaagagagcugagcggcuacugcagcagcaucaagcugcagguggugaaggacgcccaggcccugcugcacggccuggacuucagcgaggugagcaacgugcagagacugaugagaaagcagaagagagacgacagcgaccugaagagacugagagaccugaaccaggccgugaacaaccugguggagcugaagagcacccagcagaagagcgugcugagagugggcacccugaccagcgacgaccugcugacccuggccgccgaccuggagaagcugaagagcaaggugaucagaaccgagagaccccugagcagcggcguguacaugggcaaccugagcacccagcagcuggagcagagaagagcccugcugaacaugaucggcauggugggcggcgcccagggcacccagcccggcagagacggcguggugagagugugggacgugaagaaccccgaccugcugaacaaccaguucggcaccaugcccagccugacccuggccugccugaccaagcagggccagguggaccugaacgacguggugcuggcccugaccgaccugggccugaucuacaccgccaaguaccccaacagcagcgaccuggacagacugagccagagccaccccauccugaacaugguggacaccaagaagagcagccugaacaucagcggcuacaacuucagccugggcgccgccgugaaggccggcgccugcaugcuggacggcggcaacaugcuggagaccaucaaggugaccccccagaccauggacggcauccugaagagcauccugaaggugaagaagagccugggcauguucgugagcgacacccccggcgagagaaaccccuacgagaacauccuguacaagaucugccugagcggcgacggcuggcccuacaucgccagcagaaccagcaucgugggcagagccugggagaacaccaccguggaccuggagagcgacggcaagccccagaaggugggcaccgccggcagcaacaagagccugcagagcgccggcuuccccaccggccugaccuacagccagcugaugacccugaaggacagcaugaugcagcuggaccccagcgccaagaccuggaucgacaucgagggcagacccgaggaccccguggagaucgcccuguaccagcccaugagcggcugcuacauccacuucuucagagagcccaccgaccugaagcaguucaagcaggacgccaaguacagccacggcaucgacgugaccgaccuguuccccgcccagcccggccugaccagcgccgugaucgaggcccugcccagaaacauggugcugaccugccagggcagcgacgacaucaagagacugcuggacagccagggcagaagagacaucaagcugaucgacaucgcccugagcaaggccgacagcagaagauucgagaacgccgugugggaccagugcaaggaccugugccacaugcacaccggcguggugguggagaagaagaagagaggcggcaaggaggagaucaccccccacugcgcccugauggacugcaucauguacgacgccgccgugagcggcggccugaacauccccgugcugagagccgugcugcccagagacaugguguucagaaccagcagccccaagguggugcugugaggacuagucccuguucccagagcccacuuuuuuuucuuuuuuugaaauaaaauagccugucuuucagaucucaaaggcucuuuucagagccaccaaaaaaaaaaaaaaaaaaaaaaaaaaaaaaaaaaaaaaaaaaaaaaaaaaaaaaaaaaaaaaaaaaaaaaaaaaaaaaaaaaaaaaaaaaaaaaaaaaaaa

SEQ ID NO: 19926 - RNA, 2052 nt, Artificial Sequence
  mRNA product Design a-2 (hSL-A100) comprising derived and/or modified sequence from LASV(LASV254-NIG-2011;Clade II)__AIT17675__SP-HsALB_NP(2-569) (opt4)
aggagaguccgcucagccagguugcagaagcggcuuagcguguguccuaaucuucucucugcguguagguaggccugugccgcaaacaagcuuaccaugaagugggugaccuucaucagccugcuguuccuguucagcagcgccuacagcagcgccagcaaggaggugaagagcuuccuguggacccagagccugagaagagagcugagcggcuacugcagcagcaucaagcugcagguggugaaggacgcccaggcccugcugcacggccuggacuucagcgaggugagcaacgugcagagacugaugagaaagcagaagagagacgacagcgaccugaagagacugagagaccugaaccaggccgugaacaaccugguggagcugaagagcacccagcagaagagcgugcugagagugggcacccugaccagcgacgaccugcugacccuggccgccgaccuggagaagcugaagagcaaggugaucagaaccgagagaccccugagcagcggcguguacaugggcaaccugagcacccagcagcuggagcagagaagagcccugcugaacaugaucggcauggugggcggcgcccagggcacccagcccggcagagacggcguggugagagugugggacgugaagaaccccgaccugcugaacaaccaguucggcaccaugcccagccugacccuggccugccugaccaagcagggccagguggaccugaacgacgccgugcuggcccugaccgaccugggccugaucuacaccgccaaguaccccaacagcagcgaccuggacagacugagccagagccaccccauccugaacaugguggacaccaagaagagcagccugaacaucagcggcuacaacuucagccugggcgccgccgugaaggccggcgccugcaugcuggacggcggcaacaugcuggagaccaucaaggugaccccccagaccauggacggcauccugaagagcauccugaaggugaagaagagccugggcauguucgugagcgacacccccggcgagagaaaccccuacgagaacauccuguacaagaucugccugagcggcgacggcuggcccuacaucgccagcagaaccagcaucgugggcagagccugggagaacaccaucguggaccuggagagcgacggcaagccccagaaggugggcaccgccggcagcaacaagagccugcagagcgccggcuuccccaccggccugaccuacagccagcugaugacccugaaggacagcaugaugcagcuggaccccagcgccaagaccuggaucgacaucgagggcagacccgaggaccccguggagaucgcccuguaccagcccaugagcggcugcuacauccacuucuucagagagcccaccgaccugaagcaguucaagcaggacgccaaguacagccacggcaucgacguggccgaccuguuccccgcccagcccggccugaccagcgccgugaucgaggcccugcccagaaacauggugcugaccugccagggcagcgacgacaucaagagacugcuggacagccagggcagaagagacaucaagcugaucgacaucgcccugagcaaggccgacagcagaagauucgagaacgccgugugggaccagugcaaggaccugugccacaugcacaccggcguggugguggagaagaagaagagaggcggcaaggaggagaucaccccccacugcgcccugauggacugcaucauguacgacgccgccgugagcggcggccugaacauccccgugcugagagccgugcugcccagagacaugguguucagaaccagcagccccaagguggugcugugaggacuagucccuguucccagagcccacuuuuuuuucuuuuuuugaaauaaaauagccugucuuucagaucucaaaggcucuuuucagagccaccaaaaaaaaaaaaaaaaaaaaaaaaaaaaaaaaaaaaaaaaaaaaaaaaaaaaaaaaaaaaaaaaaaaaaaaaaaaaaaaaaaaaaaaaaaaaaaaaaaaaa

SEQ ID NO: 19927 - RNA, 2052 nt, Artificial Sequence
  mRNA product Design a-2 (hSL-A100) comprising derived and/or modified sequence from LASV(Nig08-04;Clade II)__ADU56611__SP-HsALB_NP(2-569) (opt4)
aggagaguccgcucagccagguugcagaagcggcuuagcguguguccuaaucuucucucugcguguagguaggccugugccgcaaacaagcuuaccaugaagugggugaccuucaucagccugcuguuccuguucagcagcgccuacagcagcgccagcaaggaggugaagagcuuccuguggacccagagccugagaagagagcugagcggcuacugcagcaacaucaagcugcagguggugaaggacgcccaggcccugcugcacggccuggacuucagcgaggugagcaacgugcagagacugaugagaaagcagaagagagacgacggcgaccugaagagacugagagaccugaaccaggccgugaacaaccugguggagcugaagagcacccagcagaagagcgugcugagagugggcacccugaccagcgacgaccugcugacccuggccgccgaccuggagaagcugaagagcaaggugaucagaaccgagagaccccugagcagcggcguguacaugggcaaccugagcacccagcagcuggagcagagaaaggcccugcugagcaugaucggcauggugggcggcgcccagggcacccagcccggcagagacggcguggugagagugugggacgugaagaaccccgaccugcugaacaaccaguucggcaccaugcccagccugacccuggccugccugaccaagcagggccagguggaccugaacgacgccgugcuggcccugaccgaccugggccugaucuacaccgccaaguaccccaacagcagcgaccuggacagacugagccagagccaccccauccugaacaugguggacaccaagaagagcagccugaacaucagcggcuacaacuucagccugggcgccgccgugaaggccggcgccugcaugcuggacggcggcaacaugcuggagaccaucaaggugaccccccagaccauggacggcauccugaagagcauccugaaggugaagagaagccugggcauguucgugagcgacacccccggcgagagaaaccccuacgagaacauccuguacaagaucugccugagcggcgacggcuggcccuacaucgccagcagaaccagcaucgugggcagagccugggagaacaccaccguggaccuggagagcgacggcaagccccagaaggugggcaccgccggcagcaacaagagccugcagagcgccggcuuccccaccggccugaccuacagccagcugaugacccugaaggacagcaugaugcagcuggaccccagcgccaagaccuggaucgacaucgagggcagacccgaggaccccguggagaucgcccuguaccagcccaugagcggcugcuacauccacuucuucagagagcccaccgaccugaagcaguucaagcaggacgccaaguacagccacggcaucgacgugaccgaccuguucagcgcccagcccggccugaccagcgccgugaucgaggcccugcccagaaacauggugcugaccugccagggcagcgacgacaucaagaagcugcuggacagccagggcagaagagacaucaagcugaucgacaucagccugaacaaggccgacagcagaagauucgagaacgccgugugggaccagugcaaggaccugugccacaugcacaccggcguggugguggagaagaagaagagaggcggcaaggaggagaucaccccccacugcgcccugauggacugcaucauguucgacgccgccgugagcggcggccugaacauccccauccugagagccgugcugcccagagacaugguguucagaaccagcagccccaagguggugcugugaggacuagucccuguucccagagcccacuuuuuuuucuuuuuuugaaauaaaauagccugucuuucagaucucaaaggcucuuuucagagccaccaaaaaaaaaaaaaaaaaaaaaaaaaaaaaaaaaaaaaaaaaaaaaaaaaaaaaaaaaaaaaaaaaaaaaaaaaaaaaaaaaaaaaaaaaaaaaaaaaaaaa

SEQ ID NO: 19928 - RNA, 2055 nt, Artificial Sequence
  mRNA product Design a-2 (hSL-A100) comprising derived and/or modified sequence from LASV(GA391;Clade III)__AAA46284__SP-HsALB_NP(2-570) (opt4)
aggagaguccgcucagccagguugcagaagcggcuuagcguguguccuaaucuucucucugcguguagguaggccugugccgcaaacaagcuuaccaugaagugggugaccuucaucagccugcuguuccuguucagcagcgccuacagcagcgccagcaaggaggugagaagcugccuguggacccagagccugagaagagagcugagcggcuacugcagcaacaucaagcugcagguggugaaggacgcccaggcccugcugcacggccuggacuucagcgaggugagcaacgugcagagacugaugagaaagcagaagagagacgacggcgaccugaagagacugagagaccugaaccaggccgugaacaaccugguggagcugaagagcacccagcagaagagcgugcugagagugggcacccugagcagcgacgaccugcugauccuggccgccgaccuggagaagcugaagagcaaggugaccagaaccgagagaccccugagcagcggcguguacaugggcaaccugagcagccagcagcuggaccagagaagagcccugcugaacaugaucggcaugaccggcgugagcggcggcggcaagggcgccagcaacggcaucgugagagugugggacgugaagaacgccgagcugcugaacaaccaguucggcaccaugcccagccugacccuggccugccugaccaagcagggccagguggaccugaacgacgccgugcaggcccugaccgaccugggccugaucuacaccgccaaguaccccaacagcagcgaccuggacagacugagccagagccaccccauccugaacaugaucgacaccaagaagagcagccugaacaucagcggcuacaacuucagccugggcgccgccgugaaggccggcgccugcaugcuggacggcggcaacaugcuggagaccaucaaggugagcccccagaccauggacggcauccugaagagcauccugaaggugaagaagagccugggcauguucgugagcgacacccccggcgagagaaaccccuacgagaacauccuguacaagaucugccugagcggcgacggcuggagcuacaucgccagcagaaccagcaucgugggcagagccugggagaacaccgugguggaccuggagcaggacaacaagccccagaagaucggcaacggcggcagcaacaagagccugcagagcgccggcuucgccgccggccugaucuacagccagcugaugacccugaaggacuucaagugcuucaaccugauccccaacgccaagaccuggauggacaucgagggcagacccgaggaccccguggagaucgcccuguaccagcccagcagcggcugcuacgugcacuucuucagagagcccaccgaccugaagcaguucaagcaggacgccaaguacagccacggcagagacgugaccgaccuguucgccgcccagcccggccugaccagcgccgugaucgaggcccugcccagaaacauggugaucaccugccagggcagcgaggacaucagaaagcugcuggagagccagggcagaagagacaucaagcugaucgacaucacccugagcaaggccgacagcagaaaguucgagaacgccgugugggaccaguucaaggaccugugccacaugcacaccggcguggugguggagaagaagaagagaggcggcaaggaggagaucaccccccacugcgcccugauggacugcaucauguucgacgccgccgugagcggcggccuggacgccaaggugcugagaguggugcugcccagagacaugguguucagaaccagcacccccaagguggugcugugaggacuagucccuguucccagagcccacuuuuuuuucuuuuuuugaaauaaaauagccugucuuucagaucucaaaggcucuuuucagagccaccaaaaaaaaaaaaaaaaaaaaaaaaaaaaaaaaaaaaaaaaaaaaaaaaaaaaaaaaaaaaaaaaaaaaaaaaaaaaaaaaaaaaaaaaaaaaaaaaaaaaa

SEQ ID NO: 19929 - RNA, 2052 nt, Artificial Sequence
  mRNA product Design a-2 (hSL-A100) comprising derived and/or modified sequence from LASV(Nig08-A19;Clade III)__ADU56619__SP-HsALB_NP(2-569) (opt4)
aggagaguccgcucagccagguugcagaagcggcuuagcguguguccuaaucuucucucugcguguagguaggccugugccgcaaacaagcuuaccaugaagugggugaccuucaucagccugcuguuccuguucagcagcgccuacagcagcgccagcaaggaggugaagagcuuccuguggacccagagccugagaagagagcugagcggcuacugcagcaacaucaagcugcagguggugaaggacgcccaggcccugcugcacggccuggacuucagcgaggugagcaacgugcagagacugaugagaaagcagaagagagacgacggcgaccugaagagacugagagaccugaaccaggccgugaacaaccugguggagcugaagagcacccagcagaagagcgugcugagagugggcacccugagcagcgacgaccugcuggugcuggccgccgaccuggagaagcugaagagcaagguggugagaaccgagagaccccugagcagcggcaucuacaugggcaaccugagcagccagcagcuggaccagagaaaggcccugcugaacaugaucggcaugaccggcggcaacggcggcagaaacaccaccagcgacggcaucgugagagugugggacgugaagaacgccgagcugcugaacaaccaguucggcaccaugcccagccugacccuggccugccugaccaagcagggccagguggaccugaacgacgccgugcaggcccugaccgaccugggccugaucuacaccgccaaguaccccaacagcagcgaccuggacagacuggcccagagccaccccauccugaacaugaucgacaccaagaagagcagccugaacaucagcggcuacaacuucagccugggcgccgccgugaaggccggcgccugcaugcuggacggcggcaacaugcuggagaccaucaaggugagcccccagaccauggacggcauccugaagagcauccugaaggugaagagaagccugggcauguucaucagcgacacccccggcgagagaaaccccuacgagaacauccuguacaagaucugccugagcggcgacggcuggcccuacaucgccagcagaaccagcaucgugggcagagccugggagaacaccgugguggaccuggagagcgacaacaagccccagaagaccggcaacggcggcagcaacaagagccugcagagcgccggcuucgccgccggccugaccuacagccagcugaugacccugaaggacagcaugcugcagcuggaccccaacgccaagaccuggauggacaucgagggcagacccgaggaccccguggagaucgcccuguaccagcccagcagcggcugcuacauccacuucuucagagagcccaccgaccugaagcaguucaagcaggacgccaaguacagccacggcaucgacgugaccgaccuguucgccgcccagcccggccugaccagcgccgugaucgaggcccugcccagaaacauggugaucaccugccagggcagcgaggacaucagaaagcugcuggagagccagggcagaagagacaucaagcugaucgacaucagccugagcaagguggacagcagaaaguucgagaacgccgugugggaccaguucaaggaccugugccacaugcacaccggcaucgugguggagaagaagaagagaggcggcaaggaggagaucaccccccacugcgcccugauggacugcaucauguucgacgccgccgugagcggcggcguggacgccaaggugcugagagccgugcugcccagagacaugguguucagaaccagcacccccaagguggugcugugaggacuagucccuguucccagagcccacuuuuuuuucuuuuuuugaaauaaaauagccugucuuucagaucucaaaggcucuuuucagagccaccaaaaaaaaaaaaaaaaaaaaaaaaaaaaaaaaaaaaaaaaaaaaaaaaaaaaaaaaaaaaaaaaaaaaaaaaaaaaaaaaaaaaaaaaaaaaaaaaaaaaa

SEQ ID NO: 19930 - RNA, 2052 nt, Artificial Sequence
  mRNA product Design a-2 (hSL-A100) comprising derived and/or modified sequence from LASV(G1180-SLE-2010;Clade IV)__AIT17169__SP-HsALB_NP(2-569) (opt4)
aggagaguccgcucagccagguugcagaagcggcuuagcguguguccuaaucuucucucugcguguagguaggccugugccgcaaacaagcuuaccaugaagugggugaccuucaucagccugcuguuccuguucagcagcgccuacagcagcgccagcaaggagaucaagagcuuccuguggacccagagccugagaagagagcugagcggcuacugcagcaacaucaagcugcagguggugaaggacgcccaggcccugcugcacggccuggacuucagcgaggugagcaacgugcagagacugaugagaaaggagagaagagacgacaacgaccugaagagacugagagaccugaaccaggccgugaacaaccugguggagcugaagagcacccagcagaagagcauccugagagugggcacccugaccagcgacgaccugcugauccuggccgccgaccuggagaagcugaagagcaaggugaucagaaccgagagaccccugagcgccggcguguacaugggcaaccugagcagccagcagcuggaccagagaagagcccugcugagcaugaucggcaugagcagcggcaaccagagagcccaggccggcagagacggcguggugagagugugggacgugaagaacguggagcugcugaacaaccaguucggcaccaugcccagccugacccuggccugccugaccaagcagggccagguggaccugaacgacgccgugcaggcccugaccgaccugggccugaucuacaccgccaaguaccccaacaccagcgaccuggacagacugacccagagccaccccauccugaacaugaucgacaccaagaagagcagccugaacaucagcggcuacaacuucagccugggcgccgccgugaaggccggcgccugcaugcuggacggcggcaacaugcuggagaccaucaaggugagcccccagaccauggacggcauccugaagagcauccugaaggugaagaaggcccugggcauguucaucagcgacacccccggcgagagaaaccccuacgagaacauccuguacaagaucugccugagcggcgacggcuggcccuacaucgccagcagaaccagcaucaccggcagagccugggagaacaccgugguggaccuggagagcgacggcaagccccagaaggccggcagcaacaacagcaacaagagccugcagagcgugggcuucaccgccggccugaccuacagccagcugaugacccugaaggacgccaugcugcagcuggaccccaacgccaagaccuggauggacaucgagggcagacccgaggaccccguggagaucgcccuguaccagcccagcagcggcugcuacauccacuucuucagagagcccaccgaccugaagcaguucaagcaggacgccaaguacagccacggcaucgacgugaccgaccuguucgccgcccagcccggccugaccagcgccgugaucgacgcccugcccagaaacauggugaucaccugccagggcagcgacgacaucagaaagcugcuggagagccagggcagaaaggacaucaagcugaucgacaucgcccugagcaagaccgacagcagaaaguacgagaacgccgugugggaccaguacaaggaccugugccacaugcacaccggcguggugguggagaagaagaagagaggcggcaaggaggagaucaccccccacugcgcccugauggacugcaucauguucgacgccgccgugagcggcggccugaacaccagcgugcugagagccgugcugcccagagacaugguguucagaaccagcacccccagaguggugcugugaggacuagucccuguucccagagcccacuuuuuuuucuuuuuuugaaauaaaauagccugucuuucagaucucaaaggcucuuuucagagccaccaaaaaaaaaaaaaaaaaaaaaaaaaaaaaaaaaaaaaaaaaaaaaaaaaaaaaaaaaaaaaaaaaaaaaaaaaaaaaaaaaaaaaaaaaaaaaaaaaaaaa

SEQ ID NO: 19931 - RNA, 2052 nt, Artificial Sequence
  mRNA product Design a-2 (hSL-A100) comprising derived and/or modified sequence from LASV(G1442-SLE-2011;Clade IV)__AIT17181__SP-HsALB_NP(2-569) (opt4)
aggagaguccgcucagccagguugcagaagcggcuuagcguguguccuaaucuucucucugcguguagguaggccugugccgcaaacaagcuuaccaugaagugggugaccuucaucagccugcuguuccuguucagcagcgccuacagcagcgccagcaaggaggugaagagcuuccuguggacccagagccugagaagagagcugagcggcuacugcagcaacaucaagcugcagguggugaaggacgcccaggcccugcugcacggccuggacuucagcgaggugagcaacgugcagagacugaugagaaagcagagaagagacgacaacgaccugaagagacugagagaccugaaccaggccgugaacaaccugguggagcugaagagcacccagcagaagagcgugcugagagugggcacccugaccagcgacgaccugcuggugcuggccgccgaccuggagaagcugaagagcaaggugaucagaaccgagagaccccugagcgccggcguguacaugggcaaccugagcagccagcagcuggaccagagaagagcccugcugaacaugaucggcaugagcggcggcauccagggcaccagaaccggcagagacggcguggugagagugugggacgugaagaacgccgaccugcugaacaaccaguucggcaccaugcccagccugacccuggccugccugaccaagcagggccagguggaccugaacgacguggugcaggcccugaccgaccugggccugaucuacaccgccaaguaccccaacgccagcgaccuggacagacugacccagagccaccccauccugaacaugaucgacaccaagaagagcagccugaacaucagcggcuacaacuucagccugggcgccgccgugaaggccggcgccugcaugcuggacggcggcaacaugcuggagaccaucaaggugagcccccagaccauggacggcauccugaagagcauccugaaggugaagaagacccugggcauguucaucagcgacacccccggcgagagaaaccccuacgagaacauccuguacaagaucugccugagcggcgacggcuggcccuacaucgccagcagaaccagcaucaccggcagagccugggagaacaccgugguggaccuggagagcgacggcaagccccagaaggccggcagcaacaacagcaacaagagccugcagagcgccggcuucgccgccggccugaccuacagccagcugaugacccugaaggacgccaugcugcagcuggaccccaacgccaagaccuggauggacaucgagggcagacccgaggaccccguggagaucgcccuguaccagcccagcagcggcugcuacauccacuucuucagagagcccaccgaccugaagcaguucaagcaggacgccaaguacagccacggcaucgacgugaccgaccuguucgccgcccagcccggccugaccagcgccgugaucgaggcccugcccagaaacauggugaucaccugccagggcagcgacgacaucaagaagcugcuggagagccagggcagaaaggacaucaagcugaucgacaucgcccugagcaagaccgacagcagaaaguacgagaacgccgugugggaccaguacaaggaccugugccacaugcacaccggcguggugguggagaagaagaagagaggcggcaaggaggagaucaccccccacugcgcccugauggacugcaucauguucgacgccgccgugagcggcggccugaacacccuggugcugagagccgugcugcccagagacaugguguucagaaccagcacccccagaguggugcugugaggacuagucccuguucccagagcccacuuuuuuuucuuuuuuugaaauaaaauagccugucuuucagaucucaaaggcucuuuucagagccaccaaaaaaaaaaaaaaaaaaaaaaaaaaaaaaaaaaaaaaaaaaaaaaaaaaaaaaaaaaaaaaaaaaaaaaaaaaaaaaaaaaaaaaaaaaaaaaaaaaaaa

SEQ ID NO: 19932 - RNA, 2052 nt, Artificial Sequence
  mRNA product Design a-2 (hSL-A100) comprising derived and/or modified sequence from LASV(G3010-SLE-2013;Clade IV)__AIT17345__SP-HsALB_NP(2-569) (opt4)
aggagaguccgcucagccagguugcagaagcggcuuagcguguguccuaaucuucucucugcguguagguaggccugugccgcaaacaagcuuaccaugaagugggugaccuucaucagccugcuguuccuguucagcagcgccuacagcagcgccagcaaggagaucaagagcuuccuguggacccagagccugagaagagagcugagcggcuacugcagcaacaucaagcugcagguggugaaggacgcccaggcccugcugcacggccuggacuucagcgaggugagcaacgugcagagacugaugagaaaggagagaagagacgacaacgaccugaagagacugagagaccugaaccaggccgugaacaaccugguggagcugaagagcacccagcagaagagcauccugagagugggcacccugaccagcgacgaccugcugauccuggccgccgaccuggagaagcugaagagcaaggugaccagaaccgagagaccccugagcgccggcguguacaugggcaaccugagcagccagcagcuggaccagagaagagcccugcugagcaugaucggcaugagcagcggcgugcagggcgccagagccggcagagacggcguggugagagugugggacgugaagaacgccgagcugcugaacaaccaguucggcaccaugcccagccugacccuggccugccugaccaagcagggccagguggaccugaacgacguggugcaggcccugaccgaccugggccugaucuacaccgccaaguaccccaacaccagcgaccuggacagacugacccagagccaccccauccugaacaugaucgacaccaagaagagcagccugaacaucagcggcuacaacuucagccugggcgccgccgugaaggccggcgccugcaugcuggacggcggcaacaugcuggagaccaucaaggugagcccccagaccauggacggcauccugaagagcauccugaaggugaagaaggcccugggcauguucaucagcgagacccccggcgagagaaaccccuacgagaacauccuguacaagaucugccugagcggcgacggcuggcccuacaucgccagcagaaccagcaucaccggcagagccugggagaacaccgugguggaccuggagagcgacggcaagccccagaaggccggcagcaacaacagcaacaagagccugcagagcgccggcuucaccgccggccugaccuacagccagcugaugacccugaaggacgccaugcugcagcuggaccccaacgccaagaccuggauggacaucgagggcagacccgaggaccccguggagguggcccuguaccagcccagcagcggcugcuacauccacuucuucagagagcccaccgaccugaagcaguucaagcaggacgccaaguacagccacggcaucgacgugaccgaccuguucgccgcccagcccggccugaccagcgccgugaucgacgcccugcccagaaacauggugaucaccugccagggcagcgacgacaucaagaagcugcuggagagccagggcagaaaggacaucaagcugaucgacaucgcccugagcaagaccgacagcagaaaguacgagaacgccgugugggaccaguacaaggaccugugccacaugcacaccggcguggugguggagaagaagaagagaggcggcaaggaggagaucaccccccacugcgcccugauggacugcaucauguucgacgccgccgugagcggcggccugaacaccagcgugcugagagccgugcugcccagagacaugguguucagaaccagcacccccagaguggugcugugaggacuagucccuguucccagagcccacuuuuuuuucuuuuuuugaaauaaaauagccugucuuucagaucucaaaggcucuuuucagagccaccaaaaaaaaaaaaaaaaaaaaaaaaaaaaaaaaaaaaaaaaaaaaaaaaaaaaaaaaaaaaaaaaaaaaaaaaaaaaaaaaaaaaaaaaaaaaaaaaaaaaa

SEQ ID NO: 19933 - RNA, 2052 nt, Artificial Sequence
  mRNA product Design a-2 (hSL-A100) comprising derived and/or modified sequence from LASV(G502-SLE-2009;Clade IV)__AIT17127__SP-HsALB_NP(2-569) (opt4)
aggagaguccgcucagccagguugcagaagcggcuuagcguguguccuaaucuucucucugcguguagguaggccugugccgcaaacaagcuuaccaugaagugggugaccuucaucagccugcuguuccuguucagcagcgccuacagcagcgccagcaaggagaucaagagcuuccuguggacccagagccugagaagagagcugagcggcuacugcagcaacaucaagcugcagguggugaaggacgcccaggcccugcugcacggccuggacuucagcgaggugagcaacgugcagagacugaugagaaaggagagaagagacgacaacgaccugaagagacugagagaccugaaccaggccgugaacaaccugguggagcugaagagcacccagcagaagagcauccugagagugggcacccugaccagcgacgaccugcugauccuggccgccgaccuggagaagcugaagagcaaggugaucagaaccgagagaccccugagcgccggcguguacaugggcaaccugagcagccagcagcuggaccagagaagagcccugcugagcaugaucggcaugagcggcggcaaccagggcgugagagccggcaaggacggcguggugagagugugggacgugaagaacgccgagcugcugaacaaccaguucggcaccaugcccagccugacccuggccugccugaccaagcagggccagguggaccugaacgacgccgugcaggcccugaccgaccugggccugaucuacaccgccaaguaccccaacaccagcgaccuggacagacugacccagagccaccccauccugaacaugaucgacaccaagaagagcagccugaacaucagcggcuacaacuucagccugggcgccgccgugaaggccggcgccugcaugcuggacggcggcaacaugcuggagaccaucaaggugagcccccagaccauggacggcauccugaagagcauccugaaggugaagaaggcccugggcauguucaucagcgacacccccggcgagagaaaccccuacgagaacauccuguacaagaucugccugagcggcgacggcuggcccuacaucgccagcagaaccagcaucaccggcagagccugggagaacaccgugguggaccuggagagcgacggcaagccccagaaggccggcagcaacaacagcaacaagagccugcagagcgccggcuucaccgccggccugaccuacagccagcugaugacccugaaggacgccaugcugcagcuggaccccaacaccaagaccuggauggacaucgagggcagacccgaggaccccguggagaucgcccuguaccagcccagcagcggcugcuacauccacuucuucagagagcccaccgaccugaagcaguucaagcaggacgccaaguacagccacggcaucgacgugaccgaccuguucgccgcccagcccggccugaccagcgccgugaucgacgcccugcccagaaacauggugaucaccugccagggcagcgacgacaucagaaagcugcuggagagccagggcagaaaggacaucaagcugaucgacaucgcccugaacaagaccgacagcagaaaguacgagaacgccgugugggaccaguacaaggaccugugccacaugcacaccggcguggugguggagaagaagaagagaggcggcaaggaggagaucaccccccacugcgcccugauggacugcaucauguucgacgccgccgugagcggcggccugaacaccagcgugcugagagccgugcugcccagagacaugguguucagaaccagcacccccagaguggugcugugaggacuagucccuguucccagagcccacuuuuuuuucuuuuuuugaaauaaaauagccugucuuucagaucucaaaggcucuuuucagagccaccaaaaaaaaaaaaaaaaaaaaaaaaaaaaaaaaaaaaaaaaaaaaaaaaaaaaaaaaaaaaaaaaaaaaaaaaaaaaaaaaaaaaaaaaaaaaaaaaaaaaa

SEQ ID NO: 19934 - RNA, 2052 nt, Artificial Sequence
  mRNA product Design a-2 (hSL-A100) comprising derived and/or modified sequence from LASV(G733-SLE-2010;Clade IV)__AIT17155__SP-HsALB_NP(2-569) (opt4)
aggagaguccgcucagccagguugcagaagcggcuuagcguguguccuaaucuucucucugcguguagguaggccugugccgcaaacaagcuuaccaugaagugggugaccuucaucagccugcuguuccuguucagcagcgccuacagcagcgccagcaaggagaucaagagcuuccuguggacccagagccugagaagagagcugagcggcuacugcagcaacaucaagcugcagguggugaaggacgcccaggcccugcugcacggccuggacuucagcgaggugagcaacgugcagagacugaugagaaaggagagaagagacgacaacgaccugaagagacugagagaccugaaccaggccgugaacaaccugguggagcugaagagcacccagcagaagagcgugcugagagugggcacccugaccagcgacgagcugcuggugcuggccgccgaccuggagaagcugaagagcaaggugaucagaaccgagagaccccugagcgccggcguguacaugggcaaccugagcagccagcagcuggaccagagaagagcccugcugagcaugaucggcaugagcggcggcaaccagggcgccagaaccggcagagacggcguggugagagugugggacgugaagaacgccgagcugcugaacaaccaguucggcaccaugcccagccugacccuggccugccugaccaagcagggccagguggaccugaacgacgccgugcaggcccugaccgaccugggccugaucuacaccgccaaguaccccaacaccagcgaccuggacagacugacccagagccaccccauccugaacaugaucgacaccaagaagagcagccugaacaucagcggcuacaacuucagccugggcgccgccgugaaggccggcgccugcaugcuggacggcggcaacaugcuggagaccaucaaggugagcccccagaccauggacggcauccugaagagcauccugaaggugaagaaggcccugggcauguucaucagcgacacccccggcgagagaaaccccuacgagaacauccuguacaagaucugccugagcggcgacggcuggcccuacaucgccagcagaaccagcaucaccggcagagccugggagaacaccgugguggaccuggagagcgacggcaagccccagaaggccggcagcaacaacagcaacaagagccugcagagcgccggcuucaccgccggccugaccuacagccagcugaugacccugaaggacgccaugcugcagcuggaccccaacgccaagaccuggauggacaucgagggcagacccgaggaccccguggagaucgcccuguaccagcccagcagcggcugcuacauccacuucuucagagagcccaccgaccugaagcaguucaagcaggacgccaaguacagccacggcaucgacgugaccgaccuguucgccgcccagcccggccugaccagcgccgugaucgacgcccugcccagaaacauggugaucaccugccagggcagcgacgacaucagaaagcugcuggagagccagggcagaaaggacaucaagcugaucgacaucgcccugagcaagaucgacagcagaaaguacgagaacgccgugugggaccaguacaaggaccugugccacaugcacaccggcguggugguggagaagaagaagagaggcggcaaggaggagaucaccccccacugcgcccugauggacugcaucauguucgacgccgccgugagcggcggccugaacagccuggugcugagagccgugcugcccagagacaugguguucagaaccagcacccccagaguggugcugugaggacuagucccuguucccagagcccacuuuuuuuucuuuuuuugaaauaaaauagccugucuuucagaucucaaaggcucuuuucagagccaccaaaaaaaaaaaaaaaaaaaaaaaaaaaaaaaaaaaaaaaaaaaaaaaaaaaaaaaaaaaaaaaaaaaaaaaaaaaaaaaaaaaaaaaaaaaaaaaaaaaaa

SEQ ID NO: 19935 - RNA, 2052 nt, Artificial Sequence
  mRNA product Design a-2 (hSL-A100) comprising derived and/or modified sequence from MOPV/LASV reassortant(IGS-1;Clade IV)__AFY05578__SP-HsALB_NP(2-569) (opt4)
aggagaguccgcucagccagguugcagaagcggcuuagcguguguccuaaucuucucucugcguguagguaggccugugccgcaaacaagcuuaccaugaagugggugaccuucaucagccugcuguuccuguucagcagcgccuacagcagcgccagcaaggagaucaagagcuuccuguggacccagagccugagaagagagcugagcggcuacugcagcaacaucaagcugcagguggugaaggacgcccaggcccugcugcacggccuggacuucagcgaggugagcaacgugcagagacugaugagaaaggagagaagagacgacaacgaccugaagagacugagagaccugaaccaggccgugaacaaccugguggagcugaagagcacccagcagaagagcauccugagagugggcacccugaccagcgacgaccugcugauccuggccgccgaccuggagaagcugagaagcaaggugaucagaaccgagagaccccugagcgccggcguguacaugggcaaccugagcagccagcagcuggaccagagaagagcccugcugaacaugaucggcaugagcggcggcaaccagggcgccagagccggcagagacggcguggugagagugugggacgugaagaacgccgagcugcugagcaaccaguucggcaccaugcccagccugacccuggccugccugaccaagcagggccagguggaccugaacgacgccgugcaggcccugaccgaccugggccugaucuacaccgccaaguaccccaacaccagcgaccuggacagacugacccagagccaccccauccugaacaugaucgacaccaagaagagcagccugaacaucagcggcuacaacuucagccugggcgccgccgugaaggccggcgccugcaugcuggacggcggcaacaugcuggagaccaucaaggugagcccccagaccauggacggcauccugaagagcauccugaaggugaagaaggcccugggcauguucaucagcgacacccccggcgagagaaaccccuacgagaacauccuguacaagaucugccugagcggcgacggcuggcccuacaucgccagcagaaccagcaucaccggcagagccugggagaacaccgugguggaccuggagagcgacggcaagccccagaaggccgacagcaacaacagcagcaagagccugcagagcgccggcuucaccgccggccugaccuacagccagcugaugacccugaaggacgccaugcugcagcuggaccccaacgccaagaccuggauggacaucgagggcagacccgaggaccccguggagaucgcccuguaccagcccagcagcggcugcuacauccacuucuucagagagcccaccgaccugaagcaguucaagcaggacgccaaguacagccacggcaucgacgugaccgaccuguucgccacccagcccggccugaccagcgccgugaucgacgcccugcccagaaacauggugaucaccugccagggcagcgacgacaucagaaagcugcuggagagccagggcagaaaggacaucaagcugaucgacaucgaccugagcaagaccgacagcagaaaguacgagaacgccgugugggaccaguacaaggaccugugccacaugcacaccggcguggugguggagaagaagaagagaggcggcaaggaggagaucaccccccacugcgcccugauggacugcaucauguucgacgccgccgugagcggcggccugaacaccagcgugcugagagccgugcugcccagagacaugguguucagaaccagcacccccagaguggugcugugaggacuagucccuguucccagagcccacuuuuuuuucuuuuuuugaaauaaaauagccugucuuucagaucucaaaggcucuuuucagagccaccaaaaaaaaaaaaaaaaaaaaaaaaaaaaaaaaaaaaaaaaaaaaaaaaaaaaaaaaaaaaaaaaaaaaaaaaaaaaaaaaaaaaaaaaaaaaaaaaaaaaa

SEQ ID NO: 19936 - RNA, 2052 nt, Artificial Sequence
  mRNA product Design a-2 (hSL-A100) comprising derived and/or modified sequence from LASV(LM765-SLE-2012;Clade IV)__AIT17815__SP-HsALB_NP(2-569) (opt4)
aggagaguccgcucagccagguugcagaagcggcuuagcguguguccuaaucuucucucugcguguagguaggccugugccgcaaacaagcuuaccaugaagugggugaccuucaucagccugcuguuccuguucagcagcgccuacagcagcgccagcaaggagaucaagagcuuccuguggacccagagccugagaagagagcugagcggcuacugcagcaacaucaagcugcagguggugaaggacgcccaggcccugcugcacggccuggacuucagcgaggugagcaacgugcagagacugaugagaaaggagagaagagacgacaacgaccugaagagacugagagaccugaaccaggccgugaacaaccugguggagcugaagagcacccagcagaagagcauccugagagugggcacccugaccagcgacgaccugcugauccuggccgccgaccuggagaagcugaagagcaaggugaccagaaccgagagaccccugagcgccggcguguacaugggcaaccugagcagccagcagcuggaccagagaagagcccugcuggacaugaucggcaugagcggcagcaaccagggcgccagagccggcagagacggcguggugagagugugggacgugaagaacgccgagcugcugaacaaccaguucggcaccaugcccagccugacccuggccugccugaccaagcagggccagguggaccugaacgacgccgugcaggcccugaccgaccugggccugaucuacaccgccaaguaccccaacaccagcgaccuggacagacugacccagagccaccccauccugaacaugaucgacaccaagaagagcagccugaacaucagcggcuacaacuucagccugggcgccgccgugaaggccggcgccugcaugcuggacggcggcaacaugcuggagaccaucaaggugagcccccagaccauggacggcauccugaagagcauccugaaggugaagaaggcccugggcauguucaucagcgacgcccccggcgagagaaaccccuacgagaacauccuguacaagaucugccugagcggcgacggcuggcccuacaucgccagcagaaccagcaucaccggcagagccugggagaacaccgugguggaccuggagagcgacggcaagccccagaaggccggcagcaacggcagcaacaagagccugcagagcgccggcuucaccgccggccugaccuacagccagcugaugacccugaaggacgccaugcugcagcuggaccccaacgccaagaccuggauggacaucgagggcagacccgaggaccccguggagaucgcccuguaccagcccagcagcggcugcuacauccacuucuucagagagcccaccgaccugaagcaguucaagcaggacgccaaguacagccacggcaucgacgugaccgaccuguucgccgcccagcccggccugaccagcgccgugaucgacgcccugcccagaaacauggugaucaccugccagggcagcgacgacaucagaaagcuguucgagagccagggcagaaaggacaucaagcugaucgacaucgcccugagcaagaccgacagcagaaaguacgagaacgccgugugggaccaguacaaggaccugugccacaugcacaccggcaucgugguggagaagaagaagagaggcggcaaggaggagaucaccccccacugcgcccugauggacugcaucauguucgacgccgccgugagcggcggccugaacaccagcgugcugagagccgugcugcccagagacaugguguucagaaccagcacccccagaguggugcugugaggacuagucccuguucccagagcccacuuuuuuuucuuuuuuugaaauaaaauagccugucuuucagaucucaaaggcucuuuucagagccaccaaaaaaaaaaaaaaaaaaaaaaaaaaaaaaaaaaaaaaaaaaaaaaaaaaaaaaaaaaaaaaaaaaaaaaaaaaaaaaaaaaaaaaaaaaaaaaaaaaaaa

SEQ ID NO: 19937 - RNA, 2052 nt, Artificial Sequence
  mRNA product Design a-2 (hSL-A100) comprising derived and/or modified sequence from LASV(LM776-SLE-2012;Clade IV)__AIT17825__SP-HsALB_NP(2-569) (opt4)
aggagaguccgcucagccagguugcagaagcggcuuagcguguguccuaaucuucucucugcguguagguaggccugugccgcaaacaagcuuaccaugaagugggugaccuucaucagccugcuguuccuguucagcagcgccuacagcagcgccagcaaggagaucaagagcuuccuguggacccagagccugagaagagagcugagcagcuacugcagcaacaucaagcugcagguggugaaggacgcccaggcccugcugcacggccuggacuucagcgaggugagcaacgugcagagacugaugagaaaggagagaagagacgacaacgaccugaagagacugagagaccugaaccaggccgugaacaaccugguggagcugaagagcacccagcagaagagcauccugagagugggcacccugaccagcgacgaccugcugauccuggccgccgaccuggagaagcugaagagcaaggugaccagaaccgagagaccccugagcgccggcguguacaugggcaaccugagcagccagcagcuggaccagagaagagcccugcugagcaugaucggcaugagcggcagcaaccagggcgccagagccggcagagacggcguggugagagugugggacgugaagaacgccgagcugcugaacaaccaguucggcaccaugcccagccugacccuggccugccugaccaagcagggccagguggaccugaacgacgccgugcaggcccugaccgaccugggccugaucuacaccgccaaguaccccaacaccagcgaccuggacagacugacccagagccaccccauccugaacaugaucgacaccaagaagagcagccugaacaucagcggcuacaacuucagccugggcgccgccgugaaggccggcgccugcaugcuggacggcggcaacaugcuggagaccaucaaggugagcccccagaccauggacggcauccugaagagcauccugaaggugaagaaggcccugggcauguucaucagcgacacccccggcgagagaaaccccuacgagaacauccuguacaagaucugccugagcggcgacggcuggcccuacaucgccagcagaaccagcaucaccggcagagccugggagaacaccgugguggaccuggagagcgacggcaagccccagaaggccggcagcaacaacagcaacaagagccugcagagcgccggcuucaccgccggccugaccuacagccagcugaugacccugaaggacgccaugcugcagcuggaccccaacgccaagaccuggauggacaucgagggcagacccgaggaccccguggagguggcccuguaccagcccagcagcggcugcuacauccacuucuucagagagcccaccgaccugaagcaguucaagcaggacgccaaguacagccacggcaucgacgugaccgaccuguucgccgcccagcccggccugaccagcgccgugaucgacgcccugcccagaaacauggugaucaccugccagggcagcgacgacaucagaaagcugcuggagagccagggcagaaaggacaucaagcugaucgacaucgcccugagcaagaccgacagcagaaaguacgagaacgccgugugggaccaguacaaggaccugugccacaugcacaccggcguggugguggagaagaagaagagaggcggcaaggaggagaucaccccccacugcgcccugauggacugcaucauguucgacgccgccgugagcggcggccugaacaccagcgugcugagagccgugcugcccagagacaugguguucagaaccagcacccccagaguggugcugugaggacuagucccuguucccagagcccacuuuuuuuucuuuuuuugaaauaaaauagccugucuuucagaucucaaaggcucuuuucagagccaccaaaaaaaaaaaaaaaaaaaaaaaaaaaaaaaaaaaaaaaaaaaaaaaaaaaaaaaaaaaaaaaaaaaaaaaaaaaaaaaaaaaaaaaaaaaaaaaaaaaaa

SEQ ID NO: 19938 - RNA, 2052 nt, Artificial Sequence
  mRNA product Design a-2 (hSL-A100) comprising derived and/or modified sequence from LASV(Mad39;Clade IV)__ANH09723__SP-HsALB_NP(2-569) (opt4)
aggagaguccgcucagccagguugcagaagcggcuuagcguguguccuaaucuucucucugcguguagguaggccugugccgcaaacaagcuuaccaugaagugggugaccuucaucagccugcuguuccuguucagcagcgccuacagcagcgccagcaaggagaucaagagcuuccuguggacccagagccugagaagagagcugagcggcuacugcagcaacaucaagcugcagguggugaaggacgcccaggcccugcugcacggccuggacuucagcgaggugagcaacgugcagagacugaugagaaagcagagaagagacgacaacgaccugaagagacugagagaccugaaccaggccgugaacaaccugguggagcugaagagcacccagcagaagagcgugcugagagugggcacccugaccagcgacgaccugcugacccuggccgccgaccuggagaagcugaagagcaaggugaccagaaccgagagaccccugaccgccggcguguacaugggcaaccugagcagccagcagcuggaccagagaagagcccugcugaacaugaucggcaugagcggcggcaaccagggcgccagaaccggcagagacggcguggugagagugugggacgugaagaacgccgagcugcugaacaaccaguucggcaccaugcccagccugacccuggccugccugaccaagcagggccagguggaccugaacgacguggugcaggcccugaccgaccugggccugaucuacaccgccaaguaccccaacaccagcgaccuggacagacugacccagagccaccccauccugaacaugaucgacaccaacaagagcagccugaacaucagcggcuacaacuucagccugggcgccgccgugaaggccggcgccugcaugcuggacggcggcaacaugcuggagaccaucaaggugagcccccagaccauggacggcauccugaagagcauccugaaggugaagaagagccugggcauguucaucagcgacacccccggcgagagaaaccccuacgagaacauccuguacaagaucugccugagcggcgacggcuggcccuacaucgccagcagaaccagcaucaccggcagagccugggagaacaccgugguggaccuggagagcggcggcaagccccagaaggccggcagcaacaacagcaacaagagccugcagagcgccggcuucgccgccggccugaccuacagccagcugaugacccugaaggacgccaugcugcagcuggaccccaacgccaagaccuggauggacaucgagggcagacccgaggaccccguggagaucgcccuguaccagcccaucagcggcugcuacauccacuucuucagagagcccaccgaccugaagcaguucaagcaggacgccaaguacagccacggcaucgacgugaccgaccuguucgccgcccagcccggccugaccagcgccgugaucgaggcccugcccagaaacauggugaucaccugccagggcagcgacgacaucagaaagcuguucgagagccagggcagaaaggacaucaagcugaucgacaucgcccugagcaagaccgacagcagaaaguacgagaacgccgugugggaccaguacaaggaccugugccacaugcacaccggcguggugguggagaagaagaagaagggcggcaaggaggagaucaccccccacugcgcccugauggacugcaucauguucgacgccgccgugagcggcggccugaacacccuggugcugagagccgugcugcccagagacaugguguucagaaccagcacccccaagguggugcugugaggacuagucccuguucccagagcccacuuuuuuuucuuuuuuugaaauaaaauagccugucuuucagaucucaaaggcucuuuucagagccaccaaaaaaaaaaaaaaaaaaaaaaaaaaaaaaaaaaaaaaaaaaaaaaaaaaaaaaaaaaaaaaaaaaaaaaaaaaaaaaaaaaaaaaaaaaaaaaaaaaaaa

SEQ ID NO: 19939 - RNA, 2052 nt, Artificial Sequence
  mRNA product Design a-2 (hSL-A100) comprising derived and/or modified sequence from LASV(Z0947-SLE-2011;Clade IV)__AIT17841__SP-HsALB_NP(2-569) (opt4)
aggagaguccgcucagccagguugcagaagcggcuuagcguguguccuaaucuucucucugcguguagguaggccugugccgcaaacaagcuuaccaugaagugggugaccuucaucagccugcuguuccuguucagcagcgccuacagcagcgccagcaaggagaucaagagcuuccuguggacccagagccugagaagagagcugagcggcuacugcagcaacaucaagcugcagguggugaaggacgcccaggcccugcugcacggccuggacuucagcgaggugagcaacgugcagagacugaugagaaaggagagaagagacgacaacgaccugaagagacugagagaccugaaccaggccgugaacaaccugguggagcugaagagcacccagcagaagagcauccugagagugggcacccugaccagcgacgaccugcugauccuggccgccgaccuggagaagcugaagagcaaggugaccagaaccgagagaccccugagcgccggcguguacaugggcaaccugagcagccagcagcuggaccagagaagagcccugcugaacaugaucggcaugagcggcagcaaccagggcgccagaaccggcagagacggcguggugagagugugggacgugaagaacgccgagcugcugaacaaccaguucggcaccaugcccagccugacccuggccugccugaccaagcagggccagguggaccugaacgacgccgugcaggcccugaccgaccugggccugaucuacaccgccaaguaccccaacaccagcgaccuggacagacugacccagagccaccccauccugaacaugaucgacaccaagaagagcagccugaacaucagcggcuacaacuucagccugggcgccgccgugaaggccggcgccugcaugcuggacggcggcaacaugcuggagaccaucaaggugagcccccagaccauggacggcauccugaagagcauccugaaggugaagaaggcccugggcauguucaucagcgacgcccccggcgagagaaaccccuacgagaacauccuguacaagaucugccugagcggcgacggcuggcccuacaucgccagcagaaccagcaucaccggcagagccugggagaacaccgugguggaccuggagagcgacggcaagccccagaaggccggcagcaacggcagcaacaagagccugcagagcgccggcuucaccgccggccugaccuacagccagcugaugacccugaaggacgccaugcugcagcuggaccccaacgccaagaccuggauggacaucgagggcagacccgaggaccccguggagaucgcccuguaccagcccagcagcggcugcuacauccacuucuucagagagcccaccgaccugaagcaguucaagcaggacgccaaguacagccacggcaucgacgugaccgaccuguucgccgcccagcccggccugaccagcgccgugaucgacgcccugcccagaaacauggugaucaccugccagggcagcgacgacaucagaaagcuguucgagagccagggcagaaaggacaucaagcugaucgacaucgcccugagcaagaccgacagcagaaaguacgagaacgccgugugggaccaguacaaggaccugugccacaugcacaccggcaucgugguggagaagaagaagagaggcggcaaggaggagaucaccccccacugcgcccugauggacugcaucauguucgacgccgccgugagcggcggccugaacaccagcgugcugagagccgugcugcccagagacaugguguucagaaccagcacccccagaguggugcugugaggacuagucccuguucccagagcccacuuuuuuuucuuuuuuugaaauaaaauagccugucuuucagaucucaaaggcucuuuucagagccaccaaaaaaaaaaaaaaaaaaaaaaaaaaaaaaaaaaaaaaaaaaaaaaaaaaaaaaaaaaaaaaaaaaaaaaaaaaaaaaaaaaaaaaaaaaaaaaaaaaaaa

SEQ ID NO: 19940 - RNA, 2052 nt, Artificial Sequence
  mRNA product Design a-2 (hSL-A100) comprising derived and/or modified sequence from LASV(Josiah;Clade IV)__NP_694869__SP-HsALB_NP(2-569) (opt5)
aggagaguccgcucagccagguugcagaagcggcuuagcguguguccuaaucuucucucugcguguagguaggccugugccgcaaacaagcuuaccaugaagugggugaccuucaucagccugcucuuucuguucuccucugccuacagcagcgccuccaaggagaucaaaucuuuccuguggacccagagccucagacgggaacuguccggcuacugcucuaacauuaagcugcaaguggucaaagacgcucaggcccugcuccacgggcuggauuuuagcgagguuuccaaugugcagcgccuuaugagaaaggaacggcgcgacgauaacgaccugaaaagacuccgggaucugaaucaggcggugaacaaucuggucgagcucaagucuacacaacaaaagagcauccugcgcgugggaacgcuuaccuccgacgaucugcucauucuggcugccgaccuugaaaaacuuaagagcaaaguuaucagaacagagcggccccucucugccggcguguauauggggaaccuguccagccagcagcuggaucagcgcagagcucuccugaauaugauuggaaugucuggcgggaaccagggagcccgggcuggccgcgacggcgucgugagaguuugggaugugaagaaugccgagcuucugaacaaucaguucgggaccaugccuucccucacacuggcgugucuuaccaaacagggacaagucgaccugaacgaugccgugcaggcucucacagaccugggccugaucuacaccgccaaguauccgaauacgagcgaccucgaucggcugacccagucucaucccauccuuaacaugauugacacaaagaaauccagccugaauaucuccggguacaacuuuucucucggagcugccgugaaggcgggcgccugcaugcuggaugggggaaacaugcuugaaaccauuaaagucagcccucaaacaauggacggcauccugaaguccauucucaaaguuaagaaagcucugggcauguucaucagcgauacccccggggagcgcaauccuuaugaaaacauucuguacaagaucugucucucuggagacggcuggcccuauaucgccuccagaacgagcauuacagggcgggcuugggagaauaccgugguggaucuggagucugacggaaagccucagaaagccgauagcaacaauuccucuaagagccuucaguccgccggcuuuacagcugggcugaccuacagccagcucaugacccugaaagacgcgaugcugcaacuugauccgaacgccaagacauggauggacaucgaaggaagacccgaggacccugucgaaauugcucucuaccagcccucuuccggcugcuauauccacuucuuucgcgagccuacggaucugaaacaguucaagcaggacgccaaguacagccauggcauugaugugaccgaccuguuugccacacaacccgggcucaccucugcuguuaucgaugcccugccgcggaauauggugaucacaugucagggauccgacgauauuagaaaacuucuggaaagccagggccgcaaggacaucaaacucauugauaucgcgcuguccaagaccgacucucggaaauaugagaacgcugucugggaucaguacaaggaccugugccacaugcauacgggggugguuguggagaagaaaaagagaggaggcaaagaagagauuacaccucacugugcccuuauggauugcaucauguucgacgccgcugucagcgggggccucaauaccuccgugcugcgcgccguccugccccgggacaugguguuuagaaccucuacaccucgcguugugcucugaggacuagucccuguucccagagcccacuuuuuuuucuuuuuuugaaauaaaauagccugucuuucagaucucaaaggcucuuuucagagccaccaaaaaaaaaaaaaaaaaaaaaaaaaaaaaaaaaaaaaaaaaaaaaaaaaaaaaaaaaaaaaaaaaaaaaaaaaaaaaaaaaaaaaaaaaaaaaaaaaaaaa

SEQ ID NO: 19941 - RNA, 2052 nt, Artificial Sequence
  mRNA product Design a-2 (hSL-A100) comprising derived and/or modified sequence from LASV(LP;Clade I)__AAF86702__SP-HsALB_NP(2-569) (opt5)
aggagaguccgcucagccagguugcagaagcggcuuagcguguguccuaaucuucucucugcguguagguaggccugugccgcaaacaagcuuaccaugaagugggugaccuucaucagccugcucuuucuguucuccucugccuacagcagcaacuccaaggagaucaaaucuuuccuguggacccagagccucagacgggaacuguccggcuacugcucuaauauuaagcuccaaguggucaaagacgcccaggcucugcuccacgggcuggauuuuagcgagguuuccaacgugcagcgccuuaugagaaagcagaaacgggacgaugccgaccugaagcgccucagagaucugaaucaagcggugaacaaucuggucgaacucaagucuacacagcagaaaaacgugcugcggguuggaacgcuuagcuccgacgaucugaucacccucgcugccgaccuggagaaacuuaaaagcaaggugauucgcacagaaagaccccugucuuccggcgucuauauggggaaucucagcucucagcaacuggaucagcggcgcgcccugcucuccaugaucggaaugagcggcgggccucagggaaacagaaccggcggcgacggggugguucgggugugggaugucaaaaaugcugagcugcuuaacaaucaguucggaacaaugccgucucugacccucgccugucugacaaagcaaggccagguggaccuuaacgaugcugugcaggcccugaccgaccucgggcugauuuacacggcgaaguaucccaauuccagcgaccuggauaugcucacccaaucccauccuauccugggaauggucgacacaaagaagucuagccuuaacaucuccggcuacaauuuuagccugggggccgcuguuaaagccggagcuugcaugcucgauggcggcaacaugcuggagaccauuaaggugucuccccagacaauggacgggauccuuaaauccauucugaaggugaaacgcagccucggaauguucaucucugauaccccuggcgaaagaaaccccuaugagaauauucuguacaagaucugucugagcggggaaggauggccuuauauugccucccggacgucuaucacaggccgcgcgugggagaacacccucgucgaccuggagagcgauaauaagccgcccaaacuuaacuccgccgggagcaauaagucucugcaggcugccggacucaacgcuggccugacauacucccagcugaugacccuuaaagacugcaugcuccaacuggauccuagcucuaagaccuggaucgacauugaaggcagacccgaggauccuguggaaaucgcccuguuucagcccuccagcggguguuacauucacuucuuucgggagccgacagaccucaaacaguucaagcaggacgccaaguauucccauggaaucgauguuacggaccuguuuucuacccaaccuggccuuacaagcgcugugauugaagcgcugcccagaaauaugguccuuaccugccagggguccgaugacaucaaaaagcugcuggagucucagggacgccgggauaucaaacuuauugacaucagccucuccaaggccgauagcagaaaauucgagaacgcugugugggaccaguacaaggaucugugucacaugcauacaggcguuguggucgaaaagaaaaagcgcgggggcaaagaggaaauuaccccucacugcgcccugcucgacuguaucauguuugaugccgcuacgacaggaucucugaauauuaccacccuucgggccgugcugcccagagacauggucuuccgcacauccacccccaaggugguucucugaggacuagucccuguucccagagcccacuuuuuuuucuuuuuuugaaauaaaauagccugucuuucagaucucaaaggcucuuuucagagccaccaaaaaaaaaaaaaaaaaaaaaaaaaaaaaaaaaaaaaaaaaaaaaaaaaaaaaaaaaaaaaaaaaaaaaaaaaaaaaaaaaaaaaaaaaaaaaaaaaaaaa

SEQ ID NO: 19942 - RNA, 2052 nt, Artificial Sequence
  mRNA product Design a-2 (hSL-A100) comprising derived and/or modified sequence from LASV(803213;Clade II)__AAF86704__SP-HsALB_NP(2-569) (opt5)
aggagaguccgcucagccagguugcagaagcggcuuagcguguguccuaaucuucucucugcguguagguaggccugugccgcaaacaagcuuaccaugaagugggugaccuucaucagccugcucuuucuguucuccucugccuacagcagcgccuccaaggaggugaaaucuuuccuguggacccagagccucagacgggaacuguccggcuacugcucuaacaucaaacuucaagucguuaaggacgcucaggcccugcuccacgggcuggauuuuagcgaggugaauaacgugcagcgccuuaugagaaagcagaaacgggacgauggagaccugaagcgccucagagaucugaaucaagcggucaacaaucugguggaacucaaguccacacagcagaaaucuauucugcggguuggcacgcuuaccagcgacgaucugcucacacuggcugccgaccuugagaagcugaaauccaaggugauccgcaccgaaagaccccucagcucuggggucuauaugggaaaccuguccacacagcaacuggagcagcggcgcgcccuccugaauaugauuggcauggugggaggagcucagggcacccagccuggcagagaugggguugugcgggucugggacgugaaaaacccggaucuucugaauaaccaauucggaacaaugcccagccucacccuggccugucuuacgaagcagggccagguggaccugaaugaugcuguccucgcccugaccgaccuggggcucaucuacacagcgaaguauccuaacucuuccgaccuggaucgccuuagccaaucucaucccauucugaauaugguugacaccaaaaaguccagccucaacaucuccggauacaauuuuucucugggcgccgcugugaaagccggggcuugcaugcuugauggaggcaacaugcuggagacaaucaaggugaccccucagacgauggacggcauucucaaaagcauccugaaggucaaaagaucccuggggauguucgugagcgauacacccggagaacggaacccuuaugagaauauucucuacaagaucugucugucuggcgacggguggccguauauugccucccgcaccagcaucguugggagagcgugggaaaacacaaccguggaucuugagucugacggcaagccccagaaagucgggaccgccggaagcaauaagucccugcagucugcuggcuuuccuacaggccucacguacagccaacugaugacccugaaagauuccaugaugcagcuugaccccagcgccaagacauggauugauaucgaggggcggccugaagaccccguggagaucgcucucuaccagccgaugucuggaugcuauauucacuucuuuagagaaccuaccgaccugaaacaguucaagcaagaugccaaguacucccauggcaucgacguugccgaucuguuucccgcucagccugggcucacaagcgcggugauugaggcccugccccgcaacaugguccuuaccugucagggaucugacgauaucaaaaagcugcucgacucccagggccggagagauauuaaacugaucgacaucagccuguccaagguggauucucgcaaauucgaaaaugcugucugggaccaaugcaaggaucuuugucacaugcauacgggggugguuguggagaagaaaaagcggggcggaaaagaggaaauuacaccccacugcgcccucauggacuguaucauguuugaugccgcugucagcggcgggcugaacauuccugugcugagagccguucucccgcgcgacaugguguuccggaccuccucucccaaggucgugcugugaggacuagucccuguucccagagcccacuuuuuuuucuuuuuuugaaauaaaauagccugucuuucagaucucaaaggcucuuuucagagccaccaaaaaaaaaaaaaaaaaaaaaaaaaaaaaaaaaaaaaaaaaaaaaaaaaaaaaaaaaaaaaaaaaaaaaaaaaaaaaaaaaaaaaaaaaaaaaaaaaaaaa

SEQ ID NO: 19943 - RNA, 2055 nt, Artificial Sequence
  mRNA product Design a-2 (hSL-A100) comprising derived and/or modified sequence from LASV(GA391;Clade III)__CAA36646__SP-HsALB_NP(2-570) (opt5)
aggagaguccgcucagccagguugcagaagcggcuuagcguguguccuaaucuucucucugcguguagguaggccugugccgcaaacaagcuuaccaugaagugggugaccuucaucagccugcucuuucuguucuccucugccuacagcagcgccuccaaggaggugagaucuuuccuguggacccagagccuccggcgcgaacuguccggcuacugcucuaacaucaaacuucaagucguuaaggacgcucaggcccugcuccacgggcuggauuuuagcgagguguccaaugugcagagacuuaugcggaaacagaagcgcgacgauggagaccugaaaagacuccgggaucugaaccaagcggucaauaaccugguggaacucaagucuacacagcagaaaagcguucugcgcgugggcacgcuuuccagcgacgaucugcucauucuggcugccgaccuugagaaacugaagucuaaagucaccagaacagaacggccccucuccagcgggguguauaugggaaaucugucuucccagcaacuggaucagcgcagagcccuccugaacaugaucggcaugaccgggguuagcggaggcggcaagggggcuucugacggaauugugcgggucugggaugugaaaaaugccgagcuucugaacaaucaguucggcacaaugccuucccucacccuggcuugucuuacaaagcaggggcaaguggaccugaacgaugccguccaggcgcucaccgaccugggacugaucuacacggccaaguauccgaauagcuccgaccucgaucgccugucucagagccaucccauucuuaacaugaucgacaccaaaaaguccagccugaauaucucuggcuacaacuuuucccucggggcugccguuaaagcuggagccugcaugcuggauggcggcaauaugcuugagacaauuaaggugagcccucaaaccauggacgggauccugaaaucuauucucaaggugaaaaagagccugggaauguucgucuccgauacacccggcgaaagaaacccuuaugagaacauccuguacaagauuugucucucuggggacggauggcccuauaucgcgagccggaccuccauugugggccgcgccugggaaaauacgguuguggaucuggagcaggacaacaaaccucagaagaucgggaauggaggcagcaacaaaucucuucaguccgcuggcuuugccgcugggcugacauacagccaacucaugacccugaaggauuucaaaugcuuuaaucugaucccgaacgccaagacauggauggacauugagggaagacccgaagauccugucgagaucgcccuuuaccagcccucuuccggcuguuaugugcacuucuuucgggaaccuaccgaccucaagcaguucaaacaggacgcuaaguacagccaugggauugauguuaccgaccuguuugcggcccaacccggacugacauccgcugugaucgaggcccucccgagaaauauggucauuacgugccagggcucugaagauauccgcaaacugcuugagagccaggggcggagagacaucaagcugauugauaucacccucuccaaagccgacucucgcaaguucgagaacgcugugugggaucaguuuaaggaccugugucacaugcauacaggcgucgugguugaaaagaagaaacggggaggcaaggaggaaauuaccccucacugcgcccugauggauuguaucauguucgacgcggcugugagcgggggacuugaugccaaaguccucagagugguucugccccgcgacaugguguuccggacauccaccccuaaggucgugcugugaggacuagucccuguucccagagcccacuuuuuuuucuuuuuuugaaauaaaauagccugucuuucagaucucaaaggcucuuuucagagccaccaaaaaaaaaaaaaaaaaaaaaaaaaaaaaaaaaaaaaaaaaaaaaaaaaaaaaaaaaaaaaaaaaaaaaaaaaaaaaaaaaaaaaaaaaaaaaaaaaaaaa

SEQ ID NO: 19944 - RNA, 2052 nt, Artificial Sequence
  mRNA product Design a-2 (hSL-A100) comprising derived and/or modified sequence from LASV(AV;Clade V)__CCA30315__SP-HsALB_NP(2-569) (opt5)
aggagaguccgcucagccagguugcagaagcggcuuagcguguguccuaaucuucucucugcguguagguaggccugugccgcaaacaagcuuaccaugaagugggugaccuucaucagccugcucuuucuguucuccucugccuacagcagcgccuccaaggaggugaaaucuuuccuguggacccagagccucagacgggaacuguccggcuacugcucuaacaucaaacuucaagucguuaaggacgcucaggcccugcuccacgggcuggauuuuagcgagguguccaaugugcagcgccuuaugagaaagcagcggcgcgacgauucugaccugaaaagacuccgggaucugaaccaagcggucaauaaccugguggaacucaagagcacacagcagaaguccguucugcgcgugggaacgcuuagcucugacgaucugcucacccuggcugccgaccuugagaaacugaaguccaaagucacaagaaccgaacggccccucagcucuggcguguauauggggaaucuguccagccagcaacuggaucagcgcagagcccuccugaaccuuauuggaaugacaaauggcucucaggggucccaggcuggacgggacggcguugugcgcgucugggaugugaagaacgccgagcugcucaauaaccaauucggcaccaugccuagccugacacuugcuugucugaccaaacagggacagguggaccucaaugaugucguucaagcccugacggaccuggggcucaucuacaccgcgaaguauccgaacacauccgaccuggauagacuuacccagucucaucccauucugaauaugaucgacacaaagaaaagcucccucaacauuagcggcuacaauuuuucucugggggccgcugugaaggccggagcuugcaugcuugauggcgggaacaugcuggagaccaucaaaguguccccucagagcauggacggaauccucaagucuauucugaaagucaagcgggcccugggcauguucgugagcgauacgcccggcgaacgcaacccuuaugagaauauccucuacaaaauuugucuguccggggacggauggcccuauaucgcgucuagaacaagcauuguuggccgggccugggaaaacaccguggucgaucuugagacagacgggaagccucagaagaucggauccggcaauagcaacaaaucucugcaauccgcuggguuuagcgccggacucaccuacucucagcugaugacccugaaggaugcuaugcuucagcucgacccgaaugccaaaacauggauggauauugagggcagacccgaagacccuguggagguugcccuguaccagcccaucuccggcugcuauauccacuucuuucgcgaaccuacggaccugaagcaauucaaacaggaugcuaaguacagccaugggauugacaucgcggaucucuuugccgcucagcccggacugaccuccgccgugauugaggcccuuccgcggaacauggucaucacaugucagggcucugaagacauuaagaaacugcucgagagccaagggagaaaggauaucaaacugaucgacauugcucuguccaagaucgauucucgcaaauucgagaaugccgugugggaccaguauaaggaucuuugccacaugcauaccggagucgugguugaaaagaaaaagcggggcgggaaagaggaaauuacaccucacugugcgcucauggacugcaucauguuugaugcugccgugagcggcggacugaacacccugguccucagagccgugcugccccgcgacaugguuuuccggacguccacaccuagagugguccuuugaggacuagucccuguucccagagcccacuuuuuuuucuuuuuuugaaauaaaauagccugucuuucagaucucaaaggcucuuuucagagccaccaaaaaaaaaaaaaaaaaaaaaaaaaaaaaaaaaaaaaaaaaaaaaaaaaaaaaaaaaaaaaaaaaaaaaaaaaaaaaaaaaaaaaaaaaaaaaaaaaaaaa

SEQ ID NO: 19945 - RNA, 2052 nt, Artificial Sequence
  mRNA product Design a-2 (hSL-A100) comprising derived and/or modified sequence from LASV(Togo/2016/7082;Clade VI)__AMR44578__SP-HsALB_NP(2-569) (opt5)
aggagaguccgcucagccagguugcagaagcggcuuagcguguguccuaaucuucucucugcguguagguaggccugugccgcaaacaagcuuaccaugaagugggugaccuucaucagccugcucuuucuguucuccucugccuacagcagcaacuccaaggaggugaaaucuuuccuguggacccagagccucagacgggaacuguccggcuacugcucuaauaucaaacuucaagucguuaaagacgcccaggcucugcuccacgggcuggauuuuagcgagguguccaacgugcagcgccuuaugagaaagcagaaacgggacgauggagaccugaagcgccucagagaucugaaucaagccgucaacaaucugguggaacucaagucuguucagcagaaaagcauucugcgggugggcacacuuacguccgacgaucugcucacccuggcggcugaccuugagaagcugaaaagcaaggucacacgcaccgaaagaccccucucuuccgggguguauaugggaaaccugagcucucagcaacuggaucagcggcgcgcccuccuguccaugaucggcaugagcgggggaaaucagaacucucagccuaaaggcgacggcguugugagagucugggaugugaagaaugccgaccuucugaacaaucaauucgggacaaugccgucccucacccuggcuugucuuacaaagcagggacagguggaucugaacgacgccguccaagcucucaccgaccugggccugauuuacacggccaaauaucccaauagcuccgaucucgaccggcugucucagagccauccuauccuuaacaugauugauaccaagaaauccagccugaauaucucuggguacaacuuuucccucggagcggccaucaagacaggcgcuugcaugcuggacgggggaaacaugcuugagaccauuaaaguuacaccccagaccauggauggcauccucaagagcauucugaaagugaagcgcucucugggcauguucaucagcgacacgccuggggagagaaaucccuaugaaaacauucuguacaagaucugucucuccggagauggcuggccuuauauugccucucggacagcuaucaucgggcgcgccugggagaauaccguggucgaccuggaaagcgauuccaaaccgcagaagauuggaagcaacggcucuaauaaaucccuucaaagcgcgggguuugcccccggacugacauacucucagcucaugacccugaaggacuccaugcugcagcuugauccuaacgcuaaaaccuggaucgacauugagggcagacccgaggacccuguggaaguugcccucuuccagcccaucagcggcugcuacauucacuuuuuccgggagccgacagaucugaagcaauuuaagcaggacgcuaaauauucccaugggaucgaugugacggaccuguucgccgcccagccuggacucaccucugcugucaucgaagcgcugcccagaaauauggugcuuacaugucagggcagcgaugacauuaagaaacugcucgauucccaagggcgccgggacaucaagcugauugauguuucucugaacaaaaucgacagcagaaaguuugagaaugccgugugggaucaguacaaggaccuuugccacaugcauaccggagucguggucgaaaagaagaaaaagggcgggaaagaggagauuacaccucacugugcucuccuggauugcaucauguucgacgccgccguguccggcggacugaacgcuaccguucuccgcgccgugcugccccgggacauggucuuuagaacgagcucucccaaggugguucuuugaggacuagucccuguucccagagcccacuuuuuuuucuuuuuuugaaauaaaauagccugucuuucagaucucaaaggcucuuuucagagccaccaaaaaaaaaaaaaaaaaaaaaaaaaaaaaaaaaaaaaaaaaaaaaaaaaaaaaaaaaaaaaaaaaaaaaaaaaaaaaaaaaaaaaaaaaaaaaaaaaaaaa

SEQ ID NO: 19946 - RNA, 2052 nt, Artificial Sequence
  mRNA product Design a-2 (hSL-A100) comprising derived and/or modified sequence from LASV(KAK-428;Clade n.d. (VII))__ANH09741__SP-HsALB_NP(2-569) (opt5)
aggagaguccgcucagccagguugcagaagcggcuuagcguguguccuaaucuucucucugcguguagguaggccugugccgcaaacaagcuuaccaugaagugggugaccuucaucagccugcucuuucuguucuccucugccuacagcagcaacuccaaggaggugaaaucuuuccuguggacccagagccucagacgggaacuguccggcuacugcacaaauaucaaacuucaagucguuaaggacgcccaggcucugcuccacgggcuggauuuuucugaggugagcaacgugcagcgccuuaugagaaagcagaaacgggacgauaaugaccugaagcgccucagagaucugaaccaagccgucaauaaccugguggaacucaaguccguucagcagaaaucugugcugaaggucggaacgcuuaauagcgacgaucugcucacccuggcggcugaccuugagaaacugaaguccaaagugguucggacagaacgcccccucagcucuggcguguauauggggaaccuguccagccagcaacuggaucagagacgggcccuccugaauaugauuggaauggccggcgggucucagggaaaccagccuucccgcgacggcgucgugagagugugggaugucaagaaugcugaccuucugaacaaucaauucggcaccaugccgagccucacacuggccugucuuaccaagcaggggcagguugaucugaacgacguggugcucgcucugacagaccugggacucaucuacaccgccaaauaucccaauucuuccgaucuggaccggcuuagccaaaaccauccuguccugaacaugauugaugugaauaaguccucucucaacaucagcggcuacaauuuuucccugggggcggccguuaaagcuggagccugcaugcuugacggcgggaacaugcuggagacgauuaagaucagcccccagaccguggauggaauccucaaaucuauucugaaggucaaacgcgcucugggcauguucguguccgacacaccuggcgagagaaaucccuaugaaaacauccucuacaagguuugucugagcgggaauggauggccuuauauugccucucggaccagcaucgugggccgcgcgugggagaacacagucguggaucuugaauccaauaagaaccagccgaaagucgggaauaacggaucuaauaagaugcugcagagcuccggcuuugccaccgggcucacguacagccaacugaugacacugagagacucuaugcuucagcucgaucccaccgcuaaaacauggauugacaucgagggacggccugaggaucccguggaacuggcccuguuccagccuuccagcggcugcuacauucacuuuuucagagagcccaccgaccucaagcaguuuaaacaagacgcuaaguauucucauggcaucgauguuaacgaccuguucuccgcccagccggggcuuaccagcgccgugcuggaagcucucccucgcaauaugguccugacaugucagggauccgaugacauccggaagcugcuugauucucaggacagaaaagauauuaagcucaucgacauuagccuguccaaagcggaugcccgcaaguuugagaacgacgugugggaucaauucaaagaccugugccacaugcauacgggcaucguuguggaaaagaagaaaaagggagggaaacaggagaugacaccccacugugcucuccuggauugcauuauguuugacgccgccgucucuggcgggcuuaacgugccuacccugcgggcugugcuccccaccgacaugguuuucagaacaaucaccacgaaggucgugcugugaggacuagucccuguucccagagcccacuuuuuuuucuuuuuuugaaauaaaauagccugucuuucagaucucaaaggcucuuuucagagccaccaaaaaaaaaaaaaaaaaaaaaaaaaaaaaaaaaaaaaaaaaaaaaaaaaaaaaaaaaaaaaaaaaaaaaaaaaaaaaaaaaaaaaaaaaaaaaaaaaaaaa

SEQ ID NO: 19947 - RNA, 2052 nt, Artificial Sequence; identical to SEQ ID NO: 19941
  mRNA product Design a-2 (hSL-A100) comprising derived and/or modified sequence from LASV(Pinneo-NIG-1969;Clade I)__AIT17837__SP-HsALB_NP(2-569) (opt5)

SEQ ID NO: 19948 - RNA, 2052 nt, Artificial Sequence
  mRNA product Design a-2 (hSL-A100) comprising derived and/or modified sequence from LASV(ISTH0009-NIG-2011;Clade II)__AIT17405__SP-HsALB_NP(2-569) (opt5)
aggagaguccgcucagccagguugcagaagcggcuuagcguguguccuaaucuucucucugcguguagguaggccugugccgcaaacaagcuuaccaugaagugggugaccuucaucagccugcucuuucuguucuccucugccuacagcagcguguccaaggaggucaaaucuuuccuguggacccagagccucagacgggaacuguccggcuacugcucuaacaucaaacuucaaguugugaaggacgcccaggcucugcuccacgggcuggauuuuagcgagguguccaauguccagcgccuuaugagaaagcagaaacgggacgauucugaccugaagcgccucagagaucugaaccaagccgugaauaaccugguugaacucaagagcacacagcagaaauccauucugcgggugggaacgcuuaccagcgacgaucugcucacacuggcggcugaccuugagaagcugaaaucuaaggucauccgcaccgaaagaccccucuccagcggcguguauauggggaaucugucuacacagcaacuggagcagcggcgcgcccuccugaacaugauuggaaugguuggcggggcccagggaacccagccuggcagagauggcgugguccgggugugggacgugaaaaauccggaucuucugaacaaucaauucgggacaaugcccucccucacccuggcuugucuuacgaagcagggacaggucgaccugaacgaugccguucucgcucugaccgaccugggccucaucuacacagccaaguauccuaauagcucugaccuggaucgccuuucccaaagccaucccauucugaacaugguggacaucaaaaaguccucucucaauaucagcggguacaacuuuucccugggagcggccgugaaagcuggcgccugcaugcuugaugggggaaauaugcuggagaccauuaaggucacaccucagaccauggacggcauccucaaaagcauucugaaggugaaaagaucucugggcauguucguuuccgauacgcccggggaacggaacccuuaugagaacauccucuacaagauuugucugagcggagacggcuggccguauaucgcuucucgcacaagcauuguggggagagccugggaaaauaccacagucgaucuugaguccgacggaaagccccagaaagugggcucugcggggagcaacaagucccugcagagcgccggauuuccuaccggccucaccuacucucaacugaugacacugaaagauuccaugaugcagcuugaccccagcgcuaagacguggaucgauaucgagggccggccugaagaccccguugagauugcccucuaccagccgaugucugggugcuauauccacuucuuuagagaaccuaccgaccugaaacaguucaagcaagaugcuaaguacucccauggaauugacguggccgaucuguuucccgcccagccuggccucacaagcgcugucaucgaggcgcugccccgcaauauggugcuuaccugucagggguccgacgauauuaaacggcugcucgacucucagggaagacgcgauaucaagcugaucgacauugcccugagcaaagcugauucccggagauucgaaaacgccgucugggaccaaugcaaggaucuuugucacaugcauacaggcgugguuguggagaaaaagaagcgcgggggcaaagaggaaaucacgccccacugcgcccucauggacuguauuauguaugaugcugccgucucuggaggccugaauaucccugugcugcgggcgguucucccgagagacaugguguuucgcaccagcucccccaaggucgugcugugaggacuagucccuguucccagagcccacuuuuuuuucuuuuuuugaaauaaaauagccugucuuucagaucucaaaggcucuuuucagagccaccaaaaaaaaaaaaaaaaaaaaaaaaaaaaaaaaaaaaaaaaaaaaaaaaaaaaaaaaaaaaaaaaaaaaaaaaaaaaaaaaaaaaaaaaaaaaaaaaaaaaa

SEQ ID NO: 19949 - RNA, 2052 nt, Artificial Sequence
  mRNA product Design a-2 (hSL-A100) comprising derived and/or modified sequence from LASV(ISTH2010-NIG-2012;Clade II)__AIT17483__SP-HsALB_NP(2-569) (opt5)
aggagaguccgcucagccagguugcagaagcggcuuagcguguguccuaaucuucucucugcguguagguaggccugugccgcaaacaagcuuaccaugaagugggugaccuucaucagccugcucuuucuguucuccucugccuacagcagcgccuccaaggaggugaaaucuuuccuguggacccagagccucagacgggaacuguccggcuacugcucuaacaucaaacuucaagucguuaaggacgcucaggcccugcuccacgggcuggauuuuagcgagguguccaaugugcagcgccuuaugagaaagcagaaacgggacgauucugaccugaagcgccucagagaucugaaccaagcggucaauaaccugguggaacucaagagcacacagcagaaauccauucugcggguuggaacgcuuaccagcgacgaucugcucacacuggcugccgaccuugagaagcugaaaucuaaggugauccgcaccgaaagaccccucuccagcggcgucuauauggggaaucugucuacacagcaacuggagcagcggcgcgcccuccugaaccuuauuggaauggugggcggggcucagggaacccagccuggcagagauggcguugugcgggucugggacgugaaaaauccggaucugcucaacaaucaauucgggacaaugcccucccugacccuugccugucugacgaagcagggacagguggaccucaacgaugcuguccuggcccugaccgaccucggccugaucuacacagcgaaguauccuaauagcucugaccuugaucgccugucccaaagccaucccauucucaacaugguugacaccaaaaaguccucucugaauaucagcggguuuaacuucucccuuggagccgcugugaaagccggcgcuugcaugcuggaugggggaaauaugcucgagacaaucaaggugaccccucagacgauggacggcauucugaaaagcauccugaaggucaaaaagucucucggcauguuuguguccgauacacccggggaaagaaacccuuacgagaacauucuguauaagaucugucuuagcggagacggcuggccguacauugccucucggaccagcaucguugggcgcgcgugggaaaauacaaccguggaucuggaguccgacggaaaaccccacaaggucggcaccgccgggucuaacaaaagccuccaguccgcuggauucccuacaggccugacguauagccagcugaugacccuuaaggauucuaugaugcaacucgaccccuccgccaaaacauggauugauaucgagggcagaccugaagaccccguggagaucgcucuguaccagccgaugagcgggugcuacauucacuuuuuccgggaaccuaccgaccugaagcaguuuaagcaggaugccaaauauucucauggaaucgacguugccgaucucuuccccgcucaaccuggccugacauccgcggugauugaggcccuucccagaaauaugguccugaccugucaggggagcgacgauaucaagcgccuccuggacucccagggacggagagauauuaaacugaucgacaucgcucuuucuaaggccgauagccgccgguuugaaaacgccgugugggaccagugcaaagaucucugucauaugcacacgggcgucgugguugagaagaagaaaagagggggcaaggaggaaauuacaccccacugcgcucugauggacuguaucauguacgaugccgcgguguccggaggccugaauauuccuguccuccgcgcugugcugccgcgggacaugguuuucagaaccucuagccccaaagugguccuuugaggacuagucccuguucccagagcccacuuuuuuuucuuuuuuugaaauaaaauagccugucuuucagaucucaaaggcucuuuucagagccaccaaaaaaaaaaaaaaaaaaaaaaaaaaaaaaaaaaaaaaaaaaaaaaaaaaaaaaaaaaaaaaaaaaaaaaaaaaaaaaaaaaaaaaaaaaaaaaaaaaaaa

SEQ ID NO: 19950 - RNA, 2052 nt, Artificial Sequence
  mRNA product Design a-2 (hSL-A100) comprising derived and/or modified sequence from LASV(Lassa virus/H.sapiens-wt/NGA/2015/ISTH_0543;Clade II)__AVO03640__SP-HsALB_NP(2-569) (opt5)
aggagaguccgcucagccagguugcagaagcggcuuagcguguguccuaaucuucucucugcguguagguaggccugugccgcaaacaagcuuaccaugaagugggugaccuucaucagccugcucuuucuguucuccucugccuacagcagcgccuccaaggaggugaaaucuuuccuguggacccagagccucagacgggaacuguccggcuacugcucuaacaucaaacuucaagucguuaaggacgcucaggcccugcuccacgggcuggauuuuagcgagguguccaaugugcagcgccuuaugagaaagcagaaacgggacgauucugaccugaagcgccucagagaucugaaccaagcggucaauaaccugguggaacucaagagcacacagcagaaauccauucugcggguuggaacgcuuaccagcgacgaucugcucacacuggcugccgaccuugagaagcugaaaucuaaggugauccgcaccgaaagaccccucuccagcggcgucuauauggggaaucugucuacacagcaacuggagcagcggcgcgcccuccugaacaugauuggaauggugggcggggcucagggaacccagccuggcagagauggcguugugcgggucugggacgugaaaaauccggaucuucugaacaaucaauucgggacaaugcccucccucacccuggccugucuuacgaagcagggacagguggaccugaacgaugcuguccucgcccugaccgaccugggccucaucuacacagcgaaguauccuaauagcucugaccuggaucgccuuucccaaagccaucccauucugaacaugguugacaccaaaaaguccucucucaauaucagcggguacaacuuuucccugggagccgcugugaaagccggcgcuugcaugcuugaugggggaaauaugcuggagacaaucaaggugaccccucagacgauggacggcauucucaaaagcauccugaaggucaaaaagucucugggcauguucguguccgauacacccggggaaagaaacccuuaugagaacauucucuacaagaucugucugagcggagacggcuggccguauauugccucucggaccagcaucguugggcgcgcgugggaaaauacaaccguggaucuugaguccgacggaaaaccccagaaggucggcucugccgggagcaacaaaucccugcagagcgcuggauuuccuaccggccucacauacucucaacugaugacgcugaaggauuccaugaugcagcuugaccccagcgccaaaaccuggauugauaucgagggcagaccugaagaccccguggagaucgcucucuaccagccgaugucugggugcuauauucacuucuuucgggaaccuacagaccugaagcaguucaagcaagaugccaaauacucccauggaaucgacguugccgaucuguuucccgcucagccuggccucaccagcgcggugauugaggcccugcccagaaauaugguccuuacaugucagggguccgacgauaucaagcgccugcucgacucucagggacggaaagauauuaagcugaucgacaucgcucugagcaaagccgauuccagacgcuucgaaaacgccgugugggaccaaugcaaggaucuuugucacaugcauaccggcgucgugguugagaagaaaaagagagggggcaaagaggaaauuacgccccacugcgcucucauggacuguaucauguaugaugccgcggugucuggaggccugaauauuccuguccugcgggcugugcucccgcgcgacaugguuuuucggacaagcucccccaaggugguccugugaggacuagucccuguucccagagcccacuuuuuuuucuuuuuuugaaauaaaauagccugucuuucagaucucaaaggcucuuuucagagccaccaaaaaaaaaaaaaaaaaaaaaaaaaaaaaaaaaaaaaaaaaaaaaaaaaaaaaaaaaaaaaaaaaaaaaaaaaaaaaaaaaaaaaaaaaaaaaaaaaaaaa

SEQ ID NO: 19951 - RNA, 2052 nt, Artificial Sequence
  mRNA product Design a-2 (hSL-A100) comprising derived and/or modified sequence from LASV(Lassa virus/H.sapiens-wt/NGA/2016/ISTH_0009;Clade II)__AVO03572__SP-HsALB_NP(2-569) (opt5)
aggagaguccgcucagccagguugcagaagcggcuuagcguguguccuaaucuucucucugcguguagguaggccugugccgcaaacaagcuuaccaugaagugggugaccuucaucagccugcucuuucuguucuccucugccuacagcagcgccuccaaggaggugaaaucuuuccuguggacccagagccucagacgggaacuguccggcuacugcucuaacaucaaacuucaagucguuaaggacgcucaggcccugcuccacgggcuggauuuuagcgagguguccaaugugcagcgccuuaugagaaagcagaaacgggacgauucugaccugaagcgccucagagaucugaaccaagcggucaauaaccugguggaacucaagagcacacagcagaaauccauucugcggguuggaacgcuuaccagcgacgaucugcucacacuggcugccgaccuugagaagcugaaaucuaaggugauccgcaccgaaagaccccucuccagcggcgucuauauggggaaucugucuacacagcaacuggagcagcggcgcgcccuccugaacaugauuggaauggugggcggggcucagggaacccagccuggcagagauggcguugugcgggucugggacgugaaaaauccggaucuucugaacaaucaauucgggacaaugcccucccucacccuggccugucuuacgaagcagggacagguggaccugaacgaugcuguccucgcccugaccgaccugggccucaucuacacagcgaaguauccuaauagcucugaccuggaucgccuuucccaaagccaucccauucugaacaugguugacaccaaaaaguccucucucaauaucagcggguacaacuuuucccugggagccgcugugaaagccggcgcuugcaugcuugaugggggaaauaugcuggagacaaucaaggugaccccucagacgauggacggcauucucaaaagcauccugaaggucaaaaagucucugggcauguucguguccgauacacccggggaaagaaacccuuaugagaacauucucuacaagaucugucugagcggagacggcuggccguauauugccucucggaccagcaucguugggcgcgcgugggaaaauacaaccguggaucuugaguccgacggaaaaccccagaaggucggcucugccgggagcaacaaaucccugcagagcgcuggauuuccuaccggccucacauacucucaacugaugacgcugaaggauuccaugaugcagcuugaccccagcgccaaaaccuggauugauaucgagggcagaccugaagaccccguggagaucgcucucuaccagccgaugucugggugcuauauucacuucuuucgggaaccuacagaccugaagcaguucaagcaagaugccaaauacucccauggaaucgacguugccgaucuguuucccgcucagccuggccucaccagcgcggugauugaggcccugcccagaaauaugguccuuacaugucagggguccgacgauaucaagcgccugcucgacucucagggacggagagauauuaaacugaucgacaucgcucugagcaaggccgauucccgccgguucgaaaacgccgugugggaccaaugcaaagaucuuugucacaugcauaccggcgucgugguugagaagaagaaaagagggggcaaggaggaaauuacgccccacugcgcucucauggacuguaucauguaugaugccgcggugucuggaggccugaauauuccuguccugcgcgcugugcucccgcgggacaugguuuuuagaacaagcucccccaaagugguccugugaggacuagucccuguucccagagcccacuuuuuuuucuuuuuuugaaauaaaauagccugucuuucagaucucaaaggcucuuuucagagccaccaaaaaaaaaaaaaaaaaaaaaaaaaaaaaaaaaaaaaaaaaaaaaaaaaaaaaaaaaaaaaaaaaaaaaaaaaaaaaaaaaaaaaaaaaaaaaaaaaaaaa

SEQ ID NO: 19952 - RNA, 2052 nt, Artificial Sequence
  mRNA product Design a-2 (hSL-A100) comprising derived and/or modified sequence from LASV(Lassa virus/H.sapiens-wt/NGA/2016/ISTH_0017;Clade II)__AVO03568__SP-HsALB_NP(2-569) (opt5)
aggagaguccgcucagccagguugcagaagcggcuuagcguguguccuaaucuucucucugcguguagguaggccugugccgcaaacaagcuuaccaugaagugggugaccuucaucagccugcucuuucuguucuccucugccuacagcagcgccuccaaggaggugaaaucuuuccuguggacccagagccucagacgggaacuguccggcuacugcucuagcaucaaacuucaagucguuaaggacgcucaggcccugcuccacgggcuggauuuuuccgaggugucuaacgugcagcgccuuaugagaaagcagaaacgggacgauagcgaccugaagcgccucagagaucugaaucaagcggucaacaaucugguggaacucaaguccacacagcagaaaagcauucugcggguuggaacgcuuaccucugacgaucugcucacacuggcugccgaccuugagaagcugaaauccaaggugauccgcaccgaaagaccccucagcucuggcgucuauauggggaaccuguccacacagcaacuggagcagcggcgcgcccuccugaauaugauuggaauggcuggcggggcccagggaacccagccuggcagagauggcgugguucgggugugggacgucaaaaacccggaucuucugaauaaccaauucgggacaaugcccagccucacccuggcuugucuuacgaagcagggacagguggaccugaaugaugccgugcucgcgcugaccgaccugggccucaucuacacagccaaguauccuaacucuuccgaccuggaucgccuuagccaaucccaucccauucugaauauggucgacaccaaaaagucuagccucaacaucuccggguacaauuuuagccugggagcugccguuaaagcuggcgccugcaugcuugaugggggaaacaugcuggagacaaucaaggugaccccucagacgauggacggcauucucaaaucuauccugaaggugaaaagaucccugggcauguucgucagcgaugcgcccggggaacggaauccuuaugagaacauucucuacaagaucugucugucuggagacggcuggccguauauugccagccgcacauccaucguggggagagcuugggaaaacaccacaguugaucuugagucugacggaaagccccagaaagugggcgccaccgggagcaauaagucccugcagagcgcuggauuuccuaccggccucacauacucucaacugaugacgcugaaagauuccaugaugcagcuugaccccagcgccaagaccuggauugauaucgagggccggccugaagaccccgucgagguggcccucuaccagccgguuucugggugcuauauccacuucuuuagagaaccuacagaccugaaacaguucaagcaagaugcuaaguacucccauggaauugacguggcggaucuguuucccgcccagccuggccucaccagcgcugucaucgaggcccugccccgcaacauggugcuuacaugucagggguccgacgauauuaaaaagcugcucgacucucagggacggaaagauaucaagcugauugacaucgcccugagcaaagcugauuccagacgcuucgaaaaugccgucugggaccaaugcaaggaucuuugucacaugcauaccggcgugguuguggagaagaaaaagagagggggcaaagaggaaaucacgccccacugcgcgcucauggacuguauuauguaugaugcugccgucucuggaggccugaacaucccugugcugcgggccguucucccgcgcgacaugguguuucggacaagcucccccaaggucgugcugugaggacuagucccuguucccagagcccacuuuuuuuucuuuuuuugaaauaaaauagccugucuuucagaucucaaaggcucuuuucagagccaccaaaaaaaaaaaaaaaaaaaaaaaaaaaaaaaaaaaaaaaaaaaaaaaaaaaaaaaaaaaaaaaaaaaaaaaaaaaaaaaaaaaaaaaaaaaaaaaaaaaaa

SEQ ID NO: 19953 - RNA, 2052 nt, Artificial Sequence
  mRNA product Design a-2 (hSL-A100) comprising derived and/or modified sequence from LASV(Lassa virus/H.sapiens-wt/NGA/2018/ISTH_0959;Clade II)__AVV65100__SP-HsALB_NP(2-569) (opt5)
aggagaguccgcucagccagguugcagaagcggcuuagcguguguccuaaucuucucucugcguguagguaggccugugccgcaaacaagcuuaccaugaagugggugaccuucaucagccugcucuuucuguucuccucugccuacagcagcgccuccaaggaggugaaaucuuuccuguggacccagagccucagacgggaacuguccggcuacugcucuaacaucaaacuucaagucguuaaggacgcucaggcccugcuccacgggcuggauuuuagcgagguguccaaugugcagcgccuuaugagaaagcagaaacgggacgauucugaccugaagcgccucagagaucugaaccaagcggucaauaaccugguggaacucaagagcacccagcagaaauccauucugcggguuggaacgcuuaccagcgacgaucugcucacacuggcugccgaccuugagaagcugaaaucuaaggugauccgcaccgaaagaccccucuccagcggcgucuauauggggaaucugucuacacagcaacuggagcagcggcgcgcccuccugaaccuuauuggaauggugggcggggcucagggaacccagccuggcagagauggcguugugcgggucugggacgugaaaaauccggaucugcucaacaaucaauucgggacaaugcccucccugacccuugccugucugacgaagcagggacagguggaccucaacgaugucguucuggcucugaccgaccucggccugaucuacacagccaaguauccuaauagcucugaccuugaucgccugucccaaagccaucccauucucaacaugguggacaccaaaaaguccucucugaauaucagcggguuuaacuucucccuuggagcggccgugaaagcuggcgccugcaugcuggaugggggaaauaugcucgagacaaucaaggucaccccucagacgauggacggcauucugaaaagcauccugaaggugaaaaagucucucggcauguuuguuuccgauacacccggggaaagaaacccuuacgagaacauucuguauaagaucugucuuagcggagacggcuggccguacauugcuucucggaccagcaucguggggcgcgccugggaaaauacaaccgucgaucuggaguccgacggaaaaccccacaaggugggcaccgcggggucuaacaaaagccuccaguccgccggauucccuacaggccugacguauagccagcugaugacccuuaaggauucuaugaugcaacucgaccccuccgcuaaaacauggauugauaucgagggcagaccugaagaccccguugagaucgcccuguaccagccgaugagcgggugcuacauucacuuuuuccgggaaccuaccgaccugaagcaguuuaagcaggaugcuaaauauucucauggaaucgacguggccgaucucuuccccgcccaaccuggccugacauccgcugucauugaggcgcuucccagaaauauggugcugaccugucaggggagcgacgauaucaagcgccuccuggacucccagggacggaaagauauuaagcugaucgacaucgcccuuucuaaaacggauagcagacgcuuugaaaacgcugucugggaccagugcaaggaucucugucauaugcacacaggcgugguuguggagaagaaaaagagagggggcaaagaggaaauuacaccccacugcgcccugauggacuguaucauguacgaugccgcugucuccggaggccugaauauuccugugcuccgggccguucugccgcgcgacaugguguuccggaccucuagccccaaggucgugcuuugaggacuagucccuguucccagagcccacuuuuuuuucuuuuuuugaaauaaaauagccugucuuucagaucucaaaggcucuuuucagagccaccaaaaaaaaaaaaaaaaaaaaaaaaaaaaaaaaaaaaaaaaaaaaaaaaaaaaaaaaaaaaaaaaaaaaaaaaaaaaaaaaaaaaaaaaaaaaaaaaaaaaa

SEQ ID NO: 19954 - RNA, 2052 nt, Artificial Sequence
  mRNA product Design a-2 (hSL-A100) comprising derived and/or modified sequence from LASV(LASV003-NIG-2008;Clade II)__AIT17581__SP-HsALB_NP(2-569) (opt5)
aggagaguccgcucagccagguugcagaagcggcuuagcguguguccuaaucuucucucugcguguagguaggccugugccgcaaacaagcuuaccaugaagugggugaccuucaucagccugcucuuucuguucuccucugccuacagcagcgccuccaaggaggugaaaucuuuccuguggacccagagccucagacgggaacuguccggcuacugcucuagcaucaaacuucaagucguuaaggacgcucaggcccugcuccacgggcuggauuuuuccgaggugucuaacgugcagcgccuuaugagaaagcagaaacgggacgauagcgaccugaagcgccucagagaucugaaucaagcggucaacaaucugguggaacucaaguccacccagcagaaaagcguucugcgggugggaacgcuuaccucugacgaucugcucacacuggcugccgaccuugagaagcugaaauccaaggucauucgcaccgaaagaccccucagcucuggcguguauauggggaaccuguccgcccagcaacuggagcagcggcgcacacuccugaauaugaucggaaugguuggcggggcucagggaacccagccuggcagagauggcgugguccgggugugggacgugaaaaacccggaucuucugaauaaccaauucgggacaaugcccagccucacccuggccugucuuacgaagcagggacaggucgaccugaaugauguugugcucgcucugaccgaccugggccucauuuacacagccaaguauccuaacucuuccgaccuggaucgccuuagccaaucccaucccauccugucuaugguggacaccaaaaagagcucccucaauauuagcggguacaacuuuucucugggagcggccgucaaagcuggcgccugcaugcuugaugggggaaauaugcuggagacaaucaaggugaccccucagacgauggacggcauccucaaauccauucugaagguuaaaaagagccugggcauguucgugucugauacacccggggaaagaaacccuuaugagaauauccucuacaagauuugucugagcggagacggcuggccguauaucgcuucccggaccucuauugucgggcgcgccugggaaaacacaaccguggaucuugagagcgacggaaaaccccagaagguuggcaccgcgggguccaacaaaagccugcagucugccggauuuccuacaggccucacguacucccaacugaugacccugaaggauagcaugaugcagcuugaccccucugcuaaaacauggaucgauauugagggcagaccugaagaccccguggagaucgcccucuaccagccgauguccgggugcuauauccacuucuuucgggaaccuaccgaccugaagcaguucaagcaagaugcuaaauacagccauggaauugacgucacagaucuguuucccgcccagccuggccucaccuccgccgugaucgaggcucugcccagaaauaugguccuuacgugucaggggucugacgauauuaagcgccugcucgacagccagggacggagagauaucaaacugauugacaucgcgcuguccaaggccgauucucgccgguucgaaaacgcugugugggaccaaugcaaagaucuuugucacaugcauacaggcguuguggucgagaagaagaaaagagggggcaaggaggaaaucacaccccacugcgcccucauggacuguauuauguaugaugccgcugugagcggaggccugaauaucccuguucugcgcgccgugcucccgcgggacauggucuuuagaaccuccagccccaaaguggugcugugaggacuagucccuguucccagagcccacuuuuuuuucuuuuuuugaaauaaaauagccugucuuucagaucucaaaggcucuuuucagagccaccaaaaaaaaaaaaaaaaaaaaaaaaaaaaaaaaaaaaaaaaaaaaaaaaaaaaaaaaaaaaaaaaaaaaaaaaaaaaaaaaaaaaaaaaaaaaaaaaaaaaa

SEQ ID NO: 19955 - RNA, 2052 nt, Artificial Sequence
  mRNA product Design a-2 (hSL-A100) comprising derived and/or modified sequence from LASV(LASV035-NIG-2009;Clade II)__AIT17589__SP-HsALB_NP(2-569) (opt5)
aggagaguccgcucagccagguugcagaagcggcuuagcguguguccuaaucuucucucugcguguagguaggccugugccgcaaacaagcuuaccaugaagugggugaccuucaucagccugcucuuucuguucuccucugccuacagcagcgccuccaaggaggugaaaucuuuccuguggacccagagccucagacgggaacuguccggcuacugcucuagcaucaaacuucaagucguuaaagacgcucaggcccugcuccacgggcuggauuuuuccgaggugucuaacgugcagcgccuuaugagaaagcagaaacgggacgauagcgaccugaagcgccucagagaucugaaucaagcggucaacaaucugguggaacucaaguccacacagcagaaaagcauucugcggguuggaacgcuuaccucugacgaucugcucacacuggcugccgaccuugagaagcugaaauccaaggugauccgcaccgaaagaccccucagcucuggcgucuauauggggaaccuguccgcccagcaacuggagcagcggcgcgcucuccugaauaugauuggaauggugggcggggcccagggaacacagccuggcagagauggcguugugcgggucugggacgugaaaaacccggaucuucugaauaaccaauucgggaccaugcccagccucacacuggcuugucuuaccaagcagggacagguggaccugaaugaugccguccucgcgcugacggaccugggccucaucuacaccgccaaguauccuaacucuuccgaccuggaucgccuuagccaaucccaucccauucugaauaugguugacacaaagaagucuagccucaacaucuccggguacaauuuuagccugggagcugccgugaaagcuggcgccugcaugcuugaugggggaaacaugcuggagaccaucaaggugacaccucagaccauggacggcauucucaaaucuauccugaaggucaaaagaucccugggcauguucgugagcgauacgcccggggaacggaauccuuaugagaacauucucuacaagaucugucugucuggagacggcuggccguauauugcgagccgcacauccaucguugggagagccugggaaaacaccacaguggaucuugagucugacggaaagccccagaaagucggcaccaccgggagcaauaagucccugcagagcgcuggauuuccuacaggccucacguacucucaacugaugacccugaaagauuccaugaugcagcuugaccccagcgccaagacauggauugauaucgagggccggccugaagaccccguggagaucgcucucuaccagccgaugucugggugcuauauucacuucuuuagagaaccuaccgaccugaaacaguucaagcaagaugccaaguacucccauggaaucgacguugccgaucuguuucccgcucagccuggccucacaagcgcggugauugaggcccugccccgcaacaugguccuuaccugucagggguccgacgauaucaaaaagcugcucgacucucagggacggagagauauuaaacugaucgacaucgcucugagcaaggccgauucccgcaaauucgaaaaugccgugugggaccaaugcaaggaucuuugucacaugcauacgggcgucgugguugagaagaaaaagagagggggcaaagaggaaauuacaccccacugcgcucucauggacuguaucauguaugaugccgcggugucuggaggccugaacauuccuguccugcgggcugugcucccgcgcgacaugguuuuucggaccagcucccccaaggugguccugugaggacuagucccuguucccagagcccacuuuuuuuucuuuuuuugaaauaaaauagccugucuuucagaucucaaaggcucuuuucagagccaccaaaaaaaaaaaaaaaaaaaaaaaaaaaaaaaaaaaaaaaaaaaaaaaaaaaaaaaaaaaaaaaaaaaaaaaaaaaaaaaaaaaaaaaaaaaaaaaaaaaaa

SEQ ID NO: 19956 - RNA, 2052 nt, Artificial Sequence
  mRNA product Design a-2 (hSL-A100) comprising derived and/or modified sequence from LASV(LASV1000-NIG-2009;Clade II)__AIT17783__SP-HsALB_NP(2-569) (opt5)
aggagaguccgcucagccagguugcagaagcggcuuagcguguguccuaaucuucucucugcguguagguaggccugugccgcaaacaagcuuaccaugaagugggugaccuucaucagccugcucuuucuguucuccucugccuacagcagcgccuccaaggaggugaaaucuuuccuguggacccagagccucagacgggaacuguccggcuacugcucuaacaucaaacuucaagucguuaaggacgcucaggcccugcuccacgggcuggauuuuagcgagguguccaaugugcagcgccuuaugagaaagcagaaacgggacgauucugaccugaagcgccucagagaucugaaccaagcggucaauaaccugguggaacucaagagcacacagcagaaauccauucugcggguuggaacgcuuaccagcgacgaucugcucacacuggcugccgaccuugagaagcugaaaucuaaggugauccgcaccgaaagaccccucuccagcggcgucuauauggggaaucugucuacacagcaacuggagcagcggcgcgcccuccugaacaugauuggaauggugggcggggcucagggaacccagccuggcagagauggcguugugcgggucugggacgugaaaaauccggaucuucugaacaaucaauucgggacaaugcccucccucacccuggccugucuuacgaagcagggacagguggaccugaacgaugucguucucgcucugaccgaccugggccucaucuacacagccaaguauccuaauagcucugaccuggaucgccuuucccaaagccaucccauucugaacaugguggacaccaaaaaguccucucucaauaucagcggguacaacuuuucccugggagcggccgugaaagcuggcgccugcaugcuugaugggggaaauaugcuggagacaaucaaggucaccccucagacgauggacggcauucucaaaagcauccugaaggugaaaaagucucugggcauguucguuuccgauacacccggggaaagaaacccuuaugagaacauucucuacaagaucugucugagcggagacggcuggccguauauugcuucucggaccagcaucguggggcgcgccugggaaaauacaaccgucgaucuugaguccgacggaaaaccccagaaggugggcaccgcggggucuaacaaaagccugcaguccgccggauuuccuacaggccucacguacagccaacugaugacccugaaggauucuaugaugcagcuugaccccuccgcuaaaacauggauugauaucgagggcagaccugaagaccccguugagaucgcccucuaccagccggugagcgggugcuauauucacuucuuucgggaaccuaccgaccugaagcaguucaagcaagaugcuaaauacucucauggaaucgacgucgccgaucuguuucccgcccagccuggccucacauccgcugugauugaggcgcugcccagaaauaugguccuuaccugucaggggagcgacgauaucaagcgccugcucgacucccagggacggagagauauuaaacugaucgacaucgcccugucuaaggcugauagccgccgguucgaaaacgccgugugggaccaaugcaaagaucuuugucacaugcauacgggcguuguggucgagaagaagaaaagagggggcaaggaggaaauuacaccccacugcgcccucauggacuguaucauguaugaugcugccguguccggaggccugaauauuccuguucugcgcgcggugcucccgcgggacauggucuuuagaaccucuagccccaaaguggugcugugaggacuagucccuguucccagagcccacuuuuuuuucuuuuuuugaaauaaaauagccugucuuucagaucucaaaggcucuuuucagagccaccaaaaaaaaaaaaaaaaaaaaaaaaaaaaaaaaaaaaaaaaaaaaaaaaaaaaaaaaaaaaaaaaaaaaaaaaaaaaaaaaaaaaaaaaaaaaaaaaaaaaa

SEQ ID NO: 19957 - RNA, 2052 nt, Artificial Sequence
  mRNA product Design a-2 (hSL-A100) comprising derived and/or modified sequence from LASV(LASV221-NIG-2010;Clade II)__AIT17625__SP-HsALB_NP(2-569) (opt5)
aggagaguccgcucagccagguugcagaagcggcuuagcguguguccuaaucuucucucugcguguagguaggccugugccgcaaacaagcuuaccaugaagugggugaccuucaucagccugcucuuucuguucuccucugccuacagcagcgccuccaaggaggugaaaucuuuccuguggacccagagccucagacgggaacuguccggcuacugcucuagcaucaaacuucaagucguuaaggacgcucaggcccugcuccacgggcuggauuuuuccgaggugucuaacgugcagcgccuuaugagaaagcagcggcgcgacgauagcgaccugaaaagacuccgggaucugaaucaagcggucaacaaucugguggaacucaaguccacacagcaaaagagcauucugcgcguuggaacgcuuaccucugacgaucugcucacacuggcugccgaccuugagaaacugaaguccaaagugaucagaaccgaacggccccucagcucuggcgucuauauggggaaccuguccacacagcagcuggagcagcgcagagcccuccugaauaugauuggaauggugggcggggcucagggaacccagccuggccgggauggcguugugcgcgucugggacgugaagaacccggaucuucugaauaaccaauucgggacaaugcccagccucacccuggccugucuuacgaaacagggacagguggaccugaaugaugcuguccucgcccugaccgaccugggccucaucuacacagcgaaguauccuaacucuuccgaccuggauagacuuagccaaucccaucccauucugaauaugguugacaccaagaaaucuagccucaacaucuccggguacaauuuuagccugggagccgcugugaaggccggcgcuugcaugcuugaugggggaaacaugcuggagacaaucaaagugaccccucagacggucgacggcauucucaagucuauccugaaagugaagcggucccugggcauguucguuagcgauacacccggggaacgcaauccuuaugagaacauucucuacaaaaucugucugucuggagacggcuggccguauauugccagcagaaccuccaucguggggcgggcgugggaaaacacaaccgucgaucuugagucugacggaaagccccagaaggugggcaccgccgggagcaauaaaucccugcagagcgcuggauuuccuacaggccucacguacucucaacugaugacccugaaggauuccaugaugcagcuugaccccagcgccaaaacauggauugauaucgagggcagaccugaagaccccguugagaucgcucucuaccagccgaugucugggugcuauauucacuucuuucgcgaaccuaccgaccugaagcaguucaaacaagaugccaaguacucccauggaaucgacguggccgaucuguuucccgcucagccuggccucacaagcgcggucauugaggcccugccccggaacauggugcuuaccugucagggguccgacgauaucaagagacugcucgacucucagggacgccgggauauuaaacugaucgacaucgcucugagcaaggccgauuccagaaaauucgaaaaugccgucugggaccaaugcaaggaucuuugucacaugcauacgggcgugguuguggagaaaaagaagcgcgggggcaaagaggaaauuacaccccacugcgcucucauggacuguaucauguaugaugccgcggucucuggaggccugaacauuccugugcugcgggcuguucucccgagagacaugguguuucgcaccagcucccccaaggucgugcugugaggacuagucccuguucccagagcccacuuuuuuuucuuuuuuugaaauaaaauagccugucuuucagaucucaaaggcucuuuucagagccaccaaaaaaaaaaaaaaaaaaaaaaaaaaaaaaaaaaaaaaaaaaaaaaaaaaaaaaaaaaaaaaaaaaaaaaaaaaaaaaaaaaaaaaaaaaaaaaaaaaaaa

SEQ ID NO: 19958 - RNA, 2052 nt, Artificial Sequence
  mRNA product Design a-2 (hSL-A100) comprising derived and/or modified sequence from LASV(LASV237-NIG-2010;Clade II)__AIT17639__SP-HsALB_NP(2-569) (opt5)
aggagaguccgcucagccagguugcagaagcggcuuagcguguguccuaaucuucucucugcguguagguaggccugugccgcaaacaagcuuaccaugaagugggugaccuucaucagccugcucuuucuguucuccucugccuacagcagcgccuccaaggaggugaaaucuuuccuguggacccagagccucagacgggaacuguccggcuacugcucuaacaucaaacuucaagucguuaaggacgcucaggcccugcuccacgggcuggauuuuagcgagguguccaaugugcagcgccuuaugagaaagcagaaacgggacgauucugaccugaagcgccucagagaucugaaccaagcggucaauaaccugguggaacucaagagcacacagcagaaauccauucugcggguuggaacgcuuaccagcgacgaucugcucacacuggcugccgaccuugagaagcugaaaucuaaggugauccgcaccgaaagaccccucuccagcggcgucuauauggggaaucugucuacacagcaacuggagcagcggcgcgcccuccugaacaugauuggaauggugggcggggcucagggaacccagccuggcagagauggcguugugcgggucugggacgugaaaaauccggaucuucugaacaaucaauucgggacaaugcccucccucacccuggccugucuuacgaagcagggacagguggaccugaacgaugcuguccucgcccugaccgaccugggccucaucuacacagcgaaguauccuaauagcucugaccuggaucgccuuucccaaagccaucccauucugaacaugguugacaucaaaaaguccucucucaauaucagcggguacaacuuuucccugggagccgcugugaaagccggcgcuugcaugcuugaugggggaaauaugcuggagaccauuaaggugacaccucagaccauggacggcauccucaaaagcauucugaaggucaaaagaucucugggcauguucguguccgauacgcccggggaacggaacccuuaugagaacauccucuacaagauuugucugagcggagacggcuggccguauaucgccucucgcacaagcauuguugggagagcgugggaaaauaccacaguggaucuugaguccgacggaaagccccagaaagucggcucugccgggagcaacaagucccugcagagcgcuggauuuccuaccggccucaccuacucucaacugaugacacugaaagauuccaugaugcagcuugaccccagcgccaagacguggaucgauaucgagggccggccugaagaccccguggagauugcucucuaccagccgaugucugggugcuauauccacuucuuuagagaaccuaccgaccugaaacaguucaagcaagaugccaaguacucccauggaauugacguugccgaucuguuucccgcucagccuggccucacaagcgcggugaucgaggcccugccccgcaauaugguccuuaccugucagggguccgacgauauuaaacggcugcucgacucucagggaagacgcgauaucaagcugaucgacauugcucugagcaaagccgauucccggagauucgaaaacgccgugugggaccaaugcaaggaucuuugucacaugcauacaggcgucgugguugagaaaaagaagcgcgggggcaaagaggaaaucacgccccacugcgcucucauggacuguauuauguaugaugccgcggugucuggaggccugaauaucccuguccugcgggcugugcucccgagagacaugguuuuucgcaccagcucccccaaggugguccugugaggacuagucccuguucccagagcccacuuuuuuuucuuuuuuugaaauaaaauagccugucuuucagaucucaaaggcucuuuucagagccaccaaaaaaaaaaaaaaaaaaaaaaaaaaaaaaaaaaaaaaaaaaaaaaaaaaaaaaaaaaaaaaaaaaaaaaaaaaaaaaaaaaaaaaaaaaaaaaaaaaaaa

SEQ ID NO: 19959 - RNA, 2052 nt, Artificial Sequence
  mRNA product Design a-2 (hSL-A100) comprising derived and/or modified sequence from LASV(LASV253-NIG-2011;Clade II)__AIT17671__SP-HsALB_NP(2-569) (opt5)
aggagaguccgcucagccagguugcagaagcggcuuagcguguguccuaaucuucucucugcguguagguaggccugugccgcaaacaagcuuaccaugaagugggugaccuucaucagccugcucuuucuguucuccucugccuacagcagcgccuccaaggaggugaaaucuuuccuguggacccagagccucagacgggaacuguccggcuacugcucuagcaucaaacuucaagucguuaaggacgcucaggcccugcuccacgggcuggauuuuuccgaggugucuaacgugcagcgccuuaugagaaagcagaaacgggacgauagcgaccugaagcgccucagagaucugaaucaagcggucaacaaucugguggaacucaaguccacccagcagaaaagcguucugcgggugggaacgcuuaccucugacgaucugcucacacuggcugccgaccuugagaagcugaaauccaaggucauucgcaccgaaagaccccucagcucuggcguguauauggggaaccuguccacacagcaacuggagcagcggcgcgcccuccugaauaugaucggaaugguuggcggggcucagggaacccagccuggcagagauggcgugguccgggugugggacgugaaaaacccggaucuucugaauaaccaauucgggacaaugcccagccucacccuggccugucuuacgaagcagggacaggucgaccugaaugauguugugcucgcucugaccgaccugggccucauuuacacagccaaguauccuaacucuuccgaccuggaucgccuuagccaaucccaucccauccugaauaugguggacaccaaaaagucuagccucaacauuuccggguacaauuuuagccugggagcggccgucaaagcuggcgccugcaugcuugaugggggaaacaugcuggagacaaucaaggugaccccucagacgauggacggcauccucaaaucuauucugaagguuaaaaagucccugggcauguucgugagcgauacacccggggaaagaaauccuuaugagaacauccucuacaagauuugucugucuggagacggcuggccguauaucgcuagccggaccuccauugucgggcgcgccugggaaaacacaaccguggaucuugagucugacggaaaaccccagaagguuggcaccgcggggagcaauaaaucccugcagagcgccggauuuccuacaggccucacguacucucaacugaugacccugaaggauuccaugaugcagcuugaccccagcgcuaaaacauggaucgauauugagggcagaccugaagaccccguggagaucgcccucuaccagccgaugucugggugcuauauccacuucuuucgggaaccuaccgaccugaagcaguucaagcaagaugcuaaauacucccauggaauugacgucacagaucuguuucccgcccagccuggccucaccagcgccgugaucgaggcucugcccagaaacaugguccuuacgugucagggguccgacgauauuaagcgccugcucgacucucagggacggagagauaucaaacugauugacaucgcgcugagcaaggccgauucccgccgguucgaaaaugcugugugggaccaaugcaaagaucuuugucacaugcauacaggcguuguggucgagaagaagaaaagagggggcaaggaggaaaucacaccccacugcgcccucauggacuguauuauguaugaugccgcugugucuggaggccugaacaucccuguucugcgcgccgugcucccgcgggacauggucuuuagaaccagcucccccaaaguggugcugugaggacuagucccuguucccagagcccacuuuuuuuucuuuuuuugaaauaaaauagccugucuuucagaucucaaaggcucuuuucagagccaccaaaaaaaaaaaaaaaaaaaaaaaaaaaaaaaaaaaaaaaaaaaaaaaaaaaaaaaaaaaaaaaaaaaaaaaaaaaaaaaaaaaaaaaaaaaaaaaaaaaaa

SEQ ID NO: 19960 - RNA, 2052 nt, Artificial Sequence
  mRNA product Design a-2 (hSL-A100) comprising derived and/or modified sequence from LASV(LASV254-NIG-2011;Clade II)__AIT17675__SP-HsALB_NP(2-569) (opt5)
aggagaguccgcucagccagguugcagaagcggcuuagcguguguccuaaucuucucucugcguguagguaggccugugccgcaaacaagcuuaccaugaagugggugaccuucaucagccugcucuuucuguucuccucugccuacagcagcgccuccaaggaggugaaaucuuuccuguggacccagagccucagacgggaacuguccggcuacugcucuagcaucaaacuucaagucguuaaggacgcucaggcccugcuccacgggcuggauuuuuccgaggugucuaacgugcagcgccuuaugagaaagcagaaacgggacgauagcgaccugaagcgccucagagaucugaaucaagcggucaacaaucugguggaacucaaguccacacagcagaaaagcguucugcgggugggaacgcuuaccucugacgaucugcucacacuggcugccgaccuugagaagcugaaauccaaggucauucgcaccgaaagaccccucagcucuggcguguauauggggaaccuguccacacagcaacuggagcagcggcgcgcccuccugaauaugaucggaaugguuggcggggcucagggaacccagccuggcagagauggcgugguccgggugugggacgugaaaaacccggaucuucugaauaaccaauucgggacaaugcccagccucacccuggccugucuuacgaagcagggacaggucgaccugaaugaugcuguucucgcccugaccgaccugggccucauuuacacagcgaaguauccuaacucuuccgaccuggaucgccuuagccaaucccaucccauccugaauaugguggacaccaaaaagucuagccucaacauuuccggguacaauuuuagccugggagccgcugugaaagccggcgcuugcaugcuugaugggggaaacaugcuggagacaaucaaggucaccccucagacgauggacggcauccucaaaucuauucugaaggugaaaaagucccugggcauguucguuagcgauacacccggggaaagaaauccuuaugagaacauccucuacaagauuugucugucuggagacggcuggccguauaucgccagccggaccuccauuguggggcgcgcgugggaaaacacaaucgucgaucuugagucugacggaaaaccccagaaggugggcaccgccgggagcaauaaaucccugcagagcgcuggauuuccuaccggccucacauacucucaacugaugacgcugaaggauuccaugaugcagcuugaccccagcgccaaaaccuggauugauaucgagggcagaccugaagaccccguugagaucgcucucuaccagccgaugucugggugcuauauucacuucuuucgggaaccuacagaccugaagcaguucaagcaagaugccaaauacucccauggaaucgacguggccgaucuguuucccgcucagccuggccucaccagcgcggucauugaggcccugcccagaaacauggugcuuacaugucagggguccgacgauaucaagcgccugcucgacucucagggacggagagauauuaaacugaucgacaucgcucugagcaaggccgauucccgccgguucgaaaaugccgucugggaccaaugcaaagaucuuugucacaugcauaccggcgugguuguggagaagaagaaaagagggggcaaggaggaaauuacgccccacugcgcucucauggacuguaucauguaugaugccgcggucucuggaggccugaacauuccugugcugcgcgcuguucucccgcgggacaugguguuuagaacaagcucccccaaagucgugcugugaggacuagucccuguucccagagcccacuuuuuuuucuuuuuuugaaauaaaauagccugucuuucagaucucaaaggcucuuuucagagccaccaaaaaaaaaaaaaaaaaaaaaaaaaaaaaaaaaaaaaaaaaaaaaaaaaaaaaaaaaaaaaaaaaaaaaaaaaaaaaaaaaaaaaaaaaaaaaaaaaaaaa

SEQ ID NO: 19961 - RNA, 2052 nt, Artificial Sequence
  mRNA product Design a-2 (hSL-A100) comprising derived and/or modified sequence from LASV(Nig08-04;Clade II)__ADU56611__SP-HsALB_NP(2-569) (opt5)
aggagaguccgcucagccagguugcagaagcggcuuagcguguguccuaaucuucucucugcguguagguaggccugugccgcaaacaagcuuaccaugaagugggugaccuucaucagccugcucuuucuguucuccucugccuacagcagcgccuccaaggaggugaaaucuuuccuguggacccagagccucagacgggaacuguccggcuacugcucuaacaucaaacuucaagucguuaaggacgcucaggcccugcuccacgggcuggauuuuagcgagguguccaaugugcagcgccuuaugagaaagcagaaacgggacgauggagaccugaagcgccucagagaucugaaccaagcggucaauaaccugguggaacucaagucuacccagcagaaaagcguucugcgggugggcacgcuuaccuccgacgaucugcucacacuggcugccgaccuugagaagcugaaaagcaaggucauucgcaccgaaagaccccucucuuccgggguguauaugggaaaucugagcacacagcaacuggagcagcggaaagcccuccugucuaugaucggcaugguugggggagcucagggcacccagccuggccgcgaugggguggucagagugugggacgugaagaacccggaucuucugaauaaccaauucggaacaaugcccucccucacccuggccugucuuacgaagcagggccaggucgaccugaaugaugcuguucucgcccugaccgaccuggggcucauuuacacagcgaaauauccuaacagcucugaccuggaucggcuuucccaaagccaucccauccugaauaugguggacaccaagaaauccucucucaacauuagcggauacaauuuuucccugggcgccgcugugaaggccggggcuugcaugcuugauggaggcaacaugcuggagacaaucaaagucaccccucagacgauggacggcauccucaagagcauucugaaagugaagcgcucucuggggauguucguuuccgauacacccggagaaagaaauccuuaugagaacauccucuacaagauuugucugagcggcgacggguggccguauaucgccucucggaccagcauugugggacgcgcgugggaaaacacaaccgucgaucuugaguccgacggcaaaccccagaagguggggaccgccggaucuaauaaaagccugcaguccgcuggcuuuccuacaggccucacguacagccaacugaugacccugaaggauucuaugaugcagcuugaccccuccgccaaaacauggaucgauauugaggggagaccugaagaccccguugagaucgcucucuaccagccgaugagcggaugcuauauccacuucuuucgggaaccuaccgaccugaagcaguucaagcaagaugccaaauacucucauggcauugacgugacagaucuguuuuccgcccagcccgggcucaccagcgcugucaucgaggcgcugccuagaaacauggugcuuacgugucagggauccgacgauauuaagaaacugcucgacucucagggccgccgggauaucaagcugauugacaucagccugaauaaagccgauuccagacgcuucgaaaacgcugucugggaccaaugcaaggaucuuugucacaugcauacaggggugguuguggagaagaaaaagcggggcggaaaagaggaaaucacaccccacugcgcccucauggacuguauuauguuugaugccgcugucucuggcgggcugaauauccccauucugagagccgugcucccucgcgacaugguuuuccggaccagcuccccgaaggugguccugugaggacuagucccuguucccagagcccacuuuuuuuucuuuuuuugaaauaaaauagccugucuuucagaucucaaaggcucuuuucagagccaccaaaaaaaaaaaaaaaaaaaaaaaaaaaaaaaaaaaaaaaaaaaaaaaaaaaaaaaaaaaaaaaaaaaaaaaaaaaaaaaaaaaaaaaaaaaaaaaaaaaaa

SEQ ID NO: 19962 - RNA, 2055 nt, Artificial Sequence
  mRNA product Design a-2 (hSL-A100) comprising derived and/or modified sequence from LASV(GA391;Clade III)__AAA46284__SP-HsALB_NP(2-570) (opt5)
aggagaguccgcucagccagguugcagaagcggcuuagcguguguccuaaucuucucucugcguguagguaggccugugccgcaaacaagcuuaccaugaagugggugaccuucaucagccugcucuuucuguucuccucugccuacagcagcgccuccaaggaggugagaucuugccuguggacccagagccuccggcgcgaacuguccggcuacuguucuaacaucaaacuucaagucguuaaggacgcucaggcccugcuccacgggcuggauuucagcgagguguccaaugugcagagacuuaugcggaaacagaagcgcgacgauggagaccugaaaagacuccgggaucugaaccaagcggucaauaaccugguggaacucaagucuacacagcagaaaagcguucugcgcgugggcacgcuuuccagcgacgaucugcucauucuggcugccgaccuugagaaacugaagucuaaagucaccagaacagaacggccccucuccagcgggguguauaugggaaaucugucuucccagcaacuggaucagcgcagagcccuccugaacaugaucggcaugaccgggguuagcggaggcggcaagggggcuucuaauggaauugugcgggucugggacgugaaaaacgccgagcuucugaauaaccaguuuggcacaaugccuucccucacccuggcuugccuuacaaagcaggggcaaguggaucugaaugacgccguccaggcgcucaccgaucugggacugaucuacacggccaaguauccgaacagcuccgaccucgaccgccugucucagagccaucccauucuuaauaugaucgauaccaaaaaguccagccugaacaucucuggcuacaauuucucccucggggcugccguuaaagcuggagccuguaugcuggacggcggcaacaugcuugagacaauuaaggugagcccucaaaccauggaugggauccugaaaucuauucucaaggugaaaaagagccugggaauguuugucuccgacacacccggcgaaagaaacccuuaugagaauauccuguacaagauuugccucucuggggauggauggagcuauaucgcgucccggaccagcauugugggccgcgccugggaaaacacgguuguggaccuggagcaggauaauaaaccccagaagaucgggaacggaggcucuaauaaaucccuucagagcgcuggcuucgccgcugggcugaucuacucucaacucaugacacugaaggacuuuaaauguuucaaccugauuccuaaugccaagaccuggauggauaucgagggaagaccggaagaccccgucgagauugcccuuuaccagccuuccagcggcugcuaugugcacuuuuuccgggaacccacagaucucaagcaguuuaaacaggacgcuaaguacucccaugggagagacguuaccgaucuguucgcggcccaaccuggacugaccucugcugugaucgaggcccucccccgcaacauggucauuacaugucagggcagcgaagacauccggaaacugcuugagucccaggggagacgcgauaucaagcugauugacaucacgcucucuaaagccgauagccggaaguuugagaaugcugugugggaccaguucaaggaucugugccacaugcauaccggcgucgugguugaaaagaagaaaagaggaggcaaggaggaaauuacaccgcacugugcccugauggacugcaucauguuugaugcggcuguguccgggggacuugacgccaaaguccuccgcgugguucugccucgggauaugguguucagaaccagcacacccaaggucgugcugugaggacuagucccuguucccagagcccacuuuuuuuucuuuuuuugaaauaaaauagccugucuuucagaucucaaaggcucuuuucagagccaccaaaaaaaaaaaaaaaaaaaaaaaaaaaaaaaaaaaaaaaaaaaaaaaaaaaaaaaaaaaaaaaaaaaaaaaaaaaaaaaaaaaaaaaaaaaaaaaaaaaaa

SEQ ID NO: 19963 - RNA, 2052 nt, Artificial Sequence
  mRNA product Design a-2 (hSL-A100) comprising derived and/or modified sequence from LASV(Nig08-A19;Clade III)__ADU56619__SP-HsALB_NP(2-569) (opt5)
aggagaguccgcucagccagguugcagaagcggcuuagcguguguccuaaucuucucucugcguguagguaggccugugccgcaaacaagcuuaccaugaagugggugaccuucaucagccugcucuuucuguucuccucugccuacagcagcgccuccaaggaggugaaaucuuuccuguggacccagagccucagacgggaacuguccggcuacugcucuaacaucaaacuucaagucguuaaggacgcucaggcccugcuccacgggcuggauuuuagcgagguguccaaugugcagcgccuuaugagaaagcagaaacgggacgauggagaccugaagcgccucagagaucugaaccaagcggucaauaaccugguggaacucaagucuacacagcagaaaagcguucugcgggugggcacgcuuuccagcgacgaucugcucguccuggcugccgaccuugagaagcugaaaucuaaggugguucgcaccgaaagaccccucuccagcgggauuuauaugggaaaucugucuucccagcaacuggaucagcggaaagcccuccugaacaugaucggcaugacagggggaaauggcggccgcaacaccacaagcgacgggauugugagagucugggaugugaagaaugcugagcuucugaacaaucaguucggaaccaugccuucucucacacuggccugucuuaccaagcagggccaaguggaccugaacgaugcuguccaggcccucacggaccuggggcugaucuacaccgcgaaauaucccaauuccagcgaccucgaucggcuggcccagucccauccgauucuuaacaugaucgacacaaagaaaucuagccugaauaucuccggauacaacuuuagccucggcgcugccguuaaggcuggggccugcaugcuggauggaggcaacaugcuugagaccauuaaagugucuccucaaacaauggacggcauccugaaguccauucucaaagugaagcgcagccuggggauguucaucucugauacccccggagaaagaaauccuuaugagaacauucuguacaagaucugucucagcggcgacggguggcccuauauugcgucccggacgucuaucgucggacgcgccugggaaaauacagugguugaucuggagagcgacaacaaaccucagaagaccggcaaugggggauccaacaaaagccuucagucugcuggcuuugccgcuggccugacauacucccagcucaugacccugaaggauagcaugcugcaacuugacccgaaugccaaaaccuggauggauaucgaggggagacccgaagacccuguggagauugcccucuaccagcccucuuccggaugcuauauccacuucuuucgggaaccuacagaccugaagcaguucaagcaggaugcuaaauacagccauggcauugacgucacggaucuguuugcggcccaacccgggcucaccuccgcugugaucgaggcccugccgagaaacaugguuauuacaugucagggaucugaagacauccgcaaacuucuggagagccagggccggagagauaucaagcucauugacaucucccugucuaagguggauagccgcaaauucgagaaugccgucugggaccaguuuaaggaucugugccacaugcauaccgggauuguggucgaaaagaaaaagcggggcggaaaagaggaaaucacaccucacugugcucuuauggacugcauuauguucgaugccgcgguguccggcgggguugacgcuaaggugcucagagccguccugccccgcgauaugguguuucggaccagcacgccuaaaguugugcugugaggacuagucccuguucccagagcccacuuuuuuuucuuuuuuugaaauaaaauagccugucuuucagaucucaaaggcucuuuucagagccaccaaaaaaaaaaaaaaaaaaaaaaaaaaaaaaaaaaaaaaaaaaaaaaaaaaaaaaaaaaaaaaaaaaaaaaaaaaaaaaaaaaaaaaaaaaaaaaaaaaaaa

SEQ ID NO: 19964 - RNA, 2052 nt, Artificial Sequence
  mRNA product Design a-2 (hSL-A100) comprising derived and/or modified sequence from LASV(G1180-SLE-2010;Clade IV)__AIT17169__SP-HsALB_NP(2-569) (opt5)
aggagaguccgcucagccagguugcagaagcggcuuagcguguguccuaaucuucucucugcguguagguaggccugugccgcaaacaagcuuaccaugaagugggugaccuucaucagccugcucuuucuguucuccucugccuacagcagcgccuccaaggagaucaaaucuuuccuguggacccagagccucagacgggaacuguccggcuacugcucuaacauuaagcugcaaguggucaaagacgcucaggcccugcuccacgggcuggauuuuagcgagguuuccaaugugcagcgccuuaugagaaaggaacggcgcgacgauaacgaccugaaaagacuccgggaucugaaucaggcggugaacaaucuggucgagcucaagucuacacaacaaaagagcauccugcgcgugggaacgcuuaccuccgacgaucugcucauucuggcugccgaccuugaaaaacuuaagagcaaaguuaucagaacagagcggccccucucugccggcguguauauggggaaccuguccagccagcagcuggaucagcgcagagcucuccugucuaugauuggaauguccagcggcaaucagcgggcccaggcugggcgcgacggagucgugagaguuugggaugugaagaacgucgagcuucugaauaaccaguucggcaccaugccuucucucacacuggccugucuuaccaaacaaggccagguggaccugaaugaugcggugcaggcccucacagaccuggggcugaucuacaccgcuaaguauccgaacacguccgaccucgaucggcugacccaaagccaucccauccuuaauaugauugacacaaagaaauccucucugaacaucagcggauacaauuuuucccucggcgccgcugucaaggccggggcgugcaugcuggauggaggcaacaugcuugaaaccauuaaaguuagcccucagacaauggacgggauccugaagucuauucucaaagugaagaaagcccugggaauguucaucuccgauacccccggcgagcgcaacccuuaugaaaauauucuguacaagaucugucucagcggcgacggguggcccuauaucgcuucuagaacgagcauuacaggacgggccugggagaacaccguggucgaucuggaguccgacggcaagccucagaaagcugggucuaauaacagcaauaagucccuucagagcgugggauuuacagccggccugaccuacucucaacucaugacccugaaagaugccaugcugcagcuugacccgaacgcuaagacauggauggauaucgaagggagacccgaggacccuguugaaauugcgcucuaccagcccuccagcggaugcuauauccacuucuuucgcgagccuacggaccugaaacaguucaagcaagaugccaaguacucucauggcauugacgugaccgaucuguuugcugcccagcccggccucacauccgccgucaucgacgcucugccgcggaauauggugaucaccugucaggggagcgaugacauuagaaaacuucuggaaucccagggacgcaaggauaucaaacucauugacaucgcccugucuaagacagauagccggaaauaugagaacgcgguuugggaccaauacaaggaucugugccacaugcauaccggcguggucguggagaagaaaaagagagggggaaaagaagagauuacgccucacugugcucuuauggacugcaucauguucgaugccgccgucuccggcgggcucaauacaucugugcugcgcgcuguucugccccgggacaugguguuuagaaccagcaccccucgcgucgugcucugaggacuagucccuguucccagagcccacuuuuuuuucuuuuuuugaaauaaaauagccugucuuucagaucucaaaggcucuuuucagagccaccaaaaaaaaaaaaaaaaaaaaaaaaaaaaaaaaaaaaaaaaaaaaaaaaaaaaaaaaaaaaaaaaaaaaaaaaaaaaaaaaaaaaaaaaaaaaaaaaaaaaa

SEQ ID NO: 19965 - RNA, 2052 nt, Artificial Sequence
  mRNA product Design a-2 (hSL-A100) comprising derived and/or modified sequence from LASV(G1442-SLE-2011;Clade IV)__AIT17181__SP-HsALB_NP(2-569) (opt5)
aggagaguccgcucagccagguugcagaagcggcuuagcguguguccuaaucuucucucugcguguagguaggccugugccgcaaacaagcuuaccaugaagugggugaccuucaucagccugcucuuucuguucuccucugccuacagcagcgccuccaaggaggugaaaucuuuccuguggacccagagccucagacgggaacuguccggcuacugcucuaacaucaaacuucaagucguuaaggacgcucaggcccugcuccacgggcuggauuuuagcgagguguccaaugugcagcgccuuaugagaaagcagcggcgcgacgauaacgaccugaaaagacuccgggaucugaaucaagcggucaacaaucugguggaacucaagucuacacagcaaaagagcguucugcgcgugggaacgcuuaccuccgacgaucugcucguccuggcugccgaccuugagaaacuuaagagcaaagugauuagaacagaacggccccucucugccggcguuuauauggggaaccuguccagccagcagcuggaucagcgcagagcucuccugaauaugaucggaaugucuggcgggauucagggaacccggacaggccgcgacggcguggucagagugugggaugugaagaacgccgaccuucugaauaaccaguucgggaccaugccuucccucacacuggcuugucuuaccaaacaaggacaggucgaucugaaugacguugugcaggcccucacggaccugggccugaucuacaccgcgaaguauccgaacgccagcgaucucgaccggcugacacaaucucaucccauucuuaauaugaucgauaccaagaaauccagccugaacaucuccggguacaauuuuucucucggagcugccgugaaggcuggcgccugcaugcuggacgggggaaacaugcuugagacaauuaaagucagcccucagaccauggauggcauccugaaguccauucucaaagugaagaaaacgcugggcauguucaucagcgacacacccggggagcgcaacccuuaugaaaauauucuguacaagaucugucucucuggagauggcuggcccuauauugcguccagaaccagcaucacagggcgggccugggagaacaccguuguggaccuggaaucugauggaaagccucagaaagcuggcagcaauaacuccaauaagucucuucagagcgccggguuugcugccggacugaccuacucccaacucaugacacugaaagacgccaugcugcagcuugauccgaacgcuaagacguggauggacaucgagggcagacccgaggacccugucgaaauugcgcucuaccagcccagcucuggcugcuauauccacuucuuucgcgagccuaccgaucugaaacaguucaagcaagacgccaaguacucccaugggauugaugugacagaccuguuugcugcccagcccggacucaccagcgccguuaucgaagcucugccgcggaauauggugauuacaugucagggcucugaugacaucaaaaagcugcuggagucccaggggagaaaagauaucaagcucauugacaucgcccugagcaaaaccgauucccgcaaguaugaaaacgcggucugggaccaauacaaggaucugugccacaugcauacgggaguggucguggagaaaaagaaacggggcgggaaggaggaaauuacaccucacugugcucuuauggacugcaucauguucgaugccgccguuucuggcggacucaauacccuggugcugagagcuguccucccccgcgacaugguguuucggaccagcacaccuagaguugugcugugaggacuagucccuguucccagagcccacuuuuuuuucuuuuuuugaaauaaaauagccugucuuucagaucucaaaggcucuuuucagagccaccaaaaaaaaaaaaaaaaaaaaaaaaaaaaaaaaaaaaaaaaaaaaaaaaaaaaaaaaaaaaaaaaaaaaaaaaaaaaaaaaaaaaaaaaaaaaaaaaaaaaa

SEQ ID NO: 19966 - RNA, 2052 nt, Artificial Sequence
  mRNA product Design a-2 (hSL-A100) comprising derived and/or modified sequence from LASV(G3010-SLE-2013;Clade IV)__AIT17345__SP-HsALB_NP(2-569) (opt5)
aggagaguccgcucagccagguugcagaagcggcuuagcguguguccuaaucuucucucugcguguagguaggccugugccgcaaacaagcuuaccaugaagugggugaccuucaucagccugcucuuucuguucuccucugccuacagcagcgccuccaaggagaucaaaucuuuccuguggacccagagccucagacgggaacuguccggcuacugcucuaacauuaaacuucaaguggucaaagacgcucaggcccugcuccacgggcuggauuuuagcgagguuuccaaugugcagcgccuuaugagaaaggaacggcgcgacgauaacgaccugaaaagacuccgggaucugaaucaggcggugaacaaucuggucgagcucaagucuacacaacaaaagagcauccugcgcgugggaacgcuuaccuccgacgaucugcucauucuggcugccgaccuugaaaaacuuaagagcaaaguuacaagaaccgagcggccccucucugccggcguguauauggggaaccuguccagccagcagcuggaucagcgcagagcucuccugucuaugaucggaauguccagcggcguccagggggcccgggcuggacgcgacggcgugguuagagugugggaugucaagaaugccgagcuucugaacaaucaguucggcacaaugccuucucucacccuggcgugucuuacaaaacaggggcaaguggaccugaacgaugugguccaggcccucaccgaccugggacugauuuacacggcuaaguauccgaauaccuccgaccucgaucggcugacacagagccaucccauccuuaacaugaucgacaccaagaaauccucucugaauauuagcggcuacaacuuuucccucggggccgcuguuaaggccggagcgugcaugcuggauggcgggaauaugcuugaaacaaucaaagugagcccucaaaccauggacggcauucugaagucuauccucaaagugaagaaagcccugggaauguucauuuccgagacgcccggcgaacgcaacccuuaugagaacauccuguacaagauuugucucagcggggauggauggcccuauaucgcuucuagaacaagcaucaccggccgggccugggagaauacagucguggaccuggaauccgaugggaagccucagaaagcuggaucuaacaauagcaacaagucccuucagagcgccggcuuuaccgccgggcugaccuacucucagcucaugacacugaaagacgcuaugcugcaacuugauccgaaugcgaagacguggauggacauugagggaagacccgaagauccuguugagguggcccucuaccagcccuccagcggcugcuauauccacuucuuucgcgaaccuaccgaccugaaacaguucaagcaggacgcuaaguacucucauggcauugaugucacagaccuguuugccgcccaacccgggcucaccuccgcugugaucgaugcccugccgcggaacaugguuauuacaugucagggaagcgacgauaucaaaaagcugcuggagucccagggcagaaaagacaucaagcucauugauaucgcgcugucuaaaaccgacagccgcaaguaugagaaugcugugugggaucaguacaaggaccugugccacaugcauacgggggucguggucgaaaagaagaaacggggaggcaaggaggaaauuacaccucacugugcccuuauggauugcaucauguucgacgccgcuguguccgggggccucaacaccucuguucugagagccgugcugccccgcgauauggucuuucggaccagcacaccuagagugguucucugaggacuagucccuguucccagagcccacuuuuuuuucuuuuuuugaaauaaaauagccugucuuucagaucucaaaggcucuuuucagagccaccaaaaaaaaaaaaaaaaaaaaaaaaaaaaaaaaaaaaaaaaaaaaaaaaaaaaaaaaaaaaaaaaaaaaaaaaaaaaaaaaaaaaaaaaaaaaaaaaaaaaa

SEQ ID NO: 19967 - RNA, 2052 nt, Artificial Sequence
  mRNA product Design a-2 (hSL-A100) comprising derived and/or modified sequence from LASV(G502-SLE-2009;Clade IV)__AIT17127__SP-HsALB_NP(2-569) (opt5)
aggagaguccgcucagccagguugcagaagcggcuuagcguguguccuaaucuucucucugcguguagguaggccugugccgcaaacaagcuuaccaugaagugggugaccuucaucagccugcucuuucuguucuccucugccuacagcagcgccuccaaggagaucaaaucuuuccuguggacccagagccucagacgggaacuguccggcuacugcucuaacauuaagcugcaaguggucaaagacgcucaggcccugcuccacgggcuggauuuuagcgagguuuccaaugugcagcgccuuaugagaaaggaacggcgcgacgauaacgaccugaaaagacuccgggaucugaaucaggcggugaacaaucuggucgagcucaagucuacacaacaaaagagcauccugcgcgugggaacgcuuaccuccgacgaucugcucauucuggcugccgaccuugaaaaacuuaagagcaaaguuaucagaacagagcggccccucucugccggcguguauauggggaaccuguccagccagcagcuggaucagcgcagagcucuccugucuaugauuggaauguccggcgggaaucagggaguccgggccggcaaggacggcgugguucgcgugugggaugucaaaaacgcugagcuucugaauaaccaguucgggaccaugccuagccucacacuggccugucuuaccaagcagggacaaguggaccugaaugaugcggugcaggcccucacagaccugggccugaucuacaccgcuaaguauccgaacacgucugaccucgauagacugacccagucccaucccauccuuaauaugauugacaccaaaaagagcucccugaacaucucuggguacaauuuuagccucggagccgcugucaaagccggcgcgugcaugcuggaugggggaaacaugcuugaaacaauuaagguuuccccucaaacaauggacggcauccugaaaagcauucucaaggugaaaaaggcccugggcauguucaucucugauacccccggggagcggaacccuuaugaaaauauucuguacaagaucugucucuccggagacggcuggcccuauaucgcuagccgcacgucuauuacagggagagccugggagaacaccguggucgaucuggagagcgacggaaaaccucagaaggcuggcuccaauaacucuaauaaaagccuucaguccgccggguuuacagccggacugaccuacagccagcucaugacccugaaggaugcuaugcugcaacuugacccgaacacaaaaacguggauggauaucgaaggccggcccgaggacccuguggaaauugcgcucuaccagcccucuuccggcugcuauauccacuucuuuagagagccuaccgaccugaagcaguucaagcaggaugccaaauacagccaugggauugacguuacagaucuguuugcugcccaacccggacucaccucugccgugaucgacgcucugccgcgcaauauggucaucacaugucagggcuccgaugacauucggaaacuucuggaaagccaggggagaaaggauaucaagcucauugacaucgcccugaacaaaaccgauucccgcaaguaugagaaugcggugugggaccaguacaaggaucugugccacaugcauacgggaguuguggucgagaaaaagaaacggggcgggaaggaagagauuacaccucacugugcucuuauggacugcaucauguucgaugccgccgugucuggcggacucaacaccagcguccugagagcugugcugccccgcgacaugguuuuucggaccuccacaccuagagugguccucugaggacuagucccuguucccagagcccacuuuuuuuucuuuuuuugaaauaaaauagccugucuuucagaucucaaaggcucuuuucagagccaccaaaaaaaaaaaaaaaaaaaaaaaaaaaaaaaaaaaaaaaaaaaaaaaaaaaaaaaaaaaaaaaaaaaaaaaaaaaaaaaaaaaaaaaaaaaaaaaaaaaaa

SEQ ID NO: 19968 - RNA, 2052 nt, Artificial Sequence
  mRNA product Design a-2 (hSL-A100) comprising derived and/or modified sequence from LASV(G733-SLE-2010;Clade IV)__AIT17155__SP-HsALB_NP(2-569) (opt5)
aggagaguccgcucagccagguugcagaagcggcuuagcguguguccuaaucuucucucugcguguagguaggccugugccgcaaacaagcuuaccaugaagugggugaccuucaucagccugcucuuucuguucuccucugccuacagcagcgccuccaaggagaucaaaucuuuccuguggacccagagccucagacgggaacuguccggcuacugcucuaacauuaagcugcaaguggucaaagacgcucaggcccugcuccacgggcuggauuuuagcgagguuuccaaugugcagcgccuuaugagaaaggaacggcgcgacgauaacgaccugaaaagacuccgggaucugaaucaggcggugaacaaucuggucgagcucaagucuacacaacaaaagagcgugcugcgcguuggaacgcuuaccuccgacgaacugcucgugcuggcugccgaucuugagaaacuuaagagcaaagucaucagaacagagcggccccucucugccggcguguauauggggaaccuguccagccagcagcuggaccagcgcagagcucuccugucuaugauuggaauguccggcgggaaucagggagcccggaccggccgcgauggcguugugagagucugggacgugaagaacgcugaacuucugaauaaccaguucgggacaaugccuagccucacccuggccugucuuacaaaacagggacaaguggaucugaaugacgcgguccaggcccucaccgaucugggccugaucuacacggcuaaguauccgaacaccucugaccucgaccggcugacacagucccaucccauucuuaauaugaucgauaccaagaaaagcucccugaacaucucuggguacaauuuuagccucggagccgcuguuaaggccggcgcgugcaugcuggacgggggaaacaugcuugagacaauuaaaguguccccucaaaccauggauggcauccucaagagcauucugaaagugaagaaagcccugggcauguucaucucugacacgcccggggaacgcaacccuuaugagaauauucuguacaagaucugucucuccggagauggcuggcccuauauugcuagcagaacaucuaucaccgggcgggccugggagaacacagucguggaccuggaaagcgauggaaagccucagaaagcuggcuccaauaacucuaauaagagccuucaguccgccggguuuaccgccggacugaccuacagccagcucaugacacugaaagacgcuaugcugcaacuugauccgaacgcgaagacguggauggacaucgagggcagacccgaagauccuguugagauugcccucuaccagcccucuuccggcugcuauauccacuucuuucgcgaaccuaccgaccugaaacaguucaagcaggacgcuaaguacagccaugggauugaugugacagaccuguuugccgcccaacccggacucaccucugcugucaucgaugcccugccgcggaauauggugauuacaugucagggcuccgacgauaucagaaaacuucuggagagccaggggcgcaaggacaucaaacucauugauaucgcgcuguccaagauugacucucggaaauaugagaacgcuguuugggaucaguacaaggaccugugccacaugcauaccggaguggucguggaaaagaaaaagagaggcgggaaagaggaaaucacgccucacugugcccuuauggauugcauuauguucgacgccgcugucagcggcggacucaauucccuggugcugcgcgccguucucccccgggauaugguguuuagaacaucuaccccucgcgucgugcugugaggacuagucccuguucccagagcccacuuuuuuuucuuuuuuugaaauaaaauagccugucuuucagaucucaaaggcucuuuucagagccaccaaaaaaaaaaaaaaaaaaaaaaaaaaaaaaaaaaaaaaaaaaaaaaaaaaaaaaaaaaaaaaaaaaaaaaaaaaaaaaaaaaaaaaaaaaaaaaaaaaaaa

SEQ ID NO: 19969 - RNA, 2052 nt, Artificial Sequence
  mRNA product Design a-2 (hSL-A100) comprising derived and/or modified sequence from MOPV/LASV reassortant(IGS-1;Clade IV)__AFY05578__SP-HsALB_NP(2-569) (opt5)
aggagaguccgcucagccagguugcagaagcggcuuagcguguguccuaaucuucucucugcguguagguaggccugugccgcaaacaagcuuaccaugaagugggugaccuucaucagccugcucuuucuguucuccucugccuacagcagcgccuccaaggagaucaaaucuuuccuguggacccagagccucagacgggaacuguccggcuacugcucuaacauuaaacuucaaguggucaaggacgcucaggcccugcuccacgggcuggauuuuagcgagguuuccaaugugcagcgccuuaugagaaaggaacggcgcgacgauaacgaccugaaaagacuccgggaucugaaucaggcggugaacaaucuggucgagcucaagucuacacaacaaaagagcauccugcgcgugggaacgcuuaccuccgacgaucugcucauucuggcugccgaccuugaaaaacugagaagcaagguuauccggacagagcgcccccucucugccggcguguauauggggaaccuguccagccagcagcuggaucagagacgggcucuccugaauaugauuggaaugucuggcgggaaccagggagcccgcgcuggcagagacggcgucgugcggguuugggaugugaaaaaugccgagcuucuguccaaccaguucgggaccaugccuagccucacacuggcgugucuuaccaagcagggacaagucgaccugaaugaugccgugcaggcucucacagaccugggccugaucuacaccgccaaauauccgaacacgucugaccucgaucgccugacccagucccaucccauccuuaauaugauugacacaaagaaaagcucccugaacaucucuggguacaauuuuagccucggagcugccgugaaggcgggcgccugcaugcuggaugggggaaacaugcuugaaaccauuaaggucuccccucaaacaauggacggcauccugaaaagcauucucaagguuaaaaaggcucugggcauguucaucucugauacccccggggagagaaacccuuaugaaaauauucuguacaaaaucugucucuccggagacggcuggcccuauaucgccagccggacgucuauuacagggagagcuugggagaacaccgugguggaucuggagagcgacggaaagccucagaaggccgauuccaauaacucuagcaaaucccuucagagcgccggcuuuacagcugggcugaccuacucucagcucaugacccugaaggacgcgaugcugcaacuugauccgaaugccaaaacauggauggacaucgaaggacgccccgaggacccugucgaaauugcucucuaccagcccuccagcggcugcuauauccacuucuuucgggagccuacggaucugaagcaguucaaacaggacgccaaguacucucauggcauugaugugaccgaccuguuugccacacaacccgggcucaccuccgcuguuaucgaugcccugccgagaaacauggugaucacaugucagggaagcgacgauauucgcaaacuucuggaaucccagggccggaaggacaucaagcucauugauaucgaccugucuaaaaccgauagcagaaaguaugagaaugcggucugggaccaguacaaagaucugugccacaugcauacgggggugguuguggagaagaagaaacgcggaggcaaggaagagauuacaccucacugugcucuuauggacugcaucauguucgacgccgccgucuccgggggccucaacaccucugugcugcgggcuguccugcccagagauaugguguuucgcaccagcacaccucggguugugcucugaggacuagucccuguucccagagcccacuuuuuuuucuuuuuuugaaauaaaauagccugucuuucagaucucaaaggcucuuuucagagccaccaaaaaaaaaaaaaaaaaaaaaaaaaaaaaaaaaaaaaaaaaaaaaaaaaaaaaaaaaaaaaaaaaaaaaaaaaaaaaaaaaaaaaaaaaaaaaaaaaaaaa

SEQ ID NO: 19970 - RNA, 2052 nt, Artificial Sequence
  mRNA product Design a-2 (hSL-A100) comprising derived and/or modified sequence from LASV(LM765-SLE-2012;Clade IV)__AIT17815__SP-HsALB_NP(2-569) (opt5)
aggagaguccgcucagccagguugcagaagcggcuuagcguguguccuaaucuucucucugcguguagguaggccugugccgcaaacaagcuuaccaugaagugggugaccuucaucagccugcucuuucuguucuccucugccuacagcagcgccuccaaggagaucaaaucuuuccuguggacccagagccucagacgggaacuguccggcuacugcucuaacauuaagcugcaaguggucaaagacgcucaggcccugcuccacgggcuggauuuuagcgagguuuccaaugugcagcgccuuaugagaaaggaacggcgcgacgauaacgaccugaaaagacuccgggaucugaaucaggcggugaacaaucuggucgagcucaagucuacacaacaaaagagcauccugcgcgugggaacgcuuaccuccgacgaucugcucauucuggcugccgaccuugaaaaacuuaagagcaaaguuacaagaaccgagcggccccucucugccggcguguauauggggaaccuguccagccagcagcuggaucagcgcagagcucuccuggacaugaucggaaugucuggcuccaaucagggggcccgggcuggacgcgauggcgucgugagaguuugggacgugaagaacgccgagcuucugaauaaccaguucggcacaaugccuagccucacccuggcgugucuuacaaaacaggggcaagucgaucugaaugacgccgugcaggcucucaccgaccugggacugauuuacacggccaaguauccgaacaccucugaucucgaccggcugacacagucccaucccauccuuaauaugaucgauaccaagaaaagcucccugaacauuucuggcuacaauuuuagccucggggcugccgugaaggcgggagccugcaugcuggacggcgggaacaugcuugaaacaaucaaagucuccccucaaaccauggauggcauucucaagagcauccugaaaguuaagaaagcucugggaauguucauuucugacgcccccggcgagcgcaacccuuaugaaaauauccuguacaagauuugucucuccggggauggauggcccuauaucgcuagcagaacgucuaucacaggccgggccugggagaacaccgugguggaccuggagagcgaugggaagccucagaaagccggauccaauggcucuaacaagagccuucaguccgcuggguuuacagcgggacugaccuacagccagcucaugacccugaaagacgccaugcugcaacuugauccgaaugcuaagacauggauggacauugaaggcagacccgaggacccugucgaaaucgcccucuaccagcccucuuccggcugcuauauucacuucuuucgcgagccuacggaucugaaacaguucaagcaggacgccaaguacagccaugggaucgaugugaccgaccuguuugcugcccaacccggacucacaucugcgguuauugaugcucugccgcggaacauggugaucaccugucagggcuccgacgauaucagaaaacuuuucgaaagccaggggcgcaaggacauuaaacugaucgauauugcccucuccaagacagacucucggaaauaugagaaugccgucugggaucaguacaaggaccugugccacaugcauaccggaaucgugguugagaagaaaaagagaggcgggaaagaagagauuacgccucacugugcucugauggauugcaucauguuugacgccgcugugagcggcggacuuaacacauccguccuccgcgccgugcugccccgggacauggucuucagaaccucuaccccucgcgugguucugugaggacuagucccuguucccagagcccacuuuuuuuucuuuuuuugaaauaaaauagccugucuuucagaucucaaaggcucuuuucagagccaccaaaaaaaaaaaaaaaaaaaaaaaaaaaaaaaaaaaaaaaaaaaaaaaaaaaaaaaaaaaaaaaaaaaaaaaaaaaaaaaaaaaaaaaaaaaaaaaaaaaaa

SEQ ID NO: 19971 - RNA, 2052 nt, Artificial Sequence
  mRNA product Design a-2 (hSL-A100) comprising derived and/or modified sequence from LASV(LM776-SLE-2012;Clade IV)__AIT17825__SP-HsALB_NP(2-569) (opt5)
aggagaguccgcucagccagguugcagaagcggcuuagcguguguccuaaucuucucucugcguguagguaggccugugccgcaaacaagcuuaccaugaagugggugaccuucaucagccugcucuuucuguucuccucugccuacagcagcgccuccaaggagaucaaaucuuuccuguggacccagagccucagacgggaacuguccucuuacugcagcaacauuaaacuucaaguggucaaggacgcucaggcccugcuccacggccuggauuuuuccgagguuucuaaugugcagcgccuuaugagaaaggaacggcgcgacgauaacgaccugaaaagacuccgggaucugaaucaggcggugaacaaucuggucgagcucaagagcacacaacagaaguccauccugcgcguggggacgcuuaccagcgacgaucugcucauucuggcugccgaccuugaaaaacugaagucuaaaguuacaagaaccgagcggccccucuccgccggaguguauaugggcaaccugagcucucagcagcuggaucaacgcagagcucuccuguccaugaucgggaugagcggaucuaaucagggcgcccgggcugggcgcgacggagucgugagaguuugggaugugaagaacgccgagcuucugaauaaccaguucggcacaaugccuucccucacccuggcgugucuuacaaaacagggccaagucgaccugaaugaugccgugcaggcucucaccgaccuggggcugauuuacacggccaaguauccgaacaccagcgaccucgaucggcugacacagucccaucccauccuuaauaugaucgacaccaagaaaucuagccugaacauuuccggauacaauuuuagccucggcgcugccgugaaggcgggggccugcaugcuggauggaggcaacaugcuugaaacaaucaaagucucuccucaaaccauggacgggauucugaaguccauccucaaaguuaagaaagcucugggaauguucauuagcgauacgcccggcgagcgcaacccuuaugaaaauauccuguacaagauuugucucucuggcgacggguggcccuauaucgccagcagaacauccaucaccggacgggcuugggagaacacagugguggaucuggagucugacggcaagccucagaaagccgggagcaauaacuccaauaagagccuucagucugccggauuuaccgcuggccugaccuacucccagcucaugacacugaaagaugcgaugcugcaacuugacccgaacgccaagacguggauggauauugaagggagacccgaggacccugucgaaguggcucucuaccagcccagcucuggaugcuauauccacuucuuucgcgagccuaccgaccugaaacaguucaagcaggaugccaaguacucccauggcauugacguuacagaucuguuugccgcucaacccggccucaccagcgccgugaucgacgcgcugccgcggaauauggucauuacaugucagggguccgaugacaucagaaaacuucuggaaucucagggacgcaaggauaucaaacucauugacaucgcucugagcaagaccgauucccggaaauaugagaacgccgugugggaccaguacaaggaucugugccacaugcauacgggcguuguggucgagaagaaaaagagagggggaaaagaagagauuacaccucacugugcccuuauggacugcaucauguucgaugcugccgugucuggcgggcucaauaccagcguccugcgcgcugugcugccccgggacaugguuuuuagaaccuccacaccucgcgugguccucugaggacuagucccuguucccagagcccacuuuuuuuucuuuuuuugaaauaaaauagccugucuuucagaucucaaaggcucuuuucagagccaccaaaaaaaaaaaaaaaaaaaaaaaaaaaaaaaaaaaaaaaaaaaaaaaaaaaaaaaaaaaaaaaaaaaaaaaaaaaaaaaaaaaaaaaaaaaaaaaaaaaaa

SEQ ID NO: 19972 - RNA, 2052 nt, Artificial Sequence
  mRNA product Design a-2 (hSL-A100) comprising derived and/or modified sequence from LASV(Mad39;Clade IV)__ANH09723__SP-HsALB_NP(2-569) (opt5)
aggagaguccgcucagccagguugcagaagcggcuuagcguguguccuaaucuucucucugcguguagguaggccugugccgcaaacaagcuuaccaugaagugggugaccuucaucagccugcucuuucuguucuccucugccuacagcagcgccuccaaggagaucaaaucuuuccuguggacccagagccucagacgggaacuguccggcuacugcucuaacauuaagcugcaaguggucaaagacgcucaggcccugcuccacgggcuggauuuuagcgagguuuccaaugugcagcgccuuaugagaaagcagcggcgcgacgauaacgaccugaaaagacuccgggaucugaaucaagcggugaacaaucuggucgaacucaagucuacacagcaaaagagcgugcugcgcguuggaacgcuuaccuccgacgaucugcucacacuggcugccgaccuugagaaacuuaagagcaaagugaccagaacagaacggccccucaccgccggcgucuauauggggaaccugucuucccagcagcuggaucagcgcagagcucuccugaauaugaucggaaugagcggcgggaaccagggagcccggacaggccgcgacggcgugguuagagugugggaugucaagaaugcugagcuucugaacaaucaguucgggaccaugccuucucucacgcuggccugucuuaccaaacaaggacagguggaccugaacgaugugguccaggcgcucacagaccugggccugauuuacaccgccaaguauccgaauacauccgaccucgaucggcugacccaaagccaucccauccuuaacaugauugacacgaauaagucuucccugaacaucagcggguacaacuuuucccucggagcugccguuaaagcuggcgccugcaugcuggaugggggaaauaugcuugagacaaucaaggugucuccucagaccauggacggcauucugaaaagcauccucaaggugaaaaagucccugggcauguucauuagcgauacacccggggaacgcaacccuuaugagaauauccuguacaaaauuugucucucuggagacggcuggcccuauaucgcguccagaaccagcauuaccgggcgggccugggaaaacacagucguggaucuggagucuggaggcaagccucagaaggcugggagcaauaacuccaauaaaucucuucagagcgccggauuugcugccggccugacguacucccaacucaugacccugaaggacgccaugcugcagcuugauccgaacgcuaaaacauggauggacaucgagggcagacccgaagauccuguugagaucgcgcucuaccagcccauuagcgggugcuauauccacuucuuucgcgaaccuaccgaccugaagcaguucaaacaagacgccaaguacucucauggaauugaugugacagaccuguuugcugcccagcccggccucaccuccgccgucaucgaggcucugccgcggaauauggugauuacgugucaggggagcgaugacaucagaaaacuuuucgaaucucagggacgcaaggauaucaagcugauugacaucgcccucuccaaaacagauagccggaaguaugagaacgcgguuugggaccaauacaaagaucugugccacaugcauaccggcguggucguggagaagaagaaaaagggcgggaaagaagagauuaccccucacugugcucugauggacugcaucauguuugaugccgccgucuccggaggccuuaauacacucgugcugagagcuguucugccccgcgacaugguguuccggaccucuacaccuaaggucgugcucugaggacuagucccuguucccagagcccacuuuuuuuucuuuuuuugaaauaaaauagccugucuuucagaucucaaaggcucuuuucagagccaccaaaaaaaaaaaaaaaaaaaaaaaaaaaaaaaaaaaaaaaaaaaaaaaaaaaaaaaaaaaaaaaaaaaaaaaaaaaaaaaaaaaaaaaaaaaaaaaaaaaaa

SEQ ID NO: 19973 - RNA, 2052 nt, Artificial Sequence
  mRNA product Design a-2 (hSL-A100) comprising derived and/or modified sequence from LASV(Z0947-SLE-2011;Clade IV)__AIT17841__SP-HsALB_NP(2-569) (opt5)
aggagaguccgcucagccagguugcagaagcggcuuagcguguguccuaaucuucucucugcguguagguaggccugugccgcaaacaagcuuaccaugaagugggugaccuucaucagccugcucuuucuguucuccucugccuacagcagcgccuccaaggagaucaaaucuuuccuguggacccagagccucagacgggaacuguccggcuacugcucuaacauuaagcugcaaguggucaaagacgcucaggcccugcuccacgggcuggauuuuagcgagguuuccaaugugcagcgccuuaugagaaaggaacggcgcgacgauaacgaccugaaaagacuccgggaucugaaucaggcggugaacaaucuggucgagcucaagucuacacaacaaaagagcauccugcgcgugggaacgcuuaccuccgacgaucugcucauucuggcugccgaccuugaaaaacuuaagagcaaaguuacaagaaccgagcggccccucucugccggcguguauauggggaaccuguccagccagcagcuggaucagcgcagagcucuccugaauaugaucggaaugucuggcuccaaccagggggcccggacaggacgcgacggcgucgugagaguuugggaugugaagaaugcugagcuucugaacaaucaguucggcaccaugccuagccucacacuggccugucuuaccaaacaggggcaagucgaccugaacgaugcggugcaggcccucacggaccugggacugauuuacaccgcuaaguauccgaauacaucugaccucgaucggcugacccagucccaucccauccuuaacaugaucgacacaaagaaaagcucccugaauauuucuggcuacaacuuuagccucggggccgcugugaaggccggagcgugcaugcuggauggcgggaacaugcuugaaaccaucaaagucuccccucaaacgauggacggcauucucaagagcauccugaaaguuaagaaagcccugggaauguucauuucugaugcucccggcgagcgcaauccuuaugaaaacauccuguacaagauuugucucuccggggacggauggcccuauaucgccagcagaacaucuaucaccggccgggcuugggagaauacagugguggaucuggagagcgacgggaagccucagaaagccggauccaacggcucuaauaagagccuucaguccgccggguuuaccgcuggacugaccuacagccagcucaugacacugaaagaugcgaugcugcaacuugacccgaacgccaagacguggauggauauugaaggcagacccgaggacccugucgaaaucgcucucuaccagcccucuuccggcugcuauauucacuucuuucgcgagccuaccgaccugaaacaguucaagcaggaugccaaguacagccaugggaucgacgugacagaucuguuugccgcucaacccggacucaccucugccguuauugacgcgcugccgcggaauauggugaucacaugucagggcuccgaugacaucagaaaacuuuucgaaagccaggggcgcaaggauauuaaacugaucgacauugcucucuccaagaccgauucucggaaauaugagaacgccgucugggaccaguacaaggaucugugccacaugcauacgggaaucgugguugagaagaaaaagagaggcgggaaagaagagauuacaccucacugugcccugauggacugcaucauguuugaugcugccgugagcggcggacuuaauaccuccguccuccgcgcugugcugccccgggacauggucuucagaaccucuacaccucgcgugguucugugaggacuagucccuguucccagagcccacuuuuuuuucuuuuuuugaaauaaaauagccugucuuucagaucucaaaggcucuuuucagagccaccaaaaaaaaaaaaaaaaaaaaaaaaaaaaaaaaaaaaaaaaaaaaaaaaaaaaaaaaaaaaaaaaaaaaaaaaaaaaaaaaaaaaaaaaaaaaaaaaaaaaa

SEQ ID NO: 19974 - RNA, 2028 nt, Artificial Sequence
  mRNA product Design a-2 (A100) comprising derived and/or modified sequence from LASV(Josiah;Clade IV)__NP_694869__SP-HsALB_NP(2-569) (opt1)
aggagaguccgcucagccagguugcagaagcggcuuagcguguguccuaaucuucucucugcguguagguaggccugugccgcaaacaagcuuaccaugaagugggugaccuucaucagccugcucuuccuguucuccagcgccuacuccagcgccuccaaggagaucaagagcuuccuguggacccagucccuccgccgggagcugagcggcuacugcuccaacaucaagcuccagguggucaaggacgcccaggcgcugcugcacgggcuggacuucagcgagguguccaacgugcagcgccucaugcggaaggagcgccgggacgacaacgaccugaagcgccugcgggaccucaaccaggccgucaacaaccugguggagcucaagagcacccagcagaaguccauccugcgcgugggcacccugaccagcgacgaccugcucauccuggccgccgaccuggagaagcucaaguccaaggucauccggaccgagcgcccccugagcgccgggguguacaugggcaaccuguccagccagcagcucgaccagcggcgcgcgcugcugaacaugaucgggauguccggcggcaaccagggggcccgggccggccgcgacggggugguccgggugugggacgugaagaacgccgagcuccugaacaaccaguucggcaccaugccgagccugacgcucgcgugccugaccaagcaggggcaggucgaccugaacgacgccgugcaggcccucaccgaccugggccugaucuacaccgccaaguaccccaacacguccgaccucgaccgccugacccagagccaccccauccugaacaugaucgacaccaagaaguccagccucaacaucagcggcuacaacuucucccugggggccgcggugaaggccggcgccugcaugcuggacgggggcaacaugcucgagaccaucaaggucagcccccagacgauggacggcauccugaaguccauccugaaggugaagaaggcccucgggauguucaucagcgacaccccgggcgagcggaaccccuacgagaacauccuguacaagaucugccuguccggggacggcuggcccuacaucgccagccgcaccuccaucaccgggcgggcgugggagaacacgguggucgaccucgagagcgacggcaagccccagaaggccgacuccaacaacagcuccaagagccugcaguccgccggcuucaccgccgggcugaccuacagccagcucaugacccugaaggacgccaugcugcagcuggacccgaacgcgaagacguggauggacaucgagggccgccccgaggaccccguggagaucgcccucuaccagcccuccagcgggugcuacauccacuucuuccgggagccgaccgaccugaagcaguucaagcaggacgccaaguacucccacggcaucgacgugaccgaccuguucgccacccagcccgggcucacgagcgccgucaucgacgcgcugccccgcaacauggugaucacgugccagggcuccgacgacauccgcaagcugcucgagagccagggccggaaggacaucaagcugaucgacaucgcccugagcaagaccgacucccgcaaguacgagaacgccgugugggaccaguacaaggaccucugccacaugcacaccggggucguggucgagaagaagaagcggggcgggaaggaggagaucaccccgcacugcgcccugauggacugcaucauguucgacgcggccgugagcggcgggcugaacaccuccgugcuccgcgccguccugccccgggacaugguguuccgcaccagcacgccccgggugguccugugaggacuagucccuguucccagagcccacuuuuuuuucuuuuuuugaaauaaaauagccugucuuucagaucuaaaaaaaaaaaaaaaaaaaaaaaaaaaaaaaaaaaaaaaaaaaaaaaaaaaaaaaaaaaaaaaaaaaaaaaaaaaaaaaaaaaaaaaaaaaaaaaaaaaa

SEQ ID NO: 19975 - RNA, 2028 nt, Artificial Sequence
  mRNA product Design a-2 (A100) comprising derived and/or modified sequence from LASV(LP;Clade I)__AAF86702__SP-HsALB_NP(2-569) (opt1)
aggagaguccgcucagccagguugcagaagcggcuuagcguguguccuaaucuucucucugcguguagguaggccugugccgcaaacaagcuuaccaugaagugggugaccuucaucagccugcucuuccuguucuccagcgccuacuccagcaacuccaaggagaucaagagcuuccuguggacccagucccuccgccgggagcugagcggcuacugcuccaacaucaagcuccagguggucaaggacgcccaggcccugcugcacgggcuggacuucagcgagguguccaacgugcagcgccucaugcggaagcagaagcgcgacgacgcggaccugaagcggcugcgcgaccucaaccaggccgucaacaaccugguggagcucaagagcacccagcagaagaacgugcugcgggucggcacgcuguccagcgacgaccugaucacccucgccgccgaccuggagaagcugaaguccaaggugauccgcaccgagcggccccucagcuccgggguguacaugggcaaccugagcucccagcagcuggaccagcgccgggcccuccugagcaugaucgggauguccggcggcccgcaggggaaccgcaccggcggggacggcgucgugcgggugugggacgucaagaacgcggagcugcucaacaaccaguucgggacgaugcccagccugacccuggccugccucaccaagcagggccagguggaccugaacgacgccgugcaggcccugaccgaccucggccugaucuacacggcgaaguaccccaacuccagcgaccuggacaugcucacccagagccaccccauccuggggauggucgacaccaagaaguccagccugaacaucuccggcuacaacuucagccucggggccgccgugaaggccggcgccugcaugcuggacggcgggaacaugcuggagaccaucaagguguccccgcagacgauggacggcauccucaagagcauccugaaggucaagcgcucccuggggauguucaucagcgacacccccggcgagcggaaccccuacgagaacauccucuacaagaucugccuguccggggagggcuggcccuacaucgcgagccgcaccuccaucaccggccgggccugggagaacacgcugguggaccucgagagcgacaacaagccgcccaagcugaacuccgccgggagcaacaagucccugcaggccgccggccucaacgcggggcugaccuacagccagcugaugacccugaaggacugcaugcuccagcuggaccccuccagcaagaccuggaucgacaucgagggccgccccgaggacccgguggagaucgcccuguuccagcccuccagcgggugcuacauccacuucuuccgggagcccacggaccucaagcaguucaagcaggacgccaaguacagccacggcaucgacgucaccgaccuguucuccacccagcccggccugaccagcgccgugaucgaggcccucccgcgcaacauggugcugacgugccagggguccgacgacaucaagaagcugcucgagagccagggccggcgcgacaucaagcugaucgacaucucccugagcaaggcggacucccgcaaguucgagaacgccgucugggaccaguacaaggaccucugccacaugcacaccgggguggucguggagaagaagaagcggggcgggaaggaggagaucacgccccacugcgcccugcuggacugcaucauguucgacgccgccaccaccggcagccucaacaucaccacccugcgcgcggugcugccccgggacauggucuuccgcaccuccacgcccaagguggugcucugaggacuagucccuguucccagagcccacuuuuuuuucuuuuuuugaaauaaaauagccugucuuucagaucuaaaaaaaaaaaaaaaaaaaaaaaaaaaaaaaaaaaaaaaaaaaaaaaaaaaaaaaaaaaaaaaaaaaaaaaaaaaaaaaaaaaaaaaaaaaaaaaaaaaa

SEQ ID NO: 19976 - RNA, 2028 nt, Artificial Sequence
  mRNA product Design a-2 (A100) comprising derived and/or modified sequence from LASV(803213;Clade II)__AAF86704__SP-HsALB_NP(2-569) (opt1)
aggagaguccgcucagccagguugcagaagcggcuuagcguguguccuaaucuucucucugcguguagguaggccugugccgcaaacaagcuuaccaugaagugggugaccuucaucagccugcucuuccuguucuccagcgccuacuccagcgccuccaaggaggugaaguccuuccuguggacccagagccuccgccgggagcugagcggcuacugcuccaacaucaagcugcaggucgugaaggacgcccaggcgcuccugcacgggcuggacuucagcgaggugaacaacguccagcgccucaugcggaagcagaagcgcgacgacggcgaccugaagcggcugcgcgaccucaaccaggccgugaacaaccugguggagcugaaguccacccagcagaaguccauccuccgggucgggacgcugaccagcgacgaccugcucacccuggccgccgaccuggagaagcucaagagcaaggugauccgcaccgagcggccccuguccagcggcguguacauggggaaccuguccacgcagcagcucgagcagcgccgggcccugcugaacaugaucggcauggucggcggggcgcagggcacccagccggggcgcgacggcguggugcgggucugggacgugaagaaccccgaccuccugaacaaccaguucgggaccaugcccagccugacccucgccugccugacgaagcagggccagguggaccugaacgacgccguccucgcccugaccgaccugggccucaucuacaccgcgaaguaccccaacuccagcgaccuggaccgccugucccagagccacccgauccucaacaugguggacaccaagaaguccagccugaacaucagcggguacaacuucucccugggcgccgccgugaaggccggggccugcaugcucgacggcggcaacaugcuggagacgaucaaggucacgccccagaccauggacgggauccucaagagcauccugaaggugaagcggucccugggcauguucgugagcgacacccccggggagcgcaaccccuacgagaacauccuguacaagaucugccucuccggcgacggguggccguacaucgcgagccggaccuccaucgucggccgcgccugggagaacaccaccguggaccuggagagcgacggcaagccccagaagguggggaccgccggcuccaacaagagccugcaguccgccggguuccccacgggccucaccuacagccagcugaugacccugaaggacuccaugaugcagcuggaccccagcgccaagaccuggaucgacaucgaggggcggccggaggaccccgucgagaucgcgcucuaccagcccauguccggcugcuacauccacuucuuccgcgagcccacggaccugaagcaguucaagcaggacgccaaguacagccacggcaucgacguggccgaccuguucccggcccagcccgggcucaccuccgccgucaucgaggcgcugccccggaacauggugcugaccugccagggcagcgacgacaucaagaagcuccuggacucccaggggcgccgcgacaucaagcugaucgacaucagccucagcaagguggacucccggaaguucgagaacgccgucugggaccagugcaaggaccugugccacaugcacaccggcgugguggucgagaagaagaagcgcgggggcaaggaggagaucacgccccacugcgcccugauggacugcaucauguucgacgccgccgugagcggcgggcucaacaucccggugcugcgggcgguccugccccgcgacaugguguuccggaccuccagccccaaggugguccucugaggacuagucccuguucccagagcccacuuuuuuuucuuuuuuugaaauaaaauagccugucuuucagaucuaaaaaaaaaaaaaaaaaaaaaaaaaaaaaaaaaaaaaaaaaaaaaaaaaaaaaaaaaaaaaaaaaaaaaaaaaaaaaaaaaaaaaaaaaaaaaaaaaaaa

SEQ ID NO: 19977 - RNA, 2031 nt, Artificial Sequence
  mRNA product Design a-2 (A100) comprising derived and/or modified sequence from LASV(GA391;Clade III)__CAA36646__SP-HsALB_NP(2-570) (opt1)
aggagaguccgcucagccagguugcagaagcggcuuagcguguguccuaaucuucucucugcguguagguaggccugugccgcaaacaagcuuaccaugaagugggugaccuucaucagccugcucuuccuguucuccagcgccuacuccagcgccuccaaggaggugcgcagcuuccuguggacccagucccuccggcgcgagcugagcggcuacugcuccaacaucaagcugcaggucgugaaggacgcccaggcgcuccugcacgggcuggacuucagcgagguguccaacguccagcggcucaugcgcaagcagaagcgggacgacggcgaccugaagcgccugcgggaccucaaccaggccgugaacaaccugguggagcucaagagcacccagcagaaguccguccugcgcguggggacccugagcuccgacgaccugcucauccuggccgccgaccuggagaagcucaagagcaaggugacccggaccgagcgcccccuguccagcggcgucuacauggggaaccuguccagccagcagcucgaccagcggcgcgcccugcugaacaugaucggcaugaccggcguguccgggggcgggaagggcgcgagcgacgggaucgugcgggucugggacgugaagaacgccgagcuccugaacaaccaguucggcacgaugccgucccugacccucgccugccugaccaagcagggccagguggaccugaacgacgccguccaggcgcucaccgaccuggggcugaucuacacggccaaguaccccaacagcagcgaccucgaccgccugucccagagccaccccauccugaacaugaucgacaccaagaaguccagccucaacaucuccggcuacaacuucagccugggggccgccgugaaggccggcgcgugcaugcuggacggcgggaacaugcucgagaccaucaaggugagcccccagaccauggacggcauccucaaguccauccugaaggucaagaagucccuggggauguucgugagcgacacgccgggcgagcggaaccccuacgagaacauccuguacaagaucugccuguccggggacggcuggcccuacaucgccagccgcaccuccaucgugggccgggccugggagaacaccgucguggaccucgagcaggacaacaagccccagaagaucgggaacggcgggagcaacaagucccugcagagcgccggcuucgccgcggggcugaccuacucccagcucaugacgcugaaggacuucaagugcuucaaccugaucccgaacgccaagaccuggauggacaucgagggccgccccgaggaccccguggagaucgcccuguaccagcccagcuccggcugcuacguccacuucuuccgggagccgaccgaccucaagcaguucaagcaggacgccaaguacagccacgggaucgacgugaccgaccuguucgccgcgcagcccggccugacgagcgccgucaucgaggcccucccccgcaacauggugaucacgugccagggguccgaggacauccggaagcugcuggagagccagggccgccgcgacaucaagcucaucgacaucacccuguccaaggccgacagccggaaguucgagaacgccgugugggaccaguucaaggaccugugccacaugcacaccggggucgugguggagaagaagaagcgcggcggcaaggaggagaucacgccccacugcgcgcucauggacugcaucauguucgacgccgccgucuccgggggccuggacgccaaggugcugcgggugguccucccgcgcgacaugguguuccggaccagcacccccaaggugguccugugaggacuagucccuguucccagagcccacuuuuuuuucuuuuuuugaaauaaaauagccugucuuucagaucuaaaaaaaaaaaaaaaaaaaaaaaaaaaaaaaaaaaaaaaaaaaaaaaaaaaaaaaaaaaaaaaaaaaaaaaaaaaaaaaaaaaaaaaaaaaaaaaaaaaa

SEQ ID NO: 19978 - RNA, 2028 nt, Artificial Sequence
  mRNA product Design a-2 (A100) comprising derived and/or modified sequence from LASV(AV;Clade V)__CCA30315__SP-HsALB_NP(2-569) (opt1)
aggagaguccgcucagccagguugcagaagcggcuuagcguguguccuaaucuucucucugcguguagguaggccugugccgcaaacaagcuuaccaugaagugggugaccuucaucagccugcucuuccuguucuccagcgccuacuccagcgccuccaaggaggugaaguccuuccuguggacccagagccuccgccgggagcugagcggcuacugcuccaacaucaagcugcaggucgugaaggacgcccaggcgcuccugcacgggcuggacuucagcgagguguccaacguccagcgccucaugcggaagcagcgccgggacgacagcgaccugaagcgccugcgggaccucaaccaggccgugaacaaccugguggagcugaaguccacccagcagaaguccguccuccgcgugggcacgcugagcagcgacgaccugcucacccuggccgccgaccuggagaagcucaaguccaaggugacccggaccgagcgcccccugagcuccggggucuacaugggcaaccugagcucccagcagcucgaccagcggcgcgcccugcugaaccucaucgggaugacgaacggcagccagggcucccaggcggggcgggacggcguggugcgcgucugggacgugaagaacgccgagcugcugaacaaccaguucgggaccaugccgagccucacccuggccugccugaccaagcagggccagguggaccucaacgacgucgugcaggcccugacggaccuggggcucaucuacaccgcgaaguaccccaacaccagcgaccuggaccggcugacccagucccaccccauccucaacaugaucgacacgaagaaguccagccugaacaucagcggcuacaacuucucccugggcgccgccgugaaggccggggccugcaugcucgacggcgggaacaugcuggagaccaucaaggucagcccccaguccauggacggcauccucaagagcauccugaaggugaagcgcgcgcugggcauguucguguccgacaccccgggggagcggaaccccuacgagaacauccuguacaagaucugccucagcggcgacggguggcccuacaucgccucccgcaccagcaucgucggccgggccugggagaacacggugguggaccuggagaccgacgggaagccccagaagaucggcuccggcaacagcaacaagucccugcagagcgccggguucuccgccggccucaccuacagccagcugaugacccugaaggacgcgaugcugcagcucgacccgaacgccaagacguggauggacaucgaggggcgccccgaggaccccgucgagguggcccuguaccagcccaucuccggcugcuacauccacuucuuccgggagccgaccgaccugaagcaguucaagcaggacgccaaguacagccacgggaucgacaucgccgaccucuucgcggcccagcccggccugaccagcgccgucaucgaggcccugccccgcaacauggugaucacgugccagggcuccgaggacaucaagaagcuccuggagagccaggggcgcaaggacaucaagcugaucgacaucgcccucuccaagaucgacagccggaaguucgagaacgcggugugggaccaguacaaggaccugugccacaugcacaccggcgucgugguggagaagaagaagcgcgggggcaaggaggagaucaccccgcacugcgcccugauggacugcaucauguucgacgccgccgucuccgggggccucaacacccuggugcugcgggcggugcucccccgcgacauggucuuccggaccagcacgccccgcguggugcugugaggacuagucccuguucccagagcccacuuuuuuuucuuuuuuugaaauaaaauagccugucuuucagaucuaaaaaaaaaaaaaaaaaaaaaaaaaaaaaaaaaaaaaaaaaaaaaaaaaaaaaaaaaaaaaaaaaaaaaaaaaaaaaaaaaaaaaaaaaaaaaaaaaaaa

SEQ ID NO: 19979 - RNA, 2028 nt, Artificial Sequence
  mRNA product Design a-2 (A100) comprising derived and/or modified sequence from LASV(Togo/2016/7082;Clade VI)__AMR44578__SP-HsALB_NP(2-569) (opt1)
aggagaguccgcucagccagguugcagaagcggcuuagcguguguccuaaucuucucucugcguguagguaggccugugccgcaaacaagcuuaccaugaagugggugaccuucaucagccugcucuuccuguucuccagcgccuacuccagcaacuccaaggaggugaaguccuuccuguggacccagagccuccgccgggagcugagcggcuacugcuccaacaucaagcugcaggucgugaaggacgcccaggcccuccugcacgggcuggacuucagcgagguguccaacguccagcgccucaugcggaagcagaagcgcgacgacggcgaccugaagcggcugcgcgaccucaaccaggcggugaacaaccugguggagcucaagagcguccagcagaaguccauccugcggguggggacccugaccagcgacgaccugcucacccuggccgccgaccuggagaagcucaaguccaaggugacccgcaccgagcggccccugagcuccggcgucuacauggggaaccugagcucccagcagcucgaccagcgccgggcccugcugagcaugaucggcauguccggcgggaaccagaacagccagccgaagggcgacgggguggugcgcgucugggacgugaagaacgccgaccuccugaacaaccaguucggcacgaugcccucccugacccucgcgugccugaccaagcagggccagguggaccugaacgacgccguccaggcccucaccgaccuggggcugaucuacacggccaaguaccccaacagcagcgaccucgaccggcugucccagagccaccccauccugaacaugaucgacaccaagaaguccagccucaacaucuccggcuacaacuucagccugggggcggccaucaagaccggcgccugcaugcuggacgggggcaacaugcucgagaccaucaaggugacgccgcagaccauggacggcauccugaaguccauccugaaggugaagcgcagccucgggauguucaucuccgacacccccggcgagcggaaccccuacgagaacauccuguacaagaucugccugagcggggacggcuggcccuacaucgccucccgcaccgccaucaucgggcgggcgugggagaacacggucguggaccucgagagcgacuccaagccgcagaagaucggcagcaacggcuccaacaagagccugcaguccgccggguucgcccccggccugaccuacagccagcucaugacccugaaggacuccaugcugcagcuggaccccaacgccaagaccuggaucgacaucgaggggcgccccgaggacccgguggaggucgcccucuuccagcccaucagcggcugcuacauccacuucuuccgggagcccacggaccugaagcaguucaagcaggacgcgaaguacagccacgggaucgacgugaccgaccuguucgccgcccagcccggccucaccuccgccgugaucgaggcccugccgcgcaacaugguccugaccugccagggcagcgacgacaucaagaagcuccuggacucccaggggcggcgcgacaucaagcugaucgacgugagccucaacaagaucgacucccgcaaguucgagaacgcggucugggaccaguacaaggaccugugccacaugcacacgggcgugguggucgagaagaagaagaagggcgggaaggaggagaucacgccccacugcgcccugcucgacugcaucauguucgacgccgccgugagcgggggccugaacgccaccgugcugcgggcgguccucccccgcgacaugguguuccggaccuccagccccaaggugguccugugaggacuagucccuguucccagagcccacuuuuuuuucuuuuuuugaaauaaaauagccugucuuucagaucuaaaaaaaaaaaaaaaaaaaaaaaaaaaaaaaaaaaaaaaaaaaaaaaaaaaaaaaaaaaaaaaaaaaaaaaaaaaaaaaaaaaaaaaaaaaaaaaaaaaa

SEQ ID NO: 19980 - RNA, 2028 nt, Artificial Sequence
  mRNA product Design a-2 (A100) comprising derived and/or modified sequence from LASV(KAK-428;Clade n.d. (VII))__ANH09741__SP-HsALB_NP(2-569) (opt1)
aggagaguccgcucagccagguugcagaagcggcuuagcguguguccuaaucuucucucugcguguagguaggccugugccgcaaacaagcuuaccaugaagugggugaccuucaucagccugcucuuccuguucuccagcgccuacuccagcaacuccaaggaggugaaguccuuccuguggacccagagccuccgccgggagcugagcggcuacugcaccaacaucaagcugcaggucgugaaggacgcccaggcccuccugcacgggcuggacuucuccgaggugagcaacguccagcgccucaugcggaagcagaagcgcgacgacaacgaccugaagcggcugcgcgaccucaaccaggcggugaacaaccugguggagcugaaguccguccagcagaaguccgugcucaaggugggcacgcugaacagcgacgaccugcucacccuggccgccgaccuggagaagcucaagagcaaggucgugcggaccgagcgcccccuguccagcgggguguacaugggcaaccuguccagccagcagcucgaccagcggcgcgcccugcugaacaugaucgggauggccggcggcucccaggggaaccagccgagccgggacggcgucgugcgcgugugggacgucaagaacgcggaccuccugaacaaccaguucgggaccaugcccucccugacgcucgccugccugaccaagcagggccagguggaccugaacgacgugguccucgcccugaccgaccuggggcucaucuacaccgccaaguaccccaacagcuccgaccuggaccggcugagccagaaccaccccgugcucaacaugaucgacgugaacaagagcucccugaacaucagcggcuacaacuucucccugggcgcggccgucaaggccggggccugcaugcucgacggcgggaacaugcuggagacgaucaagaucagcccgcagaccguggacggcauccugaaguccauccucaaggugaagcgcgcccugggcauguucgucagcgacacccccggggagcggaaccccuacgagaacauccuguacaaggugugccucuccggcaacggguggcccuacaucgcgagccgcaccuccaucgucggccgggccugggagaacacggugguggaccuggagagcaacaagaaccagccgaaggucgggaacaacggcuccaacaagaugcugcagagcuccggcuucgccaccgggcucaccuacagccagcugaugacccugcgcgacuccaugcugcagcucgaccccacggccaagaccuggaucgacaucgagggccggcccgaggaccccguggagcuggcccuguuccagccgagcuccgggugcuacauccacuucuuccgcgagcccaccgaccucaagcaguucaagcaggacgcgaaguacagccacggcaucgacgugaacgaccuguucuccgcccagcccgggcugaccagcgccguccucgaggcccugccccggaacauggugcugacgugccagggcagcgacgacauccgcaagcuccuggacucccaggaccgcaaggacaucaagcugaucgacaucagccucuccaaggccgacgcgcggaaguucgagaacgacgugugggaccaguucaaggaccugugccacaugcacaccggcaucgucguggagaagaagaagaagggcgggaagcaggagaugaccccgcacugcgcccugcucgacugcaucauguucgacgccgccgugagcgggggccugaacguccccacccugcgcgccgugcuccccacggacaugguguuccggaccaucaccaccaaggucgugcugugaggacuagucccuguucccagagcccacuuuuuuuucuuuuuuugaaauaaaauagccugucuuucagaucuaaaaaaaaaaaaaaaaaaaaaaaaaaaaaaaaaaaaaaaaaaaaaaaaaaaaaaaaaaaaaaaaaaaaaaaaaaaaaaaaaaaaaaaaaaaaaaaaaaaa

SEQ ID NO: 19981 - RNA, 2028 nt, Artificial Sequence; identical to SEQ ID NO: 19975
  mRNA product Design a-2 (A100) comprising derived and/or modified sequence from LASV(Pinneo-NIG-1969;Clade I)__AIT17837__SP-HsALB_NP(2-569) (opt1)

SEQ ID NO: 19982 - RNA, 2028 nt, Artificial Sequence
  mRNA product Design a-2 (A100) comprising derived and/or modified sequence from LASV(ISTH0009-NIG-2011;Clade II)__AIT17405__SP-HsALB_NP(2-569) (opt1)
aggagaguccgcucagccagguugcagaagcggcuuagcguguguccuaaucuucucucugcguguagguaggccugugccgcaaacaagcuuaccaugaagugggugaccuucaucagccugcucuuccuguucuccagcgccuacuccagcguguccaaggaggucaagagcuuccuguggacccagucccuccgccgggagcugagcggcuacugcuccaacaucaagcuccagguggugaaggacgcccaggcccugcugcacgggcuggacuucagcgaggucuccaacgugcagcgccucaugcggaagcagaagcgcgacgacagcgaccugaagcggcugcgcgaccucaaccaggcggugaacaaccuggucgagcugaaguccacccagcagaaguccauccuccgggugggcacccugaccagcgacgaccugcucacccuggccgccgaccuggagaagcucaagagcaaggugauccgcaccgagcggccccuguccagcggggucuacaugggcaaccuguccacgcagcagcucgagcagcgccgggcccugcugaacaugaucgggauggugggcggcgcccaggggacccagccgggccgcgacggggugguccgggugugggacgugaagaaccccgaccuccugaacaaccaguucggcaccaugcccagccugacccucgcgugccugacgaagcaggggcaggucgaccugaacgacgccgugcucgcccugaccgaccugggccucaucuacaccgccaaguaccccaacuccagcgaccuggaccgccugucccagagccacccgauccucaacaugguggacaucaagaaguccagccugaacaucagcggcuacaacuucucccugggggcggccgucaaggccggcgccugcaugcucgacgggggcaacaugcuggagaccaucaaggugacgccccagaccauggacggcauccucaagagcauccugaaggugaagcggucccuggggauguucgucagcgacacccccggcgagcgcaaccccuacgagaacauccuguacaagaucugccucuccggggacggcuggccguacaucgccagccggaccuccaucguggggcgcgcgugggagaacacgaccguggaccuggagagcgacggcaagccccagaaggucggcuccgccgggagcaacaagucccugcagagcgccggcuuccccaccgggcucaccuacucccagcugaugacgcugaaggacagcaugaugcagcuggaccccuccgccaagaccuggaucgacaucgagggccggccggaggaccccguggagaucgcccucuaccagcccaugagcgggugcuacauccacuucuuccgcgagcccaccgaccugaagcaguucaagcaggacgcgaaguacucccacggcaucgacgucgccgaccuguucccggcccagcccggccucaccagcgccgugaucgaggcccugccccggaacauggugcugacgugccaggggagcgacgacaucaagcgccuccuggacucccagggccgccgggacaucaagcugaucgacaucgcgcucagcaaggccgacucccgccgguucgagaacgccgucugggaccagugcaaggaccugugccacaugcacaccggggugguggucgagaagaagaagcgcggcgggaaggaggagaucacgccccacugcgcccugauggacugcaucauguacgacgccgcggugagcggcggccucaacaucccggugcugcgggccguccugccccgcgacaugguguuccggaccuccagccccaaggugguccucugaggacuagucccuguucccagagcccacuuuuuuuucuuuuuuugaaauaaaauagccugucuuucagaucuaaaaaaaaaaaaaaaaaaaaaaaaaaaaaaaaaaaaaaaaaaaaaaaaaaaaaaaaaaaaaaaaaaaaaaaaaaaaaaaaaaaaaaaaaaaaaaaaaaaa

SEQ ID NO: 19983 - RNA, 2028 nt, Artificial Sequence
  mRNA product Design a-2 (A100) comprising derived and/or modified sequence from LASV(ISTH2010-NIG-2012;Clade II)__AIT17483__SP-HsALB_NP(2-569) (opt1)
aggagaguccgcucagccagguugcagaagcggcuuagcguguguccuaaucuucucucugcguguagguaggccugugccgcaaacaagcuuaccaugaagugggugaccuucaucagccugcucuuccuguucuccagcgccuacuccagcgccuccaaggaggugaaguccuuccuguggacccagagccuccgccgggagcugagcggcuacugcuccaacaucaagcugcaggucgugaaggacgcccaggcgcuccugcacgggcuggacuucagcgagguguccaacguccagcgccucaugcggaagcagaagcgcgacgacagcgaccugaagcggcugcgcgaccucaaccaggccgugaacaaccugguggagcugaaguccacccagcagaaguccauccuccgggucggcacgcugaccagcgacgaccugcucacccuggccgccgaccuggagaagcucaagagcaaggugauccgcaccgagcggccccuguccagcgggguguacaugggcaaccuguccacgcagcagcucgagcagcgccgggcccugcugaaccucaucgggauggucggcggcgcgcaggggacccagccgggccgcgacgggguggugcgggucugggacgugaagaaccccgaccugcugaacaaccaguucggcaccaugcccagccucacccuggccugccugacgaagcagggccagguggaccucaacgacgccguccuggcccugaccgaccucgggcugaucuacaccgcgaaguaccccaacuccagcgaccuggaccgccucucccagagccacccgauccugaacaugguggacaccaagaaguccagccugaacaucagcggcuucaacuucucccucggggccgccgugaaggccggcgccugcaugcuggacgggggcaacaugcuggagacgaucaaggucacgccccagaccauggacggcauccucaagagcauccugaaggugaagaagucccuggggauguucgugagcgacacccccggcgagcggaaccccuacgagaacauccucuacaagaucugccuguccggggacggcuggccguacaucgcgagccgcaccuccaucgucgggcgggccugggagaacaccaccguggaccuggagagcgacggcaagccccacaaggugggcaccgccggguccaacaagagccuccaguccgccggcuuccccacggggcugaccuacagccagcugaugacccugaaggacuccaugaugcagcucgaccccagcgccaagaccuggaucgacaucgagggccgcccggaggaccccgucgagaucgcgcuguaccagcccauguccgggugcuacauccacuucuuccgggagcccacggaccugaagcaguucaagcaggacgccaaguacagccacggcaucgacguggccgaccucuucccggcccagcccggccugaccuccgccgucaucgaggcgcugccccgcaacauggugcugaccugccaggggagcgacgacaucaagcggcuccuggacagccagggccgccgcgacaucaagcucaucgacaucgcccuguccaaggccgacagccggcgcuucgagaacgccgugugggaccagugcaaggaccugugccacaugcacaccggggucgugguggagaagaagaagcggggcgggaaggaggagaucacgccccacugcgcccucauggacugcaucauguacgacgcggccgucuccggcggccugaacaucccggugcugcgcgccgugcucccccgggacauggucuuccgcaccagcucccccaagguggugcugugaggacuagucccuguucccagagcccacuuuuuuuucuuuuuuugaaauaaaauagccugucuuucagaucuaaaaaaaaaaaaaaaaaaaaaaaaaaaaaaaaaaaaaaaaaaaaaaaaaaaaaaaaaaaaaaaaaaaaaaaaaaaaaaaaaaaaaaaaaaaaaaaaaaaa

SEQ ID NO: 19984 - RNA, 2028 nt, Artificial Sequence
  mRNA product Design a-2 (A100) comprising derived and/or modified sequence from LASV(Lassa virus/H.sapiens-wt/NGA/2015/ISTH_0543;Clade II)__AVO03640__SP-HsALB_NP(2-569) (opt1)
aggagaguccgcucagccagguugcagaagcggcuuagcguguguccuaaucuucucucugcguguagguaggccugugccgcaaacaagcuuaccaugaagugggugaccuucaucagccugcucuuccuguucuccagcgccuacuccagcgccuccaaggaggugaaguccuuccuguggacccagagccuccgccgggagcugagcggcuacugcuccaacaucaagcugcaggucgugaaggacgcccaggcgcuccugcacgggcuggacuucagcgagguguccaacguccagcgccucaugcggaagcagaagcgcgacgacagcgaccugaagcggcugcgcgaccucaaccaggccgugaacaaccugguggagcugaaguccacccagcagaaguccauccuccgggucggcacgcugaccagcgacgaccugcucacccuggccgccgaccuggagaagcucaagagcaaggugauccgcaccgagcggccccuguccagcgggguguacaugggcaaccuguccacgcagcagcucgagcagcgccgggcccugcugaacaugaucgggauggucggcggcgcgcaggggacccagccgggccgcgacgggguggugcgggucugggacgugaagaaccccgaccuccugaacaaccaguucggcaccaugcccagccugacccucgccugccugacgaagcagggccagguggaccugaacgacgccguccucgcccugaccgaccuggggcucaucuacaccgcgaaguaccccaacuccagcgaccuggaccgccugucccagagccacccgauccucaacaugguggacaccaagaaguccagccugaacaucagcggcuacaacuucucccugggggccgccgugaaggccggcgccugcaugcucgacgggggcaacaugcuggagacgaucaaggucacgccccagaccauggacggcauccucaagagcauccugaaggugaagaagucccuggggauguucgugagcgacacccccggcgagcggaaccccuacgagaacauccuguacaagaucugccucuccggggacggcuggccguacaucgcgagccgcaccuccaucgucgggcgggccugggagaacaccaccguggaccuggagagcgacggcaagccccagaaggugggcuccgccgggagcaacaagucccugcagagcgccggcuuccccaccgggcucacguacucccagcugaugacccugaaggacagcaugaugcagcuggaccccuccgccaagaccuggaucgacaucgagggccgcccggaggaccccgucgagaucgcgcucuaccagcccaugagcgggugcuacauccacuucuuccgggagcccaccgaccugaagcaguucaagcaggacgccaaguacucccacggcaucgacguggccgaccuguucccggcccagcccggccucacgagcgccgucaucgaggcgcugccccgcaacauggugcugaccugccaggggagcgacgacaucaagcggcuccuggacucccagggccgcaaggacaucaagcugaucgacaucgcccucagcaaggccgacucccgccgguucgagaacgccgugugggaccagugcaaggaccugugccacaugcacaccggggucgugguggagaagaagaagcgcggcgggaaggaggagaucacgccccacugcgcccugauggacugcaucauguacgacgcggccgucagcggcggccucaacaucccggugcugcgggccgugcugccccgcgacauggucuuccggaccuccagccccaagguggugcucugaggacuagucccuguucccagagcccacuuuuuuuucuuuuuuugaaauaaaauagccugucuuucagaucuaaaaaaaaaaaaaaaaaaaaaaaaaaaaaaaaaaaaaaaaaaaaaaaaaaaaaaaaaaaaaaaaaaaaaaaaaaaaaaaaaaaaaaaaaaaaaaaaaaaa

SEQ ID NO: 19985 - RNA, 2028 nt, Artificial Sequence
  mRNA product Design a-2 (A100) comprising derived and/or modified sequence from LASV(Lassa virus/H.sapiens-wt/NGA/2016/ISTH_0009;Clade II)__AVO03572__SP-HsALB_NP(2-569) (opt1)
aggagaguccgcucagccagguugcagaagcggcuuagcguguguccuaaucuucucucugcguguagguaggccugugccgcaaacaagcuuaccaugaagugggugaccuucaucagccugcucuuccuguucuccagcgccuacuccagcgccuccaaggaggugaaguccuuccuguggacccagagccuccgccgggagcugagcggcuacugcuccaacaucaagcugcaggucgugaaggacgcccaggcgcuccugcacgggcuggacuucagcgagguguccaacguccagcgccucaugcggaagcagaagcgcgacgacagcgaccugaagcggcugcgcgaccucaaccaggccgugaacaaccugguggagcugaaguccacccagcagaaguccauccuccgggucggcacgcugaccagcgacgaccugcucacccuggccgccgaccuggagaagcucaagagcaaggugauccgcaccgagcggccccuguccagcgggguguacaugggcaaccuguccacgcagcagcucgagcagcgccgggcccugcugaacaugaucgggauggucggcggcgcgcaggggacccagccgggccgcgacgggguggugcgggucugggacgugaagaaccccgaccuccugaacaaccaguucggcaccaugcccagccugacccucgccugccugacgaagcagggccagguggaccugaacgacgccguccucgcccugaccgaccuggggcucaucuacaccgcgaaguaccccaacuccagcgaccuggaccgccugucccagagccacccgauccucaacaugguggacaccaagaaguccagccugaacaucagcggcuacaacuucucccugggggccgccgugaaggccggcgccugcaugcucgacgggggcaacaugcuggagacgaucaaggucacgccccagaccauggacggcauccucaagagcauccugaaggugaagaagucccuggggauguucgugagcgacacccccggcgagcggaaccccuacgagaacauccuguacaagaucugccucuccggggacggcuggccguacaucgcgagccgcaccuccaucgucgggcgggccugggagaacaccaccguggaccuggagagcgacggcaagccccagaaggugggcuccgccgggagcaacaagucccugcagagcgccggcuuccccaccgggcucacguacucccagcugaugacccugaaggacagcaugaugcagcuggaccccuccgccaagaccuggaucgacaucgagggccgcccggaggaccccgucgagaucgcgcucuaccagcccaugagcgggugcuacauccacuucuuccgggagcccaccgaccugaagcaguucaagcaggacgccaaguacucccacggcaucgacguggccgaccuguucccggcccagcccggccucacgagcgccgucaucgaggcgcugccccgcaacauggugcugaccugccaggggagcgacgacaucaagcggcuccuggacucccagggccgccgcgacaucaagcugaucgacaucgcccucagcaaggccgacucccggcgcuucgagaacgccgugugggaccagugcaaggaccugugccacaugcacaccggggucgugguggagaagaagaagcggggcgggaaggaggagaucacgccccacugcgcccugauggacugcaucauguacgacgcggccgucagcggcggccucaacaucccggugcugcgcgccgugcugccccgggacauggucuuccgcaccuccagccccaagguggugcucugaggacuagucccuguucccagagcccacuuuuuuuucuuuuuuugaaauaaaauagccugucuuucagaucuaaaaaaaaaaaaaaaaaaaaaaaaaaaaaaaaaaaaaaaaaaaaaaaaaaaaaaaaaaaaaaaaaaaaaaaaaaaaaaaaaaaaaaaaaaaaaaaaaaaa

SEQ ID NO: 19986 - RNA, 2028 nt, Artificial Sequence
  mRNA product Design a-2 (A100) comprising derived and/or modified sequence from LASV(Lassa virus/H.sapiens-wt/NGA/2016/ISTH_0017;Clade II)__AVO03568__SP-HsALB_NP(2-569) (opt1)
aggagaguccgcucagccagguugcagaagcggcuuagcguguguccuaaucuucucucugcguguagguaggccugugccgcaaacaagcuuaccaugaagugggugaccuucaucagccugcucuuccuguucuccagcgccuacuccagcgccuccaaggaggugaaguccuuccuguggacccagagccuccgccgggagcugagcggcuacugcuccagcaucaagcugcaggucgugaaggacgcccaggcgcuccugcacgggcuggacuucuccgaggugagcaacguccagcgccucaugcggaagcagaagcgcgacgacuccgaccugaagcggcugcgcgaccucaaccaggccgugaacaaccugguggagcucaagagcacccagcagaaguccauccugcgggucggcacgcugaccagcgacgaccugcucacccuggccgccgaccuggagaagcucaaguccaaggugauccgcaccgagcggccccugagcuccgggguguacaugggcaaccugagcacgcagcagcucgagcagcgccgggcccugcugaacaugaucgggauggcgggcggcgcccaggggacccagccgggccgcgacggggucgugcgggugugggacgucaagaaccccgaccuccugaacaaccaguucggcaccaugcccucccugacccucgccugccugacgaagcagggccagguggaccugaacgacgccgugcucgcgcugaccgaccuggggcucaucuacaccgccaaguaccccaacagcuccgaccuggaccgccugagccagagccacccgauccucaacauggucgacaccaagaaguccagccugaacaucuccggcuacaacuucagccugggggccgccgugaaggccggcgcgugcaugcucgacgggggcaacaugcuggagacgaucaaggugacgccccagaccauggacggcauccugaaguccauccucaaggucaagcggagccuggggauguucguguccgacgcccccggcgagcgcaaccccuacgagaacauccuguacaagaucugccucagcggggacggcuggccguacaucgccucccggaccagcaucguggggcgcgccugggagaacaccaccgucgaccuggaguccgacggcaagccccagaaggugggcgccaccgggagcaacaagucccugcagagcgcgggcuuccccaccgggcucacguacucccagcugaugacccugaaggacagcaugaugcagcuggaccccuccgccaagaccuggaucgacaucgagggccggccggaggaccccguggaggucgcccucuaccagcccgugagcgggugcuacauccacuucuuccgcgagcccaccgaccugaagcaguucaagcaggacgccaaguacucccacggcaucgacgucgccgaccuguucccggcgcagcccggccucacgagcgccgugaucgaggcccugccccggaacauggugcugaccugccaggggagcgacgacaucaagaagcuccuggacucccagggccgcaaggacaucaagcugaucgacaucgcccucagcaaggccgacucccgccgguucgagaacgcggucugggaccagugcaaggaccugugccacaugcacaccggggugguggucgagaagaagaagcgcggcgggaaggaggagaucacgccccacugcgcccugauggacugcaucauguacgacgccgccgugagcggcggccucaacaucccggugcugcgggcgguccugccccgcgacaugguguuccggaccuccagccccaaggugguccucugaggacuagucccuguucccagagcccacuuuuuuuucuuuuuuugaaauaaaauagccugucuuucagaucuaaaaaaaaaaaaaaaaaaaaaaaaaaaaaaaaaaaaaaaaaaaaaaaaaaaaaaaaaaaaaaaaaaaaaaaaaaaaaaaaaaaaaaaaaaaaaaaaaaaa

SEQ ID NO: 19987 - RNA, 2028 nt, Artificial Sequence
  mRNA product Design a-2 (A100) comprising derived and/or modified sequence from LASV(Lassa virus/H.sapiens-wt/NGA/2018/ISTH_0959;Clade II)__AVV65100__SP-HsALB_NP(2-569) (opt1)
aggagaguccgcucagccagguugcagaagcggcuuagcguguguccuaaucuucucucugcguguagguaggccugugccgcaaacaagcuuaccaugaagugggugaccuucaucagccugcucuuccuguucuccagcgccuacuccagcgccuccaaggaggugaaguccuuccuguggacccagagccuccgccgggagcugagcggcuacugcuccaacaucaagcugcaggucgugaaggacgcccaggcgcuccugcacgggcuggacuucagcgagguguccaacguccagcgccucaugcggaagcagaagcgcgacgacagcgaccugaagcggcugcgcgaccucaaccaggccgugaacaaccugguggagcugaaguccacccagcagaaguccauccuccgggucggcacccugaccagcgacgaccugcucacccuggccgccgaccuggagaagcucaagagcaaggugauccgcaccgagcggccccuguccagcgggguguacaugggcaaccuguccacgcagcagcucgagcagcgccgggcccugcugaaccucaucgggauggucggcggcgcgcaggggacccagccgggccgcgacgggguggugcgggucugggacgugaagaaccccgaccugcugaacaaccaguucggcaccaugcccagccucacccuggccugccugacgaagcagggccagguggaccucaacgacgucgugcuggcccugaccgaccucgggcugaucuacaccgccaaguaccccaacuccagcgaccuggaccgccucucccagagccacccgauccugaacaugguggacaccaagaaguccagccugaacaucagcggcuucaacuucucccucggggcggccgucaaggccggcgccugcaugcuggacgggggcaacaugcuggagacgaucaaggugacgccccagaccauggacggcauccucaagagcauccugaaggugaagaagucccuggggauguucgucagcgacacccccggcgagcggaaccccuacgagaacauccucuacaagaucugccuguccggggacggcuggccguacaucgccagccgcaccuccaucguggggcgggcgugggagaacaccaccguggaccuggagagcgacggcaagccccacaaggucggcaccgccggguccaacaagagccuccaguccgccggcuuccccacggggcugaccuacagccagcugaugacccugaaggacuccaugaugcagcucgaccccagcgccaagaccuggaucgacaucgagggccgcccggaggaccccguggagaucgcccuguaccagcccauguccgggugcuacauccacuucuuccgggagcccacggaccugaagcaguucaagcaggacgcgaaguacagccacggcaucgacgucgccgaccucuucccggcccagcccggccugaccuccgccgugaucgaggcccugccccgcaacauggugcugaccugccaggggagcgacgacaucaagcggcuccuggacagccagggccgcaaggacaucaagcucaucgacaucgcgcuguccaagaccgacagccgccgguucgagaacgccgucugggaccagugcaaggaccugugccacaugcacacgggggugguggucgagaagaagaagcgcggcgggaaggaggagaucacgccccacugcgcccucauggacugcaucauguacgacgccgccguguccggcggccugaacaucccggugcugcgggcgguccucccccgcgacaugguguuccggaccagcucccccaaggugguccugugaggacuagucccuguucccagagcccacuuuuuuuucuuuuuuugaaauaaaauagccugucuuucagaucuaaaaaaaaaaaaaaaaaaaaaaaaaaaaaaaaaaaaaaaaaaaaaaaaaaaaaaaaaaaaaaaaaaaaaaaaaaaaaaaaaaaaaaaaaaaaaaaaaaaa

SEQ ID NO: 19988 - RNA, 2028 nt, Artificial Sequence
  mRNA product Design a-2 (A100) comprising derived and/or modified sequence from LASV(LASV003-NIG-2008;Clade II)__AIT17581__SP-HsALB_NP(2-569) (opt1)
aggagaguccgcucagccagguugcagaagcggcuuagcguguguccuaaucuucucucugcguguagguaggccugugccgcaaacaagcuuaccaugaagugggugaccuucaucagccugcucuuccuguucuccagcgccuacuccagcgccuccaaggaggugaaguccuuccuguggacccagagccuccgccgggagcugagcggcuacugcuccagcaucaagcugcaggucgugaaggacgcccaggcgcuccugcacgggcuggacuucuccgaggugagcaacguccagcgccucaugcggaagcagaagcgcgacgacuccgaccugaagcggcugcgcgaccucaaccaggccgugaacaaccugguggagcucaagagcacccagcagaaguccguccugcgggugggcacccugaccagcgacgaccugcucacccuggccgccgaccuggagaagcucaaguccaaggugauccgcaccgagcggccccugagcuccggggucuacaugggcaaccugagcgcccagcagcucgagcagcgccggacgcugcugaacaugaucgggauggugggcggcgcgcaggggacccagccgggccgcgacggggugguccgggugugggacgugaagaaccccgaccuccugaacaaccaguucggcaccaugcccucccugacccucgccugccugacgaagcaggggcaggucgaccugaacgacguggugcucgcccugaccgaccugggccucaucuacaccgccaaguaccccaacagcuccgaccuggaccgccugagccagagccacccgauccucuccauggucgacaccaagaaguccagccugaacaucagcggcuacaacuucucccugggggcggccgugaaggccggcgccugcaugcucgacgggggcaacaugcuggagacgaucaaggugacgccccagaccauggacggcauccucaagagcauccugaaggucaagaagucccuggggauguucgugagcgacacccccggcgagcggaaccccuacgagaacauccuguacaagaucugccucuccggggacggcuggccguacaucgccagccgcaccuccaucguggggcgggcgugggagaacaccaccgucgaccuggagagcgacggcaagccccagaaggugggcaccgccggguccaacaagagccugcaguccgccggcuuccccacggggcucaccuacagccagcugaugacccugaaggacuccaugaugcagcuggaccccagcgccaagaccuggaucgacaucgagggccgcccggaggaccccgucgagaucgcccucuaccagcccauguccgggugcuacauccacuucuuccgggagcccacggaccugaagcaguucaagcaggacgcgaaguacagccacggcaucgacgugaccgaccuguucccggcccagcccggccucaccagcgccgugaucgaggcccugccccgcaacaugguccugaccugccagggguccgacgacaucaagcggcuccuggacagccagggccgccgcgacaucaagcugaucgacaucgcccucuccaaggcggacagccggcgcuucgagaacgccgugugggaccagugcaaggaccugugccacaugcacacggggguggucguggagaagaagaagcggggcgggaaggaggagaucacgccccacugcgcccugauggacugcaucauguacgacgccgccguguccggcggccucaacaucccgguccugcgcgcggugcugccccgggacaugguguuccgcaccagcucccccaaggucgugcucugaggacuagucccuguucccagagcccacuuuuuuuucuuuuuuugaaauaaaauagccugucuuucagaucuaaaaaaaaaaaaaaaaaaaaaaaaaaaaaaaaaaaaaaaaaaaaaaaaaaaaaaaaaaaaaaaaaaaaaaaaaaaaaaaaaaaaaaaaaaaaaaaaaaaa

SEQ ID NO: 19989 - RNA, 2028 nt, Artificial Sequence
  mRNA product Design a-2 (A100) comprising derived and/or modified sequence from LASV(LASV035-NIG-2009;Clade II)__AIT17589__SP-HsALB_NP(2-569) (opt1)
aggagaguccgcucagccagguugcagaagcggcuuagcguguguccuaaucuucucucugcguguagguaggccugugccgcaaacaagcuuaccaugaagugggugaccuucaucagccugcucuuccuguucuccagcgccuacuccagcgccuccaaggaggugaaguccuuccuguggacccagagccuccgccgggagcugagcggcuacugcuccagcaucaagcugcaggucgugaaggacgcccaggcgcuccugcacgggcuggacuucuccgaggugagcaacguccagcgccucaugcggaagcagaagcgcgacgacuccgaccugaagcggcugcgcgaccucaaccaggccgugaacaaccugguggagcucaagagcacccagcagaaguccauccugcgggucggcacgcugaccagcgacgaccugcucacccuggccgccgaccuggagaagcucaaguccaaggugauccgcaccgagcggccccugagcuccgggguguacaugggcaaccugagcgcccagcagcucgagcagcgccgggcgcugcugaacaugaucgggauggucggcggcgcccaggggacgcagccgggccgcgacgggguggugcgggucugggacgugaagaaccccgaccuccugaacaaccaguucggcaccaugcccucccugacccucgccugccugaccaagcagggccagguggaccugaacgacgccguccucgcgcugacggaccuggggcucaucuacaccgccaaguaccccaacagcuccgaccuggaccgccugagccagagccacccgauccucaacaugguggacaccaagaaguccagccugaacaucuccggcuacaacuucagccugggggccgccgugaaggccggcgcgugcaugcucgacgggggcaacaugcuggagaccaucaaggucacgccccagaccauggacggcauccugaaguccauccucaaggugaagcggagccuggggauguucguguccgacacccccggcgagcgcaaccccuacgagaacauccuguacaagaucugccucagcggggacggcuggccguacaucgccucccggaccagcaucgucgggcgcgccugggagaacacgaccguggaccuggaguccgacggcaagccccagaaggugggcaccaccgggagcaacaagucccugcagagcgccggcuuccccacggggcucaccuacucccagcugaugacccugaaggacagcaugaugcagcuggaccccuccgccaagaccuggaucgacaucgagggccggccggaggaccccgucgagaucgcgcucuaccagcccaugagcgggugcuacauccacuucuuccgcgagcccacggaccugaagcaguucaagcaggacgccaaguacucccacggcaucgacguggccgaccuguucccggcccagcccggccucaccagcgccgucaucgaggcgcugccccggaacauggugcugaccugccaggggagcgacgacaucaagaagcuccuggacucccagggccgccgcgacaucaagcugaucgacaucgcccucagcaaggccgacucccggaaguucgagaacgccgugugggaccagugcaaggaccugugccacaugcacaccggggucgugguggagaagaagaagcgcggcgggaaggaggagaucacgccccacugcgcccugauggacugcaucauguacgacgcggccgucagcggcggccucaacaucccggugcugcgggccgugcugccccgcgacauggucuuccggaccuccagccccaagguggugcucugaggacuagucccuguucccagagcccacuuuuuuuucuuuuuuugaaauaaaauagccugucuuucagaucuaaaaaaaaaaaaaaaaaaaaaaaaaaaaaaaaaaaaaaaaaaaaaaaaaaaaaaaaaaaaaaaaaaaaaaaaaaaaaaaaaaaaaaaaaaaaaaaaaaaa

SEQ ID NO: 19990 - RNA, 2028 nt, Artificial Sequence
  mRNA product Design a-2 (A100) comprising derived and/or modified sequence from LASV(LASV1000-NIG-2009;Clade II)__AIT17783__SP-HsALB_NP(2-569) (opt1)
aggagaguccgcucagccagguugcagaagcggcuuagcguguguccuaaucuucucucugcguguagguaggccugugccgcaaacaagcuuaccaugaagugggugaccuucaucagccugcucuuccuguucuccagcgccuacuccagcgccuccaaggaggugaaguccuuccuguggacccagagccuccgccgggagcugagcggcuacugcuccaacaucaagcugcaggucgugaaggacgcccaggcgcuccugcacgggcuggacuucagcgagguguccaacguccagcgccucaugcggaagcagaagcgcgacgacagcgaccugaagcggcugcgcgaccucaaccaggccgugaacaaccugguggagcugaaguccacccagcagaaguccauccuccgggucggcacgcugaccagcgacgaccugcucacccuggccgccgaccuggagaagcucaagagcaaggugauccgcaccgagcggccccuguccagcgggguguacaugggcaaccuguccacgcagcagcucgagcagcgccgggcccugcugaacaugaucgggauggucggcggcgcgcaggggacccagccgggccgcgacgggguggugcgggucugggacgugaagaaccccgaccuccugaacaaccaguucggcaccaugcccagccugacccucgccugccugacgaagcagggccagguggaccugaacgacgucgugcucgcccugaccgaccuggggcucaucuacaccgccaaguaccccaacuccagcgaccuggaccgccugucccagagccacccgauccucaacaugguggacaccaagaaguccagccugaacaucagcggcuacaacuucucccugggggcggccgucaaggccggcgccugcaugcucgacgggggcaacaugcuggagacgaucaaggugacgccccagaccauggacggcauccucaagagcauccugaaggugaagaagucccuggggauguucgucagcgacacccccggcgagcggaaccccuacgagaacauccuguacaagaucugccucuccggggacggcuggccguacaucgccagccgcaccuccaucguggggcgggcgugggagaacaccaccguggaccuggagagcgacggcaagccccagaaggucggcaccgccggguccaacaagagccugcaguccgccggcuuccccacggggcucaccuacagccagcugaugacccugaaggacuccaugaugcagcuggaccccagcgccaagaccuggaucgacaucgagggccgcccggaggaccccguggagaucgcccucuaccagcccgucuccgggugcuacauccacuucuuccgggagcccacggaccugaagcaguucaagcaggacgcgaaguacagccacggcaucgacguggccgaccuguucccggcccagcccggccucaccuccgccgugaucgaggcccugccccgcaacaugguccugaccugccaggggagcgacgacaucaagcggcuccuggacagccagggccgccgcgacaucaagcugaucgacaucgcgcucuccaaggccgacagccggcgcuucgagaacgccgugugggaccagugcaaggaccugugccacaugcacaccgggguggucguggagaagaagaagcggggcgggaaggaggagaucacgccccacugcgcccugauggacugcaucauguacgacgccgcgguguccggcggccucaacaucccgguccugcgcgccgugcugccccgggacaugguguuccgcaccagcucccccaaggucgugcucugaggacuagucccuguucccagagcccacuuuuuuuucuuuuuuugaaauaaaauagccugucuuucagaucuaaaaaaaaaaaaaaaaaaaaaaaaaaaaaaaaaaaaaaaaaaaaaaaaaaaaaaaaaaaaaaaaaaaaaaaaaaaaaaaaaaaaaaaaaaaaaaaaaaaa

SEQ ID NO: 19991 - RNA, 2028 nt, Artificial Sequence
  mRNA product Design a-2 (A100) comprising derived and/or modified sequence from LASV(LASV221-NIG-2010;Clade II)__AIT17625__SP-HsALB_NP(2-569) (opt1)
aggagaguccgcucagccagguugcagaagcggcuuagcguguguccuaaucuucucucugcguguagguaggccugugccgcaaacaagcuuaccaugaagugggugaccuucaucagccugcucuuccuguucuccagcgccuacuccagcgccuccaaggaggugaaguccuuccuguggacccagagccuccgccgggagcugagcggcuacugcuccagcaucaagcugcaggucgugaaggacgcccaggcgcuccugcacgggcuggacuucuccgaggugagcaacguccagcgccucaugcggaagcagcgccgggacgacuccgaccugaagcgccugcgggaccucaaccaggccgugaacaaccugguggagcucaagagcacccagcagaaguccauccugcgcgucggcacgcugaccagcgacgaccugcucacccuggccgccgaccuggagaagcucaaguccaaggugauccggaccgagcgcccccugagcuccgggguguacaugggcaaccugagcacgcagcagcucgagcagcggcgcgcccugcugaacaugaucgggauggucggcggcgcgcaggggacccagccgggccgggacgggguggugcgcgucugggacgugaagaaccccgaccuccugaacaaccaguucggcaccaugcccucccugacccucgccugccugacgaagcagggccagguggaccugaacgacgccguccucgcccugaccgaccuggggcucaucuacaccgcgaaguaccccaacagcuccgaccuggaccggcugagccagagccacccgauccucaacaugguggacaccaagaaguccagccugaacaucuccggcuacaacuucagccugggggccgccgugaaggccggcgccugcaugcucgacgggggcaacaugcuggagacgaucaaggucacgccccagaccguggacggcauccugaaguccauccucaaggugaagcgcagccuggggauguucgucuccgacacccccggcgagcggaaccccuacgagaacauccuguacaagaucugccucagcggggacggcuggccguacaucgcgucccgcaccagcaucguggggcgggccugggagaacaccaccguggaccuggaguccgacggcaagccccagaaggucggcaccgccgggagcaacaagucccugcagagcgccggcuuccccacggggcucaccuacucccagcugaugacccugaaggacagcaugaugcagcuggaccccuccgccaagaccuggaucgacaucgagggccgcccggaggaccccguggagaucgcgcucuaccagcccaugagcgggugcuacauccacuucuuccgggagcccacggaccugaagcaguucaagcaggacgccaaguacucccacggcaucgacgucgccgaccuguucccggcccagcccggccucaccagcgccgugaucgaggcgcugccccgcaacauggugcugaccugccaggggagcgacgacaucaagcgccuccuggacucccagggccggcgcgacaucaagcugaucgacaucgcccucagcaaggccgacucccggaaguucgagaacgccgucugggaccagugcaaggaccugugccacaugcacaccggggugguggucgagaagaagaagcgcggcgggaaggaggagaucacgccccacugcgcccugauggacugcaucauguacgacgcggccgugagcggcggccucaacaucccggugcugcgggccguccugccccgcgacaugguguuccggaccuccagccccaaggugguccucugaggacuagucccuguucccagagcccacuuuuuuuucuuuuuuugaaauaaaauagccugucuuucagaucuaaaaaaaaaaaaaaaaaaaaaaaaaaaaaaaaaaaaaaaaaaaaaaaaaaaaaaaaaaaaaaaaaaaaaaaaaaaaaaaaaaaaaaaaaaaaaaaaaaaa

SEQ ID NO: 19992 - RNA, 2028 nt, Artificial Sequence
  mRNA product Design a-2 (A100) comprising derived and/or modified sequence from LASV(LASV237-NIG-2010;Clade II)__AIT17639__SP-HsALB_NP(2-569) (opt1)
aggagaguccgcucagccagguugcagaagcggcuuagcguguguccuaaucuucucucugcguguagguaggccugugccgcaaacaagcuuaccaugaagugggugaccuucaucagccugcucuuccuguucuccagcgccuacuccagcgccuccaaggaggugaaguccuuccuguggacccagagccuccgccgggagcugagcggcuacugcuccaacaucaagcugcaggucgugaaggacgcccaggcgcuccugcacgggcuggacuucagcgagguguccaacguccagcgccucaugcggaagcagaagcgcgacgacagcgaccugaagcggcugcgcgaccucaaccaggccgugaacaaccugguggagcugaaguccacccagcagaaguccauccuccgggucggcacccugaccagcgacgaccugcucacccuggccgccgaccuggagaagcucaagagcaaggugauccgcaccgagcggccccuguccagcgggguguacaugggcaaccuguccacgcagcagcucgagcagcgccgggcccugcugaacaugaucgggauggucggcggcgcgcaggggacccagccgggccgcgacgggguggugcgggucugggacgugaagaaccccgaccuccugaacaaccaguucggcaccaugcccagccugacccucgccugccugacgaagcagggccagguggaccugaacgacgccguccucgcccugaccgaccuggggcucaucuacaccgcgaaguaccccaacuccagcgaccuggaccgccugucccagagccacccgauccucaacaugguggacaucaagaaguccagccugaacaucagcggcuacaacuucucccugggggccgccgugaaggccggcgccugcaugcucgacgggggcaacaugcuggagaccaucaaggucacgccccagaccauggacggcauccucaagagcauccugaaggugaagcggucccuggggauguucgugagcgacacccccggcgagcgcaaccccuacgagaacauccuguacaagaucugccucuccggggacggcuggccguacaucgcgagccggaccuccaucgucgggcgcgccugggagaacacgaccguggaccuggagagcgacggcaagccccagaaggugggcuccgccgggagcaacaagucccugcagagcgccggcuuccccaccgggcucaccuacucccagcugaugacgcugaaggacagcaugaugcagcuggaccccuccgccaagaccuggaucgacaucgagggccggccggaggaccccgucgagaucgcgcucuaccagcccaugagcgggugcuacauccacuucuuccgcgagcccaccgaccugaagcaguucaagcaggacgccaaguacucccacggcaucgacguggccgaccuguucccggcccagcccggccucaccagcgccgucaucgaggcgcugccccggaacauggugcugacgugccaggggagcgacgacaucaagcgccuccuggacucccagggccgccgggacaucaagcugaucgacaucgcccucagcaaggccgacucccgccgguucgagaacgccgugugggaccagugcaaggaccugugccacaugcacaccggggucgugguggagaagaagaagcgcggcgggaaggaggagaucacgccccacugcgcccugauggacugcaucauguacgacgcggccgucagcggcggccucaacaucccggugcugcgggccgugcugccccgcgacauggucuuccggaccuccagccccaagguggugcucugaggacuagucccuguucccagagcccacuuuuuuuucuuuuuuugaaauaaaauagccugucuuucagaucuaaaaaaaaaaaaaaaaaaaaaaaaaaaaaaaaaaaaaaaaaaaaaaaaaaaaaaaaaaaaaaaaaaaaaaaaaaaaaaaaaaaaaaaaaaaaaaaaaaaa

SEQ ID NO: 19993 - RNA, 2028 nt, Artificial Sequence
  mRNA product Design a-2 (A100) comprising derived and/or modified sequence from LASV(LASV253-NIG-2011;Clade II)__AIT17671__SP-HsALB_NP(2-569) (opt1)
aggagaguccgcucagccagguugcagaagcggcuuagcguguguccuaaucuucucucugcguguagguaggccugugccgcaaacaagcuuaccaugaagugggugaccuucaucagccugcucuuccuguucuccagcgccuacuccagcgccuccaaggaggugaaguccuuccuguggacccagagccuccgccgggagcugagcggcuacugcuccagcaucaagcugcaggucgugaaggacgcccaggcgcuccugcacgggcuggacuucuccgaggugagcaacguccagcgccucaugcggaagcagaagcgcgacgacuccgaccugaagcggcugcgcgaccucaaccaggccgugaacaaccugguggagcucaagagcacccagcagaaguccguccugcgggugggcacccugaccagcgacgaccugcucacccuggccgccgaccuggagaagcucaaguccaaggugauccgcaccgagcggccccugagcuccggggucuacaugggcaaccugagcacgcagcagcucgagcagcgccgggcccugcugaacaugaucgggauggugggcggcgcgcaggggacccagccgggccgcgacggggugguccgggugugggacgugaagaaccccgaccuccugaacaaccaguucggcaccaugcccucccugacccucgccugccugacgaagcaggggcaggucgaccugaacgacguggugcucgcccugaccgaccugggccucaucuacaccgccaaguaccccaacagcuccgaccuggaccgccugagccagagccacccgauccucaacauggucgacaccaagaaguccagccugaacaucuccggcuacaacuucagccugggggcggccgugaaggccggcgccugcaugcucgacgggggcaacaugcuggagacgaucaaggugacgccccagaccauggacggcauccugaaguccauccucaaggucaagaagucccuggggauguucgugagcgacacccccggcgagcggaaccccuacgagaacauccuguacaagaucugccucagcggggacggcuggccguacaucgccucccgcaccagcaucguggggcgggcgugggagaacaccaccgucgaccuggaguccgacggcaagccccagaaggugggcaccgccgggagcaacaagucccugcagagcgccggcuuccccacggggcucaccuacucccagcugaugacccugaaggacagcaugaugcagcuggaccccuccgccaagaccuggaucgacaucgagggccgcccggaggaccccgucgagaucgcccucuaccagcccaugagcgggugcuacauccacuucuuccgggagcccacggaccugaagcaguucaagcaggacgcgaaguacucccacggcaucgacgugaccgaccuguucccggcccagcccggccucaccagcgccgugaucgaggcccugccccgcaacaugguccugaccugccaggggagcgacgacaucaagcggcuccuggacucccagggccgccgcgacaucaagcugaucgacaucgcccucagcaaggcggacucccggcgcuucgagaacgccgugugggaccagugcaaggaccugugccacaugcacacggggguggucguggagaagaagaagcggggcgggaaggaggagaucacgccccacugcgcccugauggacugcaucauguacgacgccgccgugagcggcggccucaacaucccgguccugcgcgcggugcugccccgggacaugguguuccgcaccuccagccccaaggucgugcucugaggacuagucccuguucccagagcccacuuuuuuuucuuuuuuugaaauaaaauagccugucuuucagaucuaaaaaaaaaaaaaaaaaaaaaaaaaaaaaaaaaaaaaaaaaaaaaaaaaaaaaaaaaaaaaaaaaaaaaaaaaaaaaaaaaaaaaaaaaaaaaaaaaaaa

SEQ ID NO: 19994 - RNA, 2028 nt, Artificial Sequence
  mRNA product Design a-2 (A100) comprising derived and/or modified sequence from LASV(LASV254-NIG-2011;Clade II)__AIT17675__SP-HsALB_NP(2-569) (opt1)
aggagaguccgcucagccagguugcagaagcggcuuagcguguguccuaaucuucucucugcguguagguaggccugugccgcaaacaagcuuaccaugaagugggugaccuucaucagccugcucuuccuguucuccagcgccuacuccagcgccuccaaggaggugaaguccuuccuguggacccagagccuccgccgggagcugagcggcuacugcuccagcaucaagcugcaggucgugaaggacgcccaggcgcuccugcacgggcuggacuucuccgaggugagcaacguccagcgccucaugcggaagcagaagcgcgacgacuccgaccugaagcggcugcgcgaccucaaccaggccgugaacaaccugguggagcucaagagcacccagcagaaguccguccugcgggugggcacgcugaccagcgacgaccugcucacccuggccgccgaccuggagaagcucaaguccaaggugauccgcaccgagcggccccugagcuccggggucuacaugggcaaccugagcacgcagcagcucgagcagcgccgggcccugcugaacaugaucgggauggugggcggcgcgcaggggacccagccgggccgcgacggggugguccgggugugggacgugaagaaccccgaccuccugaacaaccaguucggcaccaugcccucccugacccucgccugccugacgaagcaggggcaggucgaccugaacgacgccgugcucgcccugaccgaccugggccucaucuacaccgcgaaguaccccaacagcuccgaccuggaccgccugagccagagccacccgauccucaacaugguggacaccaagaaguccagccugaacaucuccggcuacaacuucagccugggggccgccgucaaggccggcgccugcaugcucgacgggggcaacaugcuggagacgaucaaggugacgccccagaccauggacggcauccugaaguccauccucaaggugaagaagucccuggggauguucgucagcgacacccccggcgagcggaaccccuacgagaacauccuguacaagaucugccucagcggggacggcuggccguacaucgcgucccgcaccagcaucguggggcgggccugggagaacaccaucguggaccuggaguccgacggcaagccccagaaggucggcaccgccgggagcaacaagucccugcagagcgccggcuuccccaccgggcucacguacucccagcugaugacccugaaggacagcaugaugcagcuggaccccuccgccaagaccuggaucgacaucgagggccgcccggaggaccccguggagaucgcgcucuaccagcccaugagcgggugcuacauccacuucuuccgggagcccaccgaccugaagcaguucaagcaggacgccaaguacucccacggcaucgacgucgccgaccuguucccggcccagcccggccucacgagcgccgugaucgaggcgcugccccgcaacauggugcugaccugccaggggagcgacgacaucaagcggcuccuggacucccagggccgccgcgacaucaagcugaucgacaucgcccucagcaaggccgacucccggcgcuucgagaacgccgucugggaccagugcaaggaccugugccacaugcacaccggggugguggucgagaagaagaagcggggcgggaaggaggagaucacgccccacugcgcccugauggacugcaucauguacgacgcggccgugagcggcggccucaacaucccggugcugcgcgccguccugccccgggacaugguguuccgcaccuccagccccaaggugguccucugaggacuagucccuguucccagagcccacuuuuuuuucuuuuuuugaaauaaaauagccugucuuucagaucuaaaaaaaaaaaaaaaaaaaaaaaaaaaaaaaaaaaaaaaaaaaaaaaaaaaaaaaaaaaaaaaaaaaaaaaaaaaaaaaaaaaaaaaaaaaaaaaaaaaa

SEQ ID NO: 19995 - RNA, 2028 nt, Artificial Sequence
  mRNA product Design a-2 (A100) comprising derived and/or modified sequence from LASV(Nig08-04;Clade II)__ADU56611__SP-HsALB_NP(2-569) (opt1)
aggagaguccgcucagccagguugcagaagcggcuuagcguguguccuaaucuucucucugcguguagguaggccugugccgcaaacaagcuuaccaugaagugggugaccuucaucagccugcucuuccuguucuccagcgccuacuccagcgccuccaaggaggugaaguccuuccuguggacccagagccuccgccgggagcugagcggcuacugcuccaacaucaagcugcaggucgugaaggacgcccaggcgcuccugcacgggcuggacuucagcgagguguccaacguccagcgccucaugcggaagcagaagcgcgacgacggcgaccugaagcggcugcgcgaccucaaccaggccgugaacaaccugguggagcucaagagcacccagcagaaguccguccugcggguggggacccugaccagcgacgaccugcucacccuggccgccgaccuggagaagcucaaguccaaggugauccgcaccgagcggccccugagcuccggcgucuacauggggaaccugagcacgcagcagcucgagcagcgcaaggcccugcuguccaugaucggcauggugggcggggcgcagggcacccagccggggcgggacggcgugguccgcgugugggacgugaagaaccccgaccuccugaacaaccaguucgggaccaugcccagccugacccucgccugccugacgaagcagggccaggucgaccugaacgacgccgugcucgcccugaccgaccugggccucaucuacaccgcgaaguaccccaacuccagcgaccuggaccggcugucccagagccacccgauccucaacaugguggacaccaagaaguccagccugaacaucagcggguacaacuucucccugggcgccgccgucaaggccggggccugcaugcucgacggcggcaacaugcuggagacgaucaaggugacgccccagaccauggacgggauccucaagagcauccugaaggugaagcgcucccugggcauguucgucagcgacacccccggggagcggaaccccuacgagaacauccuguacaagaucugccucuccggcgacggguggccguacaucgcgagccgcaccuccaucgugggccgggccugggagaacaccaccguggaccuggagagcgacggcaagccccagaaggucgggaccgccggcuccaacaagagccugcaguccgccggguuccccacgggccucaccuacagccagcugaugacccugaaggacuccaugaugcagcuggaccccagcgccaagaccuggaucgacaucgaggggcgcccggaggaccccguggagaucgcgcucuaccagcccauguccggcugcuacauccacuucuuccgggagcccacggaccugaagcaguucaagcaggacgccaaguacagccacggcaucgacgucaccgaccuguucuccgcccagccggggcucaccagcgccgugaucgaggcccugccccgcaacauggugcugaccugccagggcagcgacgacaucaagaagcuccuggacucccaggggcggcgcgacaucaagcugaucgacaucagccucaacaaggcggacucccgccgguucgagaacgccgucugggaccagugcaaggaccugugccacaugcacacgggcgugguggucgagaagaagaagcgcgggggcaaggaggagaucacgccccacugcgcccugauggacugcaucauguucgacgccgccgugagcggcgggcucaacauccccauccugcgggcggugcugccgcgcgacauggucuuccggaccuccagccccaagguggugcucugaggacuagucccuguucccagagcccacuuuuuuuucuuuuuuugaaauaaaauagccugucuuucagaucuaaaaaaaaaaaaaaaaaaaaaaaaaaaaaaaaaaaaaaaaaaaaaaaaaaaaaaaaaaaaaaaaaaaaaaaaaaaaaaaaaaaaaaaaaaaaaaaaaaaa

SEQ ID NO: 19996 - RNA, 2031 nt, Artificial Sequence
  mRNA product Design a-2 (A100) comprising derived and/or modified sequence from LASV(GA391;Clade III)__AAA46284__SP-HsALB_NP(2-570) (opt1)
aggagaguccgcucagccagguugcagaagcggcuuagcguguguccuaaucuucucucugcguguagguaggccugugccgcaaacaagcuuaccaugaagugggugaccuucaucagccugcucuuccuguucuccagcgccuacuccagcgccuccaaggaggugcgcagcugccuguggacccagucccuccggcgcgagcugagcggcuacugcuccaacaucaagcugcaggucgugaaggacgcccaggcgcuccugcacgggcuggacuucagcgagguguccaacguccagcggcucaugcgcaagcagaagcgggacgacggcgaccugaagcgccugcgggaccucaaccaggccgugaacaaccugguggagcugaaguccacccagcagaaguccguccuccgcguggggacgcugagcuccgacgaccugcucauccuggccgccgaccuggagaagcucaagagcaaggugacccggaccgagcgcccccuguccagcggcgucuacauggggaaccuguccagccagcagcucgaccagcggcgcgcccugcugaacaugaucggcaugaccggcguguccgggggcgggaagggcgcgagcaacgggaucgugcgggucugggacgugaagaacgccgagcuccugaacaaccaguucggcacgaugccgucccugacccucgccugccugaccaagcagggccagguggaccugaacgacgccguccaggcgcucaccgaccuggggcugaucuacacggccaaguaccccaacagcagcgaccucgaccgccugucccagagccaccccauccugaacaugaucgacaccaagaaguccagccucaacaucuccggcuacaacuucagccugggggccgccgugaaggccggcgcgugcaugcuggacggcgggaacaugcucgagaccaucaaggugagcccccagaccauggacggcauccucaagagcauccugaaggucaagaagucccuggggauguucgugagcgacacgccgggcgagcggaaccccuacgagaacauccuguacaagaucugccuguccggggacggcuggagcuacaucgccucccgcaccagcaucgugggccgggccugggagaacaccgucguggaccucgagcaggacaacaagccccagaagaucgggaacggcggguccaacaagagccugcaguccgccggcuucgccgcggggcugaucuacagccagcucaugacccugaaggacuucaagugcuucaaccugauccccaacgccaagacguggauggacaucgagggccgcccggaggaccccguggagaucgcccuguaccagcccuccagcggcugcuacguccacuucuuccgggagcccaccgaccucaagcaguucaagcaggacgccaaguacagccacgggcgcgacgugaccgaccuguucgccgcgcagccgggccugaccuccgccgucaucgaggcccucccccggaacauggugaucacgugccaggggagcgaggacauccgcaagcugcuggagucccagggccgccgggacaucaagcucaucgacaucacccugagcaaggccgacucccgcaaguucgagaacgccgugugggaccaguucaaggaccugugccacaugcacaccggggucgugguggagaagaagaagcggggcggcaaggaggagaucacgccccacugcgcgcucauggacugcaucauguucgacgccgccgucagcgggggccuggacgccaaggugcugcgcgugguccucccccgggacaugguguuccgcaccuccaccccgaaggugguccugugaggacuagucccuguucccagagcccacuuuuuuuucuuuuuuugaaauaaaauagccugucuuucagaucuaaaaaaaaaaaaaaaaaaaaaaaaaaaaaaaaaaaaaaaaaaaaaaaaaaaaaaaaaaaaaaaaaaaaaaaaaaaaaaaaaaaaaaaaaaaaaaaaaaaa

SEQ ID NO: 19997 - RNA, 2028 nt, Artificial Sequence
  mRNA product Design a-2 (A100) comprising derived and/or modified sequence from LASV(Nig08-A19;Clade III)__ADU56619__SP-HsALB_NP(2-569) (opt1)
aggagaguccgcucagccagguugcagaagcggcuuagcguguguccuaaucuucucucugcguguagguaggccugugccgcaaacaagcuuaccaugaagugggugaccuucaucagccugcucuuccuguucuccagcgccuacuccagcgccuccaaggaggugaaguccuuccuguggacccagucccuccgccgggagcugagcggcuacugcuccaacaucaagcugcaggucgugaaggacgcccaggcgcuccugcacgggcuggacuucagcgagguguccaacguccagcgccucaugcggaagcagaagcgcgacgacggcgaccugaagcggcugcgcgaccucaaccaggccgugaacaaccugguggagcucaagagcacccagcagaaguccguccugcggguggggacccugagcuccgacgaccugcucgugcuggccgccgaccuggagaagcucaagagcaaggucgugcgcaccgagcggccccuguccagcggcaucuacauggggaaccuguccagccagcagcucgaccagcgcaaggcccugcugaacaugaucggcaugaccggcgggaacggcgggcggaacaccacguccgacggcaucgugcgcgucugggacgugaagaacgcggagcuccugaacaaccaguucgggaccaugccgagccugacccucgccugccugaccaagcagggccagguggaccugaacgacgccguccaggcccucacggaccugggccugaucuacaccgcgaaguaccccaacuccagcgaccucgaccggcuggcccagagccaccccauccugaacaugaucgacaccaagaaguccagccucaacaucuccggguacaacuucagccugggcgccgccgugaaggccggggcgugcaugcuggacggcggcaacaugcucgagaccaucaaggugagcccccagacgauggacgggauccucaagagcauccugaaggucaagcgcucccugggcauguucaucagcgacaccccgggggagcggaaccccuacgagaacauccuguacaagaucugccuguccggcgacggguggcccuacaucgccagccgcaccuccaucgugggccgggccugggagaacaccguggucgaccucgagagcgacaacaagccccagaagacgggcaacgggggcuccaacaagagccugcaguccgccggguucgccgcgggccugaccuacagccagcucaugacccugaaggacuccaugcugcagcuggacccgaacgccaagaccuggauggacaucgaggggcgccccgaggaccccguggagaucgcccucuaccagcccagcuccggcugcuacauccacuucuuccgggagccgacggaccugaagcaguucaagcaggacgccaaguacagccacggcaucgacgugaccgaccuguucgccgcgcagcccgggcucaccagcgccgucaucgaggcccugccccgcaacauggugaucacgugccagggcuccgaggacauccggaagcugcucgagagccaggggcgccgcgacaucaagcugaucgacaucucccugagcaaggucgacucccggaaguucgagaacgccgugugggaccaguucaaggaccucugccacaugcacaccggcaucguggucgagaagaagaagcgcgggggcaaggaggagaucacgccccacugcgcccugauggacugcaucauguucgacgcggccgugagcggcgggguggacgccaagguccugcgggccgugcucccgcgcgacaugguguuccggaccuccacccccaaggucgugcugugaggacuagucccuguucccagagcccacuuuuuuuucuuuuuuugaaauaaaauagccugucuuucagaucuaaaaaaaaaaaaaaaaaaaaaaaaaaaaaaaaaaaaaaaaaaaaaaaaaaaaaaaaaaaaaaaaaaaaaaaaaaaaaaaaaaaaaaaaaaaaaaaaaaaa

SEQ ID NO: 19998 - RNA, 2028 nt, Artificial Sequence
  mRNA product Design a-2 (A100) comprising derived and/or modified sequence from LASV(G1180-SLE-2010;Clade IV)__AIT17169__SP-HsALB_NP(2-569) (opt1)
aggagaguccgcucagccagguugcagaagcggcuuagcguguguccuaaucuucucucugcguguagguaggccugugccgcaaacaagcuuaccaugaagugggugaccuucaucagccugcucuuccuguucuccagcgccuacuccagcgccuccaaggagaucaagagcuuccuguggacccagucccuccgccgggagcugagcggcuacugcuccaacaucaagcuccagguggucaaggacgcccaggcgcugcugcacgggcuggacuucagcgagguguccaacgugcagcgccucaugcggaaggagcgccgggacgacaacgaccugaagcgccugcgggaccucaaccaggccgucaacaaccugguggagcucaagagcacccagcagaaguccauccugcgcgugggcacccugaccagcgacgaccugcucauccuggccgccgaccuggagaagcucaaguccaaggucauccggaccgagcgcccccugagcgccgggguguacaugggcaaccuguccagccagcagcucgaccagcggcgcgcgcugcuguccaugaucgggaugagcuccggcaaccagcgggcccaggccggccgcgacggggugguccgggugugggacgugaagaacgucgagcuccugaacaaccaguucggcaccaugccgagccugacgcucgccugccugaccaagcagggccagguggaccugaacgacgcggugcaggcccucaccgaccuggggcugaucuacaccgccaaguaccccaacacguccgaccucgaccgccugacccagagccaccccauccugaacaugaucgacaccaagaaguccagccucaacaucagcggguacaacuucucccugggcgccgccgucaaggcgggcgccugcaugcuggacgggggcaacaugcucgagaccaucaaggugagcccccagacgauggacgggauccugaaguccauccugaaggugaagaaggcccucggcauguucaucagcgacaccccgggcgagcggaaccccuacgagaacauccuguacaagaucugccuguccggggacggcuggcccuacaucgccagccgcaccuccaucaccgggcgggccugggagaacacggucguggaccucgagagcgacggcaagccccagaaggcgggguccaacaacagcaacaagucccugcagagcgugggcuucaccgccggccugaccuacucccagcucaugacccugaaggacgccaugcugcagcuggacccgaacgccaagacguggauggacaucgaggggcgccccgaggaccccgucgagaucgcccucuaccagcccagcuccggcugcuacauccacuucuuccgggagccgaccgaccugaagcaguucaagcaggacgcgaaguacagccacgggaucgacgugaccgaccuguucgccgcccagcccggccucaccuccgccgugaucgacgcccugccccgcaacauggucaucacgugccaggggagcgacgacauccgcaagcugcucgagagccagggccggaaggacaucaagcugaucgacaucgcgcuguccaagaccgacagccgcaaguacgagaacgccgugugggaccaguacaaggaccucugccacaugcacaccggcgucgugguggagaagaagaagcgcgggggcaaggaggagaucacgccccacugcgcccugauggacugcaucauguucgacgccgcggucuccgggggccugaacaccagcgugcuccgggccgugcugccgcgggacauggucuuccgcaccuccacgccccggguggugcugugaggacuagucccuguucccagagcccacuuuuuuuucuuuuuuugaaauaaaauagccugucuuucagaucuaaaaaaaaaaaaaaaaaaaaaaaaaaaaaaaaaaaaaaaaaaaaaaaaaaaaaaaaaaaaaaaaaaaaaaaaaaaaaaaaaaaaaaaaaaaaaaaaaaaa

SEQ ID NO: 19999 - RNA, 2028 nt, Artificial Sequence
  mRNA product Design a-2 (A100) comprising derived and/or modified sequence from LASV(G1442-SLE-2011;Clade IV)__AIT17181__SP-HsALB_NP(2-569) (opt1)
aggagaguccgcucagccagguugcagaagcggcuuagcguguguccuaaucuucucucugcguguagguaggccugugccgcaaacaagcuuaccaugaagugggugaccuucaucagccugcucuuccuguucuccagcgccuacuccagcgccuccaaggaggugaaguccuuccuguggacccagagccuccgccgggagcugagcggcuacugcuccaacaucaagcugcaggucgugaaggacgcccaggcgcuccugcacgggcuggacuucagcgagguguccaacguccagcgccucaugcggaagcagcgccgggacgacaacgaccugaagcgccugcgggaccucaaccaggccgugaacaaccugguggagcucaagagcacccagcagaaguccguccugcgcgugggcacccugaccagcgacgaccugcucgugcuggccgccgaccuggagaagcucaaguccaaggucauccggaccgagcgcccccugagcgccgggguguacaugggcaaccuguccagccagcagcucgaccagcggcgcgcgcugcugaacaugaucgggauguccggcggcauccaggggacccggacgggccgcgacggggugguccgggugugggacgugaagaacgccgaccuccugaacaaccaguucggcaccaugccgagccugacccucgccugccugaccaagcaggggcaggucgaccugaacgacguggugcaggcccucacggaccugggccugaucuacaccgcgaaguaccccaacgccuccgaccucgaccgccugacccagagccaccccauccugaacaugaucgacaccaagaaguccagccucaacaucagcggcuacaacuucucccugggggccgccgucaaggccggcgcgugcaugcuggacgggggcaacaugcucgagacgaucaaggugagcccccagaccauggacggcauccugaaguccauccugaaggugaagaagacccucgggauguucaucagcgacaccccgggcgagcggaaccccuacgagaacauccuguacaagaucugccuguccggggacggcuggcccuacaucgccagccgcacguccaucaccgggcgggccugggagaacaccgucguggaccucgagagcgacggcaagccccagaaggccggcuccaacaacagcaacaagucccugcagagcgccggguucgcggccggccugaccuacucccagcucaugacgcugaaggacgccaugcugcagcuggacccgaacgccaagaccuggauggacaucgaggggcgccccgaggaccccguggagaucgcccucuaccagcccagcuccggcugcuacauccacuucuuccgggagccgaccgaccugaagcaguucaagcaggacgcgaaguacagccacgggaucgacgucaccgaccuguucgccgcccagcccggccucacguccgccgugaucgaggcccugccccgcaacauggucaucacgugccagggcagcgacgacaucaagaagcugcucgagucccaggggcgcaaggacaucaagcugaucgacaucgcgcugagcaagaccgacagccggaaguacgagaacgccgugugggaccaguacaaggaccucugccacaugcacaccggcguggucguggagaagaagaagcgcgggggcaaggaggagaucaccccgcacugcgcccugauggacugcaucauguucgacgccgcgguguccgggggccugaacacccucguccugcgggccgugcugccccgcgacaugguguuccggaccagcacgccccgcgucgugcucugaggacuagucccuguucccagagcccacuuuuuuuucuuuuuuugaaauaaaauagccugucuuucagaucuaaaaaaaaaaaaaaaaaaaaaaaaaaaaaaaaaaaaaaaaaaaaaaaaaaaaaaaaaaaaaaaaaaaaaaaaaaaaaaaaaaaaaaaaaaaaaaaaaaaa

SEQ ID NO: 20000 - RNA, 2028 nt, Artificial Sequence
  mRNA product Design a-2 (A100) comprising derived and/or modified sequence from LASV(G3010-SLE-2013;Clade IV)__AIT17345__SP-HsALB_NP(2-569) (opt1)
aggagaguccgcucagccagguugcagaagcggcuuagcguguguccuaaucuucucucugcguguagguaggccugugccgcaaacaagcuuaccaugaagugggugaccuucaucagccugcucuuccuguucuccagcgccuacuccagcgccuccaaggagaucaagagcuuccuguggacccagucccuccgccgggagcugagcggcuacugcuccaacaucaagcuccagguggucaaggacgcccaggcgcugcugcacgggcuggacuucagcgagguguccaacgugcagcgccucaugcggaaggagcgccgggacgacaacgaccugaagcgccugcgggaccucaaccaggccgucaacaaccugguggagcucaagagcacccagcagaaguccauccugcgcgugggcacccugaccagcgacgaccugcucauccuggccgccgaccuggagaagcucaaguccaaggucacccggaccgagcgcccccugagcgccgggguguacaugggcaaccuguccagccagcagcucgaccagcggcgcgcgcugcuguccaugaucgggaugagcuccggcgugcagggcgcccgggccgggcgcgacggcgucgugcgggugugggacgucaagaacgccgagcuccugaacaaccaguucgggacgaugccgagccugacccucgcgugccugaccaagcagggccagguggaccugaacgacgugguccaggcccucaccgaccuggggcugaucuacacggccaaguaccccaacaccuccgaccucgaccgccugacccagagccaccccauccugaacaugaucgacaccaagaaguccagccucaacaucagcggcuacaacuucucccugggcgccgccgugaaggcgggggccugcaugcuggacggcgggaacaugcucgagacgaucaaggugagcccccagaccauggacggcauccugaaguccauccugaaggucaagaaggcccucggcauguucaucagcgagaccccgggggagcggaaccccuacgagaacauccuguacaagaucugccuguccggcgacggguggcccuacaucgccagccgcaccuccaucacgggccgggccugggagaacaccgugguggaccucgagagcgacgggaagccccagaaggcgggcuccaacaacagcaacaagucccugcagagcgccggcuucaccgccgggcugaccuacucccagcucaugacgcugaaggacgccaugcugcagcuggacccgaacgccaagaccuggauggacaucgagggccgccccgaggaccccgucgagguggcgcucuaccagcccagcuccgggugcuacauccacuucuuccgggagccgaccgaccugaagcaguucaagcaggacgccaaguacagccacggcaucgacgugaccgaccuguucgccgcccagcccgggcucacguccgccgucaucgacgcgcugccccgcaacauggugaucacgugccagggcagcgacgacaucaagaagcugcucgagagccagggccgcaaggacaucaagcugaucgacaucgcccuguccaagaccgacagccggaaguacgagaacgccgucugggaccaguacaaggaccucugccacaugcacaccggggugguggucgagaagaagaagcgcggcgggaaggaggagaucaccccgcacugcgcccugauggacugcaucauguucgacgcggccguguccggcgggcugaacaccagcgugcuccgggccguccugccccgcgacaugguguuccggaccuccacgccccgcgugguccugugaggacuagucccuguucccagagcccacuuuuuuuucuuuuuuugaaauaaaauagccugucuuucagaucuaaaaaaaaaaaaaaaaaaaaaaaaaaaaaaaaaaaaaaaaaaaaaaaaaaaaaaaaaaaaaaaaaaaaaaaaaaaaaaaaaaaaaaaaaaaaaaaaaaaa

SEQ ID NO: 20001 - RNA, 2028 nt, Artificial Sequence
  mRNA product Design a-2 (A100) comprising derived and/or modified sequence from LASV(G502-SLE-2009;Clade IV)__AIT17127__SP-HsALB_NP(2-569) (opt1)
aggagaguccgcucagccagguugcagaagcggcuuagcguguguccuaaucuucucucugcguguagguaggccugugccgcaaacaagcuuaccaugaagugggugaccuucaucagccugcucuuccuguucuccagcgccuacuccagcgccuccaaggagaucaagagcuuccuguggacccagucccuccgccgggagcugagcggcuacugcuccaacaucaagcuccagguggucaaggacgcccaggcgcugcugcacgggcuggacuucagcgagguguccaacgugcagcgccucaugcggaaggagcgccgggacgacaacgaccugaagcgccugcgggaccucaaccaggccgucaacaaccugguggagcucaagagcacccagcagaaguccauccugcgcgugggcacccugaccagcgacgaccugcucauccuggccgccgaccuggagaagcucaaguccaaggucauccggaccgagcgcccccugagcgccgggguguacaugggcaaccuguccagccagcagcucgaccagcggcgcgcgcugcuguccaugaucgggaugagcggcggcaaccagggggugcgggccggcaaggacggggucgugcgcgugugggacgucaagaacgccgagcuccugaacaaccaguucggcaccaugccgucccugacgcucgccugccugaccaagcagggccagguggaccugaacgacgcggugcaggcccucaccgaccuggggcugaucuacaccgccaaguaccccaacacgagcgaccucgaccggcugacccagucccaccccauccugaacaugaucgacaccaagaaguccagccucaacaucuccggcuacaacuucagccugggggccgccgucaaggcgggcgccugcaugcuggacgggggcaacaugcucgagaccaucaaggugagcccccagacgauggacggcauccucaagagcauccugaaggugaagaaggcccuggggauguucaucuccgacaccccgggcgagcgcaaccccuacgagaacauccuguacaagaucugccugagcggggacggcuggcccuacaucgccucccggaccagcaucaccgggcgcgccugggagaacacggucguggaccucgaguccgacggcaagccccagaaggcgggcagcaacaacuccaacaagagccugcaguccgccggguucaccgccggccugaccuacagccagcucaugacccugaaggacgccaugcugcagcuggacccgaacacgaagaccuggauggacaucgaggggcggcccgaggaccccguggagaucgcccucuaccagcccuccagcggcugcuacauccacuucuuccgcgagccgaccgaccugaagcaguucaagcaggacgcgaaguacucccacgggaucgacgucaccgaccuguucgccgcccagcccggccucacgagcgccgugaucgacgcccugccccggaacauggugaucacgugccagggcuccgacgacauccgcaagcugcucgagagccaggggcgcaaggacaucaagcugaucgacaucgcgcugaacaagaccgacagccggaaguacgagaacgccgucugggaccaguacaaggaccucugccacaugcacaccggcguggucguggagaagaagaagcgcgggggcaaggaggagaucaccccgcacugcgcccugauggacugcaucauguucgacgccgcgguguccgggggccugaacaccagcguccuccgggccgugcugccccgcgacaugguguuccggaccuccacgccccgcgucgugcugugaggacuagucccuguucccagagcccacuuuuuuuucuuuuuuugaaauaaaauagccugucuuucagaucuaaaaaaaaaaaaaaaaaaaaaaaaaaaaaaaaaaaaaaaaaaaaaaaaaaaaaaaaaaaaaaaaaaaaaaaaaaaaaaaaaaaaaaaaaaaaaaaaaaaa

SEQ ID NO: 20002 - RNA, 2028 nt, Artificial Sequence
  mRNA product Design a-2 (A100) comprising derived and/or modified sequence from LASV(G733-SLE-2010;Clade IV)__AIT17155__SP-HsALB_NP(2-569) (opt1)
aggagaguccgcucagccagguugcagaagcggcuuagcguguguccuaaucuucucucugcguguagguaggccugugccgcaaacaagcuuaccaugaagugggugaccuucaucagccugcucuuccuguucuccagcgccuacuccagcgccuccaaggagaucaagagcuuccuguggacccagucccuccgccgggagcugagcggcuacugcuccaacaucaagcuccagguggucaaggacgcccaggcgcugcugcacgggcuggacuucagcgagguguccaacgugcagcgccucaugcggaaggagcgccgggacgacaacgaccugaagcgccugcgggaccucaaccaggccgucaacaaccugguggagcucaagagcacccagcagaaguccgugcugcgcgucggcacccugaccagcgacgagcugcucgugcuggccgccgaccuggagaagcucaaguccaaggugauccggaccgagcgcccccugagcgccggggucuacaugggcaaccuguccagccagcagcucgaccagcggcgcgcgcugcuguccaugaucgggaugagcggcggcaaccagggggcccggaccggccgcgacgggguggugcgggucugggacgugaagaacgccgagcuccugaacaaccaguucggcaccaugccgucccugacccucgccugccugaccaagcagggccagguggaccugaacgacgcgguccaggcccucaccgaccuggggcugaucuacacggccaaguaccccaacaccagcgaccucgaccgccugacccagucccaccccauccugaacaugaucgacaccaagaaguccagccucaacaucuccggcuacaacuucagccugggggccgccgugaaggcgggcgccugcaugcuggacgggggcaacaugcucgagacgaucaaggugagcccccagaccauggacggcauccucaagagcauccugaaggucaagaaggcccuggggauguucaucuccgacaccccgggcgagcggaaccccuacgagaacauccuguacaagaucugccugagcggggacggcuggcccuacaucgccucccgcaccagcaucacggggcgggccugggagaacaccgugguggaccucgaguccgacggcaagccccagaaggcgggcagcaacaacuccaacaagagccugcaguccgccggguucaccgccggccugaccuacagccagcucaugacgcugaaggacgccaugcugcagcuggacccgaacgccaagaccuggauggacaucgaggggcgccccgaggaccccgucgagaucgcgcucuaccagcccuccagcggcugcuacauccacuucuuccgggagccgaccgaccugaagcaguucaagcaggacgccaaguacucccacgggaucgacgugaccgaccuguucgccgcccagcccggccucacgagcgccgugaucgacgcgcugccccgcaacauggucaucacgugccagggcuccgacgacauccgcaagcugcucgagagccaggggcggaaggacaucaagcugaucgacaucgcccugagcaagaucgacucccgcaaguacgagaacgccgugugggaccaguacaaggaccucugccacaugcacaccggcgucgugguggagaagaagaagcgcgggggcaaggaggagaucacgccccacugcgcccugauggacugcaucauguucgacgcggccgucagcgggggccugaacucccucgugcugcgggccgugcugccgcgggacauggucuuccgcaccagcacgccccggguggugcucugaggacuagucccuguucccagagcccacuuuuuuuucuuuuuuugaaauaaaauagccugucuuucagaucuaaaaaaaaaaaaaaaaaaaaaaaaaaaaaaaaaaaaaaaaaaaaaaaaaaaaaaaaaaaaaaaaaaaaaaaaaaaaaaaaaaaaaaaaaaaaaaaaaaaa

SEQ ID NO: 20003 - RNA, 2028 nt, Artificial Sequence
  mRNA product Design a-2 (A100) comprising derived and/or modified sequence from MOPV/LASV reassortant(IGS-1;Clade IV)__AFY05578__SP-HsALB_NP(2-569) (opt1)
aggagaguccgcucagccagguugcagaagcggcuuagcguguguccuaaucuucucucugcguguagguaggccugugccgcaaacaagcuuaccaugaagugggugaccuucaucagccugcucuuccuguucuccagcgccuacuccagcgccuccaaggagaucaagagcuuccuguggacccagucccuccgccgggagcugagcggcuacugcuccaacaucaagcuccagguggucaaggacgcccaggcgcugcugcacgggcuggacuucagcgagguguccaacgugcagcgccucaugcggaaggagcgccgggacgacaacgaccugaagcgccugcgggaccucaaccaggccgucaacaaccugguggagcucaagagcacccagcagaaguccauccugcgcgugggcacccugaccagcgacgaccugcucauccuggccgccgaccuggagaagcuccgguccaaggucauccgcaccgagcggccccugagcgccgggguguacaugggcaaccuguccagccagcagcucgaccagcgccgggcgcugcugaacaugaucgggauguccggcggcaaccagggggcccgcgccggccgggacggggugguccgcgugugggacgugaagaacgccgagcuccugagcaaccaguucggcaccaugccgucccugacgcucgcgugccugaccaagcaggggcaggucgaccugaacgacgccgugcaggcccucaccgaccugggccugaucuacaccgccaaguaccccaacacgagcgaccucgaccggcugacccagucccaccccauccugaacaugaucgacaccaagaaguccagccucaacaucuccggcuacaacuucagccugggggccgcggugaaggccggcgccugcaugcuggacgggggcaacaugcucgagaccaucaaggucagcccccagacgauggacggcauccucaagagcauccugaaggugaagaaggcccuggggauguucaucuccgacaccccgggcgagcgcaaccccuacgagaacauccuguacaagaucugccugagcggggacggcuggcccuacaucgccucccggaccagcaucaccgggcgcgcgugggagaacacgguggucgaccucgaguccgacggcaagccccagaaggccgacagcaacaacuccagcaagucccugcagagcgccggcuucaccgccgggcugaccuacucccagcucaugacccugaaggacgccaugcugcagcuggacccgaacgcgaagacguggauggacaucgagggccggcccgaggaccccguggagaucgcccucuaccagcccagcuccgggugcuacauccacuucuuccgcgagccgaccgaccugaagcaguucaagcaggacgccaaguacagccacggcaucgacgugaccgaccuguucgccacccagcccgggcucacguccgccgucaucgacgcgcugccccgcaacauggugaucacgugccagggcagcgacgacauccggaagcugcucgagagccagggccgcaaggacaucaagcugaucgacaucgaccuguccaagaccgacagccggaaguacgagaacgccgugugggaccaguacaaggaccucugccacaugcacaccggggucguggucgagaagaagaagcgcggcgggaaggaggagaucaccccgcacugcgcccugauggacugcaucauguucgacgccgcgguguccggcgggcugaacaccagcgugcuccgggccguccugccccgcgacaugguguuccggaccuccacgccccgcgugguccugugaggacuagucccuguucccagagcccacuuuuuuuucuuuuuuugaaauaaaauagccugucuuucagaucuaaaaaaaaaaaaaaaaaaaaaaaaaaaaaaaaaaaaaaaaaaaaaaaaaaaaaaaaaaaaaaaaaaaaaaaaaaaaaaaaaaaaaaaaaaaaaaaaaaaa

SEQ ID NO: 20004 - RNA, 2028 nt, Artificial Sequence
  mRNA product Design a-2 (A100) comprising derived and/or modified sequence from LASV(LM765-SLE-2012;Clade IV)__AIT17815__SP-HsALB_NP(2-569) (opt1)
aggagaguccgcucagccagguugcagaagcggcuuagcguguguccuaaucuucucucugcguguagguaggccugugccgcaaacaagcuuaccaugaagugggugaccuucaucagccugcucuuccuguucuccagcgccuacuccagcgccuccaaggagaucaagagcuuccuguggacccagucccuccgccgggagcugagcggcuacugcuccaacaucaagcuccagguggucaaggacgcccaggcgcugcugcacgggcuggacuucagcgagguguccaacgugcagcgccucaugcggaaggagcgccgggacgacaacgaccugaagcgccugcgggaccucaaccaggccgucaacaaccugguggagcucaagagcacccagcagaaguccauccugcgcgugggcacccugaccagcgacgaccugcucauccuggccgccgaccuggagaagcucaaguccaaggucacccggaccgagcgcccccugagcgccgggguguacaugggcaaccuguccagccagcagcucgaccagcggcgcgcgcugcuggacaugaucgggauguccggcagcaaccagggcgcccgggccgggcgcgacggcgugguccgggugugggacgugaagaacgccgagcuccugaacaaccaguucgggacgaugccgucccugacccucgcgugccugaccaagcagggccaggucgaccugaacgacgccgugcaggcccucaccgaccuggggcugaucuacacggccaaguaccccaacaccagcgaccucgaccgccugacccagucccaccccauccugaacaugaucgacaccaagaaguccagccucaacaucuccggcuacaacuucagccugggcgccgcggugaaggccggggccugcaugcuggacggcgggaacaugcucgagacgaucaaggucagcccccagaccauggacggcauccucaagagcauccugaaggugaagaaggcccugggcauguucaucuccgacgccccgggggagcggaaccccuacgagaacauccuguacaagaucugccugagcggcgacggguggcccuacaucgcgucccgcaccagcaucaccggccgggccugggagaacacgguggucgaccucgaguccgacgggaagccccagaaggccggcagcaacggcuccaacaagagccugcaguccgccggguucaccgccggccugaccuacagccagcucaugacccugaaggacgcgaugcugcagcuggacccgaacgccaagacguggauggacaucgaggggcgccccgaggaccccguggagaucgcccucuaccagcccuccagcggcugcuacauccacuucuuccgggagccgaccgaccugaagcaguucaagcaggacgccaaguacucccacgggaucgacgugaccgaccuguucgccgcgcagcccggccucaccagcgccgucaucgacgcccugccccgcaacauggugaucacgugccagggcuccgacgacauccgcaagcuguucgagagccaggggcggaaggacaucaagcucaucgacaucgcccugagcaagaccgacucccgcaaguacgagaacgcggugugggaccaguacaaggaccugugccacaugcacaccggcaucgucguggagaagaagaagcgcgggggcaaggaggagaucacgccccacugcgcccucauggacugcaucauguucgacgccgccgucagcgggggccugaacaccuccgugcugcgggccgugcucccgcgggacauggucuuccgcaccagcacgccccggguggugcugugaggacuagucccuguucccagagcccacuuuuuuuucuuuuuuugaaauaaaauagccugucuuucagaucuaaaaaaaaaaaaaaaaaaaaaaaaaaaaaaaaaaaaaaaaaaaaaaaaaaaaaaaaaaaaaaaaaaaaaaaaaaaaaaaaaaaaaaaaaaaaaaaaaaaa

SEQ ID NO: 20005 - RNA, 2028 nt, Artificial Sequence
  mRNA product Design a-2 (A100) comprising derived and/or modified sequence from LASV(LM776-SLE-2012;Clade IV)__AIT17825__SP-HsALB_NP(2-569) (opt1)
aggagaguccgcucagccagguugcagaagcggcuuagcguguguccuaaucuucucucugcguguagguaggccugugccgcaaacaagcuuaccaugaagugggugaccuucaucagccugcucuuccuguucuccagcgccuacuccagcgccuccaaggagaucaagagcuuccuguggacccagucccuccgccgggagcugagcuccuacugcagcaacaucaagcuccagguggucaaggacgcccaggcgcugcugcacggccuggacuucuccgaggugagcaacgugcagcgccucaugcggaaggagcgccgggacgacaacgaccugaagcgccugcgggaccucaaccaggccgucaacaaccugguggagcugaaguccacccagcagaaguccauccuccgcguggggacccugaccuccgacgaccugcucauccuggccgccgaccuggagaagcucaagagcaaggucacccggaccgagcgcccccuguccgccggcguguacauggggaaccugagcucccagcagcucgaccagcggcgcgcgcugcugagcaugaucggcauguccgggagcaaccagggcgcccgggccggccgcgacggggugguccgggugugggacgugaagaacgccgagcuccugaacaaccaguucggcacgaugccgucccugacccucgcgugccugaccaagcaggggcaggucgaccugaacgacgccgugcaggcccucaccgaccugggccugaucuacacggccaaguaccccaacaccagcgaccucgaccgccugacccagagccaccccauccugaacaugaucgacaccaagaaguccagccucaacaucuccggguacaacuucagccugggcgccgcggugaaggccggcgccugcaugcuggacgggggcaacaugcucgagacgaucaaggucagcccccagaccauggacgggauccucaagagcauccugaaggugaagaaggcccugggcauguucaucuccgacaccccgggcgagcggaaccccuacgagaacauccuguacaagaucugccugagcggggacggcuggcccuacaucgccucccgcaccagcaucacggggcgggcgugggagaacaccguggucgaccucgaguccgacggcaagccccagaaggccgggagcaacaacuccaacaagagccugcaguccgccggcuucaccgccggccugaccuacagccagcucaugacgcugaaggacgccaugcugcagcuggacccgaacgcgaagaccuggauggacaucgaggggcgccccgaggaccccguggagguggcccucuaccagcccuccagcggcugcuacauccacuucuuccgggagccgaccgaccugaagcaguucaagcaggacgccaaguacucccacgggaucgacgucaccgaccuguucgccgcccagcccggccucacgagcgcggugaucgacgcccugccccgcaacauggugaucacgugccaggggagcgacgacauccgcaagcugcucgagucccagggccggaaggacaucaagcugaucgacaucgcccugagcaagaccgacucccgcaaguacgagaacgccgucugggaccaguacaaggaccucugccacaugcacaccggcguggucguggagaagaagaagcgcgggggcaaggaggagaucaccccgcacugcgcgcugauggacugcaucauguucgacgccgccgugagcgggggccugaacaccuccguccuccgggccgugcugccccgggacaugguguuccgcaccagcacgccccgggucgugcugugaggacuagucccuguucccagagcccacuuuuuuuucuuuuuuugaaauaaaauagccugucuuucagaucuaaaaaaaaaaaaaaaaaaaaaaaaaaaaaaaaaaaaaaaaaaaaaaaaaaaaaaaaaaaaaaaaaaaaaaaaaaaaaaaaaaaaaaaaaaaaaaaaaaaa

SEQ ID NO: 20006 - RNA, 2028 nt, Artificial Sequence
  mRNA product Design a-2 (A100) comprising derived and/or modified sequence from LASV(Mad39;Clade IV)__ANH09723__SP-HsALB_NP(2-569) (opt1)
aggagaguccgcucagccagguugcagaagcggcuuagcguguguccuaaucuucucucugcguguagguaggccugugccgcaaacaagcuuaccaugaagugggugaccuucaucagccugcucuuccuguucuccagcgccuacuccagcgccuccaaggagaucaagagcuuccuguggacccagucccuccgccgggagcugagcggcuacugcuccaacaucaagcuccagguggucaaggacgcccaggcgcugcugcacgggcuggacuucagcgagguguccaacgugcagcgccucaugcggaagcagcgccgggacgacaacgaccugaagcgccugcgggaccucaaccaggccgucaacaaccugguggagcugaaguccacccagcagaaguccgugcuccgcgucggcacgcugaccagcgacgaccugcucacccuggccgccgaccuggagaagcucaaguccaaggugacccggacggagcgcccccugaccgccgggguguacaugggcaaccugagcucccagcagcucgaccagcggcgcgcgcugcugaacaugaucgggaugagcggcggcaaccagggggcccggaccggccgcgacggggucgugcgggugugggacgucaagaacgccgagcuccugaacaaccaguucggcaccaugccgucccugacgcucgccugccugaccaagcagggccagguggaccugaacgacgugguccaggcgcucaccgaccuggggcugaucuacaccgccaaguaccccaacacgagcgaccucgaccgccugacccagucccaccccauccugaacaugaucgacaccaacaagagcucccucaacaucagcggcuacaacuucagccugggggccgccgugaaggccggcgcgugcaugcuggacgggggcaacaugcucgagaccaucaaggugagcccccagacgauggacggcauccucaagagcauccugaaggucaagaagucccuggggauguucaucagcgacaccccgggcgagcggaaccccuacgagaacauccuguacaagaucugccuguccggggacggcuggcccuacaucgccagccgcaccuccaucaccgggcgggccugggagaacacggugguggaccucgagagcggcggcaagccccagaaggccggguccaacaacagcaacaagucccugcagagcgccggcuucgcggccgggcugaccuacucccagcucaugacccugaaggacgccaugcugcagcuggacccgaacgccaagaccuggauggacaucgagggccgccccgaggaccccgucgagaucgcccucuaccagcccaucagcgggugcuacauccacuucuuccgggagccgacggaccugaagcaguucaagcaggacgcgaaguacucccacggcaucgacgugaccgaccuguucgccgcccagcccggccucaccagcgccgugaucgaggcccugccccgcaacauggucaucacgugccagggguccgacgacauccgcaagcuguucgagagccagggccggaaggacaucaagcucaucgacaucgcgcuguccaagaccgacagccgcaaguacgagaacgccgugugggaccaguacaaggaccugugccacaugcacaccggggucgugguggagaagaagaagaagggcgggaaggaggagaucacgccccacugcgcccucauggacugcaucauguucgacgccgcggucagcggcggccugaacacccuggugcuccgggccgugcugccgcgcgacauggucuuccggaccuccacccccaagguggugcugugaggacuagucccuguucccagagcccacuuuuuuuucuuuuuuugaaauaaaauagccugucuuucagaucuaaaaaaaaaaaaaaaaaaaaaaaaaaaaaaaaaaaaaaaaaaaaaaaaaaaaaaaaaaaaaaaaaaaaaaaaaaaaaaaaaaaaaaaaaaaaaaaaaaaa

SEQ ID NO: 20007 - RNA, 2028 nt, Artificial Sequence
  mRNA product Design a-2 (A100) comprising derived and/or modified sequence from LASV(Z0947-SLE-2011;Clade IV)__AIT17841__SP-HsALB_NP(2-569) (opt1)
aggagaguccgcucagccagguugcagaagcggcuuagcguguguccuaaucuucucucugcguguagguaggccugugccgcaaacaagcuuaccaugaagugggugaccuucaucagccugcucuuccuguucuccagcgccuacuccagcgccuccaaggagaucaagagcuuccuguggacccagucccuccgccgggagcugagcggcuacugcuccaacaucaagcuccagguggucaaggacgcccaggcgcugcugcacgggcuggacuucagcgagguguccaacgugcagcgccucaugcggaaggagcgccgggacgacaacgaccugaagcgccugcgggaccucaaccaggccgucaacaaccugguggagcucaagagcacccagcagaaguccauccugcgcgugggcacccugaccagcgacgaccugcucauccuggccgccgaccuggagaagcucaaguccaaggucacccggaccgagcgcccccugagcgccgggguguacaugggcaaccuguccagccagcagcucgaccagcggcgcgcgcugcugaacaugaucgggauguccggcagcaaccagggcgcccggacggggcgcgacggcgugguccgggugugggacgugaagaacgccgagcuccugaacaaccaguucgggaccaugccgucccugacccucgccugccugaccaagcagggccaggucgaccugaacgacgcggugcaggcccucacggaccuggggcugaucuacaccgccaaguaccccaacaccagcgaccucgaccgccugacccagucccaccccauccugaacaugaucgacacgaagaaguccagccucaacaucuccggcuacaacuucagccugggcgccgccgugaaggcgggggccugcaugcuggacggcgggaacaugcucgagaccaucaaggucagcccccagaccauggacggcauccucaagagcauccugaaggugaagaaggcccugggcauguucaucuccgacgccccgggggagcggaaccccuacgagaacauccuguacaagaucugccugagcggcgacggguggcccuacaucgccucccgcaccagcaucacgggccgggcgugggagaacaccguggucgaccucgaguccgacgggaagccccagaaggccggcagcaacggcuccaacaagagccugcaguccgccggguucaccgccggccugaccuacagccagcucaugacgcugaaggacgccaugcugcagcuggacccgaacgcgaagaccuggauggacaucgaggggcgccccgaggaccccguggagaucgcccucuaccagcccuccagcggcugcuacauccacuucuuccgggagccgaccgaccugaagcaguucaagcaggacgccaaguacucccacgggaucgacgugaccgaccuguucgccgcccagcccggccucacgagcgcggucaucgacgcccugccccgcaacauggugaucacgugccagggcuccgacgacauccgcaagcuguucgagagccaggggcggaaggacaucaagcucaucgacaucgcccugagcaagaccgacucccgcaaguacgagaacgccgugugggaccaguacaaggaccugugccacaugcacaccggcaucgucguggagaagaagaagcgcgggggcaaggaggagaucaccccgcacugcgcgcucauggacugcaucauguucgacgccgccgucagcgggggccugaacaccuccgugcugcgggccgugcucccccgggacauggucuuccgcaccagcacgccccggguggugcugugaggacuagucccuguucccagagcccacuuuuuuuucuuuuuuugaaauaaaauagccugucuuucagaucuaaaaaaaaaaaaaaaaaaaaaaaaaaaaaaaaaaaaaaaaaaaaaaaaaaaaaaaaaaaaaaaaaaaaaaaaaaaaaaaaaaaaaaaaaaaaaaaaaaaa

SEQ ID NO: 20008 - RNA, 2028 nt, Artificial Sequence
  mRNA product Design a-2 (A100) comprising derived and/or modified sequence from LASV(Josiah;Clade IV)__NP_694869__SP-HsALB_NP(2-569) (opt4)
aggagaguccgcucagccagguugcagaagcggcuuagcguguguccuaaucuucucucugcguguagguaggccugugccgcaaacaagcuuaccaugaagugggugaccuucaucagccugcuguuccuguucagcagcgccuacagcagcgccagcaaggagaucaagagcuuccuguggacccagagccugagaagagagcugagcggcuacugcagcaacaucaagcugcagguggugaaggacgcccaggcccugcugcacggccuggacuucagcgaggugagcaacgugcagagacugaugagaaaggagagaagagacgacaacgaccugaagagacugagagaccugaaccaggccgugaacaaccugguggagcugaagagcacccagcagaagagcauccugagagugggcacccugaccagcgacgaccugcugauccuggccgccgaccuggagaagcugaagagcaaggugaucagaaccgagagaccccugagcgccggcguguacaugggcaaccugagcagccagcagcuggaccagagaagagcccugcugaacaugaucggcaugagcggcggcaaccagggcgccagagccggcagagacggcguggugagagugugggacgugaagaacgccgagcugcugaacaaccaguucggcaccaugcccagccugacccuggccugccugaccaagcagggccagguggaccugaacgacgccgugcaggcccugaccgaccugggccugaucuacaccgccaaguaccccaacaccagcgaccuggacagacugacccagagccaccccauccugaacaugaucgacaccaagaagagcagccugaacaucagcggcuacaacuucagccugggcgccgccgugaaggccggcgccugcaugcuggacggcggcaacaugcuggagaccaucaaggugagcccccagaccauggacggcauccugaagagcauccugaaggugaagaaggcccugggcauguucaucagcgacacccccggcgagagaaaccccuacgagaacauccuguacaagaucugccugagcggcgacggcuggcccuacaucgccagcagaaccagcaucaccggcagagccugggagaacaccgugguggaccuggagagcgacggcaagccccagaaggccgacagcaacaacagcagcaagagccugcagagcgccggcuucaccgccggccugaccuacagccagcugaugacccugaaggacgccaugcugcagcuggaccccaacgccaagaccuggauggacaucgagggcagacccgaggaccccguggagaucgcccuguaccagcccagcagcggcugcuacauccacuucuucagagagcccaccgaccugaagcaguucaagcaggacgccaaguacagccacggcaucgacgugaccgaccuguucgccacccagcccggccugaccagcgccgugaucgacgcccugcccagaaacauggugaucaccugccagggcagcgacgacaucagaaagcugcuggagagccagggcagaaaggacaucaagcugaucgacaucgcccugagcaagaccgacagcagaaaguacgagaacgccgugugggaccaguacaaggaccugugccacaugcacaccggcguggugguggagaagaagaagagaggcggcaaggaggagaucaccccccacugcgcccugauggacugcaucauguucgacgccgccgugagcggcggccugaacaccagcgugcugagagccgugcugcccagagacaugguguucagaaccagcacccccagaguggugcugugaggacuagucccuguucccagagcccacuuuuuuuucuuuuuuugaaauaaaauagccugucuuucagaucuaaaaaaaaaaaaaaaaaaaaaaaaaaaaaaaaaaaaaaaaaaaaaaaaaaaaaaaaaaaaaaaaaaaaaaaaaaaaaaaaaaaaaaaaaaaaaaaaaaaa

SEQ ID NO: 20009 - RNA, 2028 nt, Artificial Sequence
  mRNA product Design a-2 (A100) comprising derived and/or modified sequence from LASV(LP;Clade I)__AAF86702__SP-HsALB_NP(2-569) (opt4)
aggagaguccgcucagccagguugcagaagcggcuuagcguguguccuaaucuucucucugcguguagguaggccugugccgcaaacaagcuuaccaugaagugggugaccuucaucagccugcuguuccuguucagcagcgccuacagcagcaacagcaaggagaucaagagcuuccuguggacccagagccugagaagagagcugagcggcuacugcagcaacaucaagcugcagguggugaaggacgcccaggcccugcugcacggccuggacuucagcgaggugagcaacgugcagagacugaugagaaagcagaagagagacgacgccgaccugaagagacugagagaccugaaccaggccgugaacaaccugguggagcugaagagcacccagcagaagaacgugcugagagugggcacccugagcagcgacgaccugaucacccuggccgccgaccuggagaagcugaagagcaaggugaucagaaccgagagaccccugagcagcggcguguacaugggcaaccugagcagccagcagcuggaccagagaagagcccugcugagcaugaucggcaugagcggcggcccccagggcaacagaaccggcggcgacggcguggugagagugugggacgugaagaacgccgagcugcugaacaaccaguucggcaccaugcccagccugacccuggccugccugaccaagcagggccagguggaccugaacgacgccgugcaggcccugaccgaccugggccugaucuacaccgccaaguaccccaacagcagcgaccuggacaugcugacccagagccaccccauccugggcaugguggacaccaagaagagcagccugaacaucagcggcuacaacuucagccugggcgccgccgugaaggccggcgccugcaugcuggacggcggcaacaugcuggagaccaucaaggugagcccccagaccauggacggcauccugaagagcauccugaaggugaagagaagccugggcauguucaucagcgacacccccggcgagagaaaccccuacgagaacauccuguacaagaucugccugagcggcgagggcuggcccuacaucgccagcagaaccagcaucaccggcagagccugggagaacacccugguggaccuggagagcgacaacaagccccccaagcugaacagcgccggcagcaacaagagccugcaggccgccggccugaacgccggccugaccuacagccagcugaugacccugaaggacugcaugcugcagcuggaccccagcagcaagaccuggaucgacaucgagggcagacccgaggaccccguggagaucgcccuguuccagcccagcagcggcugcuacauccacuucuucagagagcccaccgaccugaagcaguucaagcaggacgccaaguacagccacggcaucgacgugaccgaccuguucagcacccagcccggccugaccagcgccgugaucgaggcccugcccagaaacauggugcugaccugccagggcagcgacgacaucaagaagcugcuggagagccagggcagaagagacaucaagcugaucgacaucagccugagcaaggccgacagcagaaaguucgagaacgccgugugggaccaguacaaggaccugugccacaugcacaccggcguggugguggagaagaagaagagaggcggcaaggaggagaucaccccccacugcgcccugcuggacugcaucauguucgacgccgccaccaccggcagccugaacaucaccacccugagagccgugcugcccagagacaugguguucagaaccagcacccccaagguggugcugugaggacuagucccuguucccagagcccacuuuuuuuucuuuuuuugaaauaaaauagccugucuuucagaucuaaaaaaaaaaaaaaaaaaaaaaaaaaaaaaaaaaaaaaaaaaaaaaaaaaaaaaaaaaaaaaaaaaaaaaaaaaaaaaaaaaaaaaaaaaaaaaaaaaaa

SEQ ID NO: 20010 - RNA, 2028 nt, Artificial Sequence
  mRNA product Design a-2 (A100) comprising derived and/or modified sequence from LASV(803213;Clade II)__AAF86704__SP-HsALB_NP(2-569) (opt4)
aggagaguccgcucagccagguugcagaagcggcuuagcguguguccuaaucuucucucugcguguagguaggccugugccgcaaacaagcuuaccaugaagugggugaccuucaucagccugcuguuccuguucagcagcgccuacagcagcgccagcaaggaggugaagagcuuccuguggacccagagccugagaagagagcugagcggcuacugcagcaacaucaagcugcagguggugaaggacgcccaggcccugcugcacggccuggacuucagcgaggugaacaacgugcagagacugaugagaaagcagaagagagacgacggcgaccugaagagacugagagaccugaaccaggccgugaacaaccugguggagcugaagagcacccagcagaagagcauccugagagugggcacccugaccagcgacgaccugcugacccuggccgccgaccuggagaagcugaagagcaaggugaucagaaccgagagaccccugagcagcggcguguacaugggcaaccugagcacccagcagcuggagcagagaagagcccugcugaacaugaucggcauggugggcggcgcccagggcacccagcccggcagagacggcguggugagagugugggacgugaagaaccccgaccugcugaacaaccaguucggcaccaugcccagccugacccuggccugccugaccaagcagggccagguggaccugaacgacgccgugcuggcccugaccgaccugggccugaucuacaccgccaaguaccccaacagcagcgaccuggacagacugagccagagccaccccauccugaacaugguggacaccaagaagagcagccugaacaucagcggcuacaacuucagccugggcgccgccgugaaggccggcgccugcaugcuggacggcggcaacaugcuggagaccaucaaggugaccccccagaccauggacggcauccugaagagcauccugaaggugaagagaagccugggcauguucgugagcgacacccccggcgagagaaaccccuacgagaacauccuguacaagaucugccugagcggcgacggcuggcccuacaucgccagcagaaccagcaucgugggcagagccugggagaacaccaccguggaccuggagagcgacggcaagccccagaaggugggcaccgccggcagcaacaagagccugcagagcgccggcuuccccaccggccugaccuacagccagcugaugacccugaaggacagcaugaugcagcuggaccccagcgccaagaccuggaucgacaucgagggcagacccgaggaccccguggagaucgcccuguaccagcccaugagcggcugcuacauccacuucuucagagagcccaccgaccugaagcaguucaagcaggacgccaaguacagccacggcaucgacguggccgaccuguuccccgcccagcccggccugaccagcgccgugaucgaggcccugcccagaaacauggugcugaccugccagggcagcgacgacaucaagaagcugcuggacagccagggcagaagagacaucaagcugaucgacaucagccugagcaagguggacagcagaaaguucgagaacgccgugugggaccagugcaaggaccugugccacaugcacaccggcguggugguggagaagaagaagagaggcggcaaggaggagaucaccccccacugcgcccugauggacugcaucauguucgacgccgccgugagcggcggccugaacauccccgugcugagagccgugcugcccagagacaugguguucagaaccagcagccccaagguggugcugugaggacuagucccuguucccagagcccacuuuuuuuucuuuuuuugaaauaaaauagccugucuuucagaucuaaaaaaaaaaaaaaaaaaaaaaaaaaaaaaaaaaaaaaaaaaaaaaaaaaaaaaaaaaaaaaaaaaaaaaaaaaaaaaaaaaaaaaaaaaaaaaaaaaaa

SEQ ID NO: 20011 - RNA, 2031 nt, Artificial Sequence
  mRNA product Design a-2 (A100) comprising derived and/or modified sequence from LASV(GA391;Clade III)__CAA36646__SP-HsALB_NP(2-570) (opt4)
aggagaguccgcucagccagguugcagaagcggcuuagcguguguccuaaucuucucucugcguguagguaggccugugccgcaaacaagcuuaccaugaagugggugaccuucaucagccugcuguuccuguucagcagcgccuacagcagcgccagcaaggaggugagaagcuuccuguggacccagagccugagaagagagcugagcggcuacugcagcaacaucaagcugcagguggugaaggacgcccaggcccugcugcacggccuggacuucagcgaggugagcaacgugcagagacugaugagaaagcagaagagagacgacggcgaccugaagagacugagagaccugaaccaggccgugaacaaccugguggagcugaagagcacccagcagaagagcgugcugagagugggcacccugagcagcgacgaccugcugauccuggccgccgaccuggagaagcugaagagcaaggugaccagaaccgagagaccccugagcagcggcguguacaugggcaaccugagcagccagcagcuggaccagagaagagcccugcugaacaugaucggcaugaccggcgugagcggcggcggcaagggcgccagcgacggcaucgugagagugugggacgugaagaacgccgagcugcugaacaaccaguucggcaccaugcccagccugacccuggccugccugaccaagcagggccagguggaccugaacgacgccgugcaggcccugaccgaccugggccugaucuacaccgccaaguaccccaacagcagcgaccuggacagacugagccagagccaccccauccugaacaugaucgacaccaagaagagcagccugaacaucagcggcuacaacuucagccugggcgccgccgugaaggccggcgccugcaugcuggacggcggcaacaugcuggagaccaucaaggugagcccccagaccauggacggcauccugaagagcauccugaaggugaagaagagccugggcauguucgugagcgacacccccggcgagagaaaccccuacgagaacauccuguacaagaucugccugagcggcgacggcuggcccuacaucgccagcagaaccagcaucgugggcagagccugggagaacaccgugguggaccuggagcaggacaacaagccccagaagaucggcaacggcggcagcaacaagagccugcagagcgccggcuucgccgccggccugaccuacagccagcugaugacccugaaggacuucaagugcuucaaccugauccccaacgccaagaccuggauggacaucgagggcagacccgaggaccccguggagaucgcccuguaccagcccagcagcggcugcuacgugcacuucuucagagagcccaccgaccugaagcaguucaagcaggacgccaaguacagccacggcaucgacgugaccgaccuguucgccgcccagcccggccugaccagcgccgugaucgaggcccugcccagaaacauggugaucaccugccagggcagcgaggacaucagaaagcugcuggagagccagggcagaagagacaucaagcugaucgacaucacccugagcaaggccgacagcagaaaguucgagaacgccgugugggaccaguucaaggaccugugccacaugcacaccggcguggugguggagaagaagaagagaggcggcaaggaggagaucaccccccacugcgcccugauggacugcaucauguucgacgccgccgugagcggcggccuggacgccaaggugcugagaguggugcugcccagagacaugguguucagaaccagcacccccaagguggugcugugaggacuagucccuguucccagagcccacuuuuuuuucuuuuuuugaaauaaaauagccugucuuucagaucuaaaaaaaaaaaaaaaaaaaaaaaaaaaaaaaaaaaaaaaaaaaaaaaaaaaaaaaaaaaaaaaaaaaaaaaaaaaaaaaaaaaaaaaaaaaaaaaaaaaa

SEQ ID NO: 20012 - RNA, 2028 nt, Artificial Sequence
  mRNA product Design a-2 (A100) comprising derived and/or modified sequence from LASV(AV;Clade V)__CCA30315__SP-HsALB_NP(2-569) (opt4)
aggagaguccgcucagccagguugcagaagcggcuuagcguguguccuaaucuucucucugcguguagguaggccugugccgcaaacaagcuuaccaugaagugggugaccuucaucagccugcuguuccuguucagcagcgccuacagcagcgccagcaaggaggugaagagcuuccuguggacccagagccugagaagagagcugagcggcuacugcagcaacaucaagcugcagguggugaaggacgcccaggcccugcugcacggccuggacuucagcgaggugagcaacgugcagagacugaugagaaagcagagaagagacgacagcgaccugaagagacugagagaccugaaccaggccgugaacaaccugguggagcugaagagcacccagcagaagagcgugcugagagugggcacccugagcagcgacgaccugcugacccuggccgccgaccuggagaagcugaagagcaaggugaccagaaccgagagaccccugagcagcggcguguacaugggcaaccugagcagccagcagcuggaccagagaagagcccugcugaaccugaucggcaugaccaacggcagccagggcagccaggccggcagagacggcguggugagagugugggacgugaagaacgccgagcugcugaacaaccaguucggcaccaugcccagccugacccuggccugccugaccaagcagggccagguggaccugaacgacguggugcaggcccugaccgaccugggccugaucuacaccgccaaguaccccaacaccagcgaccuggacagacugacccagagccaccccauccugaacaugaucgacaccaagaagagcagccugaacaucagcggcuacaacuucagccugggcgccgccgugaaggccggcgccugcaugcuggacggcggcaacaugcuggagaccaucaaggugagcccccagagcauggacggcauccugaagagcauccugaaggugaagagagcccugggcauguucgugagcgacacccccggcgagagaaaccccuacgagaacauccuguacaagaucugccugagcggcgacggcuggcccuacaucgccagcagaaccagcaucgugggcagagccugggagaacaccgugguggaccuggagaccgacggcaagccccagaagaucggcagcggcaacagcaacaagagccugcagagcgccggcuucagcgccggccugaccuacagccagcugaugacccugaaggacgccaugcugcagcuggaccccaacgccaagaccuggauggacaucgagggcagacccgaggaccccguggagguggcccuguaccagcccaucagcggcugcuacauccacuucuucagagagcccaccgaccugaagcaguucaagcaggacgccaaguacagccacggcaucgacaucgccgaccuguucgccgcccagcccggccugaccagcgccgugaucgaggcccugcccagaaacauggugaucaccugccagggcagcgaggacaucaagaagcugcuggagagccagggcagaaaggacaucaagcugaucgacaucgcccugagcaagaucgacagcagaaaguucgagaacgccgugugggaccaguacaaggaccugugccacaugcacaccggcguggugguggagaagaagaagagaggcggcaaggaggagaucaccccccacugcgcccugauggacugcaucauguucgacgccgccgugagcggcggccugaacacccuggugcugagagccgugcugcccagagacaugguguucagaaccagcacccccagaguggugcugugaggacuagucccuguucccagagcccacuuuuuuuucuuuuuuugaaauaaaauagccugucuuucagaucuaaaaaaaaaaaaaaaaaaaaaaaaaaaaaaaaaaaaaaaaaaaaaaaaaaaaaaaaaaaaaaaaaaaaaaaaaaaaaaaaaaaaaaaaaaaaaaaaaaaa

SEQ ID NO: 20013 - RNA, 2028 nt, Artificial Sequence
  mRNA product Design a-2 (A100) comprising derived and/or modified sequence from LASV(Togo/2016/7082;Clade VI)__AMR44578__SP-HsALB_NP(2-569) (opt4)
aggagaguccgcucagccagguugcagaagcggcuuagcguguguccuaaucuucucucugcguguagguaggccugugccgcaaacaagcuuaccaugaagugggugaccuucaucagccugcuguuccuguucagcagcgccuacagcagcaacagcaaggaggugaagagcuuccuguggacccagagccugagaagagagcugagcggcuacugcagcaacaucaagcugcagguggugaaggacgcccaggcccugcugcacggccuggacuucagcgaggugagcaacgugcagagacugaugagaaagcagaagagagacgacggcgaccugaagagacugagagaccugaaccaggccgugaacaaccugguggagcugaagagcgugcagcagaagagcauccugagagugggcacccugaccagcgacgaccugcugacccuggccgccgaccuggagaagcugaagagcaaggugaccagaaccgagagaccccugagcagcggcguguacaugggcaaccugagcagccagcagcuggaccagagaagagcccugcugagcaugaucggcaugagcggcggcaaccagaacagccagcccaagggcgacggcguggugagagugugggacgugaagaacgccgaccugcugaacaaccaguucggcaccaugcccagccugacccuggccugccugaccaagcagggccagguggaccugaacgacgccgugcaggcccugaccgaccugggccugaucuacaccgccaaguaccccaacagcagcgaccuggacagacugagccagagccaccccauccugaacaugaucgacaccaagaagagcagccugaacaucagcggcuacaacuucagccugggcgccgccaucaagaccggcgccugcaugcuggacggcggcaacaugcuggagaccaucaaggugaccccccagaccauggacggcauccugaagagcauccugaaggugaagagaagccugggcauguucaucagcgacacccccggcgagagaaaccccuacgagaacauccuguacaagaucugccugagcggcgacggcuggcccuacaucgccagcagaaccgccaucaucggcagagccugggagaacaccgugguggaccuggagagcgacagcaagccccagaagaucggcagcaacggcagcaacaagagccugcagagcgccggcuucgcccccggccugaccuacagccagcugaugacccugaaggacagcaugcugcagcuggaccccaacgccaagaccuggaucgacaucgagggcagacccgaggaccccguggagguggcccuguuccagcccaucagcggcugcuacauccacuucuucagagagcccaccgaccugaagcaguucaagcaggacgccaaguacagccacggcaucgacgugaccgaccuguucgccgcccagcccggccugaccagcgccgugaucgaggcccugcccagaaacauggugcugaccugccagggcagcgacgacaucaagaagcugcuggacagccagggcagaagagacaucaagcugaucgacgugagccugaacaagaucgacagcagaaaguucgagaacgccgugugggaccaguacaaggaccugugccacaugcacaccggcguggugguggagaagaagaagaagggcggcaaggaggagaucaccccccacugcgcccugcuggacugcaucauguucgacgccgccgugagcggcggccugaacgccaccgugcugagagccgugcugcccagagacaugguguucagaaccagcagccccaagguggugcugugaggacuagucccuguucccagagcccacuuuuuuuucuuuuuuugaaauaaaauagccugucuuucagaucuaaaaaaaaaaaaaaaaaaaaaaaaaaaaaaaaaaaaaaaaaaaaaaaaaaaaaaaaaaaaaaaaaaaaaaaaaaaaaaaaaaaaaaaaaaaaaaaaaaaa

SEQ ID NO: 20014 - RNA, 2028 nt, Artificial Sequence
  mRNA product Design a-2 (A100) comprising derived and/or modified sequence from LASV(KAK-428;Clade n.d. (VII))__ANH09741__SP-HsALB_NP(2-569) (opt4)
aggagaguccgcucagccagguugcagaagcggcuuagcguguguccuaaucuucucucugcguguagguaggccugugccgcaaacaagcuuaccaugaagugggugaccuucaucagccugcuguuccuguucagcagcgccuacagcagcaacagcaaggaggugaagagcuuccuguggacccagagccugagaagagagcugagcggcuacugcaccaacaucaagcugcagguggugaaggacgcccaggcccugcugcacggccuggacuucagcgaggugagcaacgugcagagacugaugagaaagcagaagagagacgacaacgaccugaagagacugagagaccugaaccaggccgugaacaaccugguggagcugaagagcgugcagcagaagagcgugcugaaggugggcacccugaacagcgacgaccugcugacccuggccgccgaccuggagaagcugaagagcaagguggugagaaccgagagaccccugagcagcggcguguacaugggcaaccugagcagccagcagcuggaccagagaagagcccugcugaacaugaucggcauggccggcggcagccagggcaaccagcccagcagagacggcguggugagagugugggacgugaagaacgccgaccugcugaacaaccaguucggcaccaugcccagccugacccuggccugccugaccaagcagggccagguggaccugaacgacguggugcuggcccugaccgaccugggccugaucuacaccgccaaguaccccaacagcagcgaccuggacagacugagccagaaccaccccgugcugaacaugaucgacgugaacaagagcagccugaacaucagcggcuacaacuucagccugggcgccgccgugaaggccggcgccugcaugcuggacggcggcaacaugcuggagaccaucaagaucagcccccagaccguggacggcauccugaagagcauccugaaggugaagagagcccugggcauguucgugagcgacacccccggcgagagaaaccccuacgagaacauccuguacaaggugugccugagcggcaacggcuggcccuacaucgccagcagaaccagcaucgugggcagagccugggagaacaccgugguggaccuggagagcaacaagaaccagcccaaggugggcaacaacggcagcaacaagaugcugcagagcagcggcuucgccaccggccugaccuacagccagcugaugacccugagagacagcaugcugcagcuggaccccaccgccaagaccuggaucgacaucgagggcagacccgaggaccccguggagcuggcccuguuccagcccagcagcggcugcuacauccacuucuucagagagcccaccgaccugaagcaguucaagcaggacgccaaguacagccacggcaucgacgugaacgaccuguucagcgcccagcccggccugaccagcgccgugcuggaggcccugcccagaaacauggugcugaccugccagggcagcgacgacaucagaaagcugcuggacagccaggacagaaaggacaucaagcugaucgacaucagccugagcaaggccgacgccagaaaguucgagaacgacgugugggaccaguucaaggaccugugccacaugcacaccggcaucgugguggagaagaagaagaagggcggcaagcaggagaugaccccccacugcgcccugcuggacugcaucauguucgacgccgccgugagcggcggccugaacgugcccacccugagagccgugcugcccaccgacaugguguucagaaccaucaccaccaagguggugcugugaggacuagucccuguucccagagcccacuuuuuuuucuuuuuuugaaauaaaauagccugucuuucagaucuaaaaaaaaaaaaaaaaaaaaaaaaaaaaaaaaaaaaaaaaaaaaaaaaaaaaaaaaaaaaaaaaaaaaaaaaaaaaaaaaaaaaaaaaaaaaaaaaaaaa

SEQ ID NO: 20015 - RNA, 2028 nt, Artificial Sequence; identical to SEQ ID NO: 20009
  mRNA product Design a-2 (A100) comprising derived and/or modified sequence from LASV(Pinneo-NIG-1969;Clade I)__AIT17837__SP-HsALB_NP(2-569) (opt4)

SEQ ID NO: 20016 - RNA, 2028 nt, Artificial Sequence
  mRNA product Design a-2 (A100) comprising derived and/or modified sequence from LASV(ISTH0009-NIG-2011;Clade II)__AIT17405__SP-HsALB_NP(2-569) (opt4)
aggagaguccgcucagccagguugcagaagcggcuuagcguguguccuaaucuucucucugcguguagguaggccugugccgcaaacaagcuuaccaugaagugggugaccuucaucagccugcuguuccuguucagcagcgccuacagcagcgugagcaaggaggugaagagcuuccuguggacccagagccugagaagagagcugagcggcuacugcagcaacaucaagcugcagguggugaaggacgcccaggcccugcugcacggccuggacuucagcgaggugagcaacgugcagagacugaugagaaagcagaagagagacgacagcgaccugaagagacugagagaccugaaccaggccgugaacaaccugguggagcugaagagcacccagcagaagagcauccugagagugggcacccugaccagcgacgaccugcugacccuggccgccgaccuggagaagcugaagagcaaggugaucagaaccgagagaccccugagcagcggcguguacaugggcaaccugagcacccagcagcuggagcagagaagagcccugcugaacaugaucggcauggugggcggcgcccagggcacccagcccggcagagacggcguggugagagugugggacgugaagaaccccgaccugcugaacaaccaguucggcaccaugcccagccugacccuggccugccugaccaagcagggccagguggaccugaacgacgccgugcuggcccugaccgaccugggccugaucuacaccgccaaguaccccaacagcagcgaccuggacagacugagccagagccaccccauccugaacaugguggacaucaagaagagcagccugaacaucagcggcuacaacuucagccugggcgccgccgugaaggccggcgccugcaugcuggacggcggcaacaugcuggagaccaucaaggugaccccccagaccauggacggcauccugaagagcauccugaaggugaagagaagccugggcauguucgugagcgacacccccggcgagagaaaccccuacgagaacauccuguacaagaucugccugagcggcgacggcuggcccuacaucgccagcagaaccagcaucgugggcagagccugggagaacaccaccguggaccuggagagcgacggcaagccccagaaggugggcagcgccggcagcaacaagagccugcagagcgccggcuuccccaccggccugaccuacagccagcugaugacccugaaggacagcaugaugcagcuggaccccagcgccaagaccuggaucgacaucgagggcagacccgaggaccccguggagaucgcccuguaccagcccaugagcggcugcuacauccacuucuucagagagcccaccgaccugaagcaguucaagcaggacgccaaguacagccacggcaucgacguggccgaccuguuccccgcccagcccggccugaccagcgccgugaucgaggcccugcccagaaacauggugcugaccugccagggcagcgacgacaucaagagacugcuggacagccagggcagaagagacaucaagcugaucgacaucgcccugagcaaggccgacagcagaagauucgagaacgccgugugggaccagugcaaggaccugugccacaugcacaccggcguggugguggagaagaagaagagaggcggcaaggaggagaucaccccccacugcgcccugauggacugcaucauguacgacgccgccgugagcggcggccugaacauccccgugcugagagccgugcugcccagagacaugguguucagaaccagcagccccaagguggugcugugaggacuagucccuguucccagagcccacuuuuuuuucuuuuuuugaaauaaaauagccugucuuucagaucuaaaaaaaaaaaaaaaaaaaaaaaaaaaaaaaaaaaaaaaaaaaaaaaaaaaaaaaaaaaaaaaaaaaaaaaaaaaaaaaaaaaaaaaaaaaaaaaaaaaa

SEQ ID NO: 20017 - RNA, 2028 nt, Artificial Sequence
  mRNA product Design a-2 (A100) comprising derived and/or modified sequence from LASV(ISTH2010-NIG-2012;Clade II)__AIT17483__SP-HsALB_NP(2-569) (opt4)
aggagaguccgcucagccagguugcagaagcggcuuagcguguguccuaaucuucucucugcguguagguaggccugugccgcaaacaagcuuaccaugaagugggugaccuucaucagccugcuguuccuguucagcagcgccuacagcagcgccagcaaggaggugaagagcuuccuguggacccagagccugagaagagagcugagcggcuacugcagcaacaucaagcugcagguggugaaggacgcccaggcccugcugcacggccuggacuucagcgaggugagcaacgugcagagacugaugagaaagcagaagagagacgacagcgaccugaagagacugagagaccugaaccaggccgugaacaaccugguggagcugaagagcacccagcagaagagcauccugagagugggcacccugaccagcgacgaccugcugacccuggccgccgaccuggagaagcugaagagcaaggugaucagaaccgagagaccccugagcagcggcguguacaugggcaaccugagcacccagcagcuggagcagagaagagcccugcugaaccugaucggcauggugggcggcgcccagggcacccagcccggcagagacggcguggugagagugugggacgugaagaaccccgaccugcugaacaaccaguucggcaccaugcccagccugacccuggccugccugaccaagcagggccagguggaccugaacgacgccgugcuggcccugaccgaccugggccugaucuacaccgccaaguaccccaacagcagcgaccuggacagacugagccagagccaccccauccugaacaugguggacaccaagaagagcagccugaacaucagcggcuucaacuucagccugggcgccgccgugaaggccggcgccugcaugcuggacggcggcaacaugcuggagaccaucaaggugaccccccagaccauggacggcauccugaagagcauccugaaggugaagaagagccugggcauguucgugagcgacacccccggcgagagaaaccccuacgagaacauccuguacaagaucugccugagcggcgacggcuggcccuacaucgccagcagaaccagcaucgugggcagagccugggagaacaccaccguggaccuggagagcgacggcaagccccacaaggugggcaccgccggcagcaacaagagccugcagagcgccggcuuccccaccggccugaccuacagccagcugaugacccugaaggacagcaugaugcagcuggaccccagcgccaagaccuggaucgacaucgagggcagacccgaggaccccguggagaucgcccuguaccagcccaugagcggcugcuacauccacuucuucagagagcccaccgaccugaagcaguucaagcaggacgccaaguacagccacggcaucgacguggccgaccuguuccccgcccagcccggccugaccagcgccgugaucgaggcccugcccagaaacauggugcugaccugccagggcagcgacgacaucaagagacugcuggacagccagggcagaagagacaucaagcugaucgacaucgcccugagcaaggccgacagcagaagauucgagaacgccgugugggaccagugcaaggaccugugccacaugcacaccggcguggugguggagaagaagaagagaggcggcaaggaggagaucaccccccacugcgcccugauggacugcaucauguacgacgccgccgugagcggcggccugaacauccccgugcugagagccgugcugcccagagacaugguguucagaaccagcagccccaagguggugcugugaggacuagucccuguucccagagcccacuuuuuuuucuuuuuuugaaauaaaauagccugucuuucagaucuaaaaaaaaaaaaaaaaaaaaaaaaaaaaaaaaaaaaaaaaaaaaaaaaaaaaaaaaaaaaaaaaaaaaaaaaaaaaaaaaaaaaaaaaaaaaaaaaaaaa

SEQ ID NO: 20018 - RNA, 2028 nt, Artificial Sequence
  mRNA product Design a-2 (A100) comprising derived and/or modified sequence from LASV(Lassa virus/H.sapiens-wt/NGA/2015/ISTH_0543;Clade II)__AVO03640__SP-HsALB_NP(2-569) (opt4)
aggagaguccgcucagccagguugcagaagcggcuuagcguguguccuaaucuucucucugcguguagguaggccugugccgcaaacaagcuuaccaugaagugggugaccuucaucagccugcuguuccuguucagcagcgccuacagcagcgccagcaaggaggugaagagcuuccuguggacccagagccugagaagagagcugagcggcuacugcagcaacaucaagcugcagguggugaaggacgcccaggcccugcugcacggccuggacuucagcgaggugagcaacgugcagagacugaugagaaagcagaagagagacgacagcgaccugaagagacugagagaccugaaccaggccgugaacaaccugguggagcugaagagcacccagcagaagagcauccugagagugggcacccugaccagcgacgaccugcugacccuggccgccgaccuggagaagcugaagagcaaggugaucagaaccgagagaccccugagcagcggcguguacaugggcaaccugagcacccagcagcuggagcagagaagagcccugcugaacaugaucggcauggugggcggcgcccagggcacccagcccggcagagacggcguggugagagugugggacgugaagaaccccgaccugcugaacaaccaguucggcaccaugcccagccugacccuggccugccugaccaagcagggccagguggaccugaacgacgccgugcuggcccugaccgaccugggccugaucuacaccgccaaguaccccaacagcagcgaccuggacagacugagccagagccaccccauccugaacaugguggacaccaagaagagcagccugaacaucagcggcuacaacuucagccugggcgccgccgugaaggccggcgccugcaugcuggacggcggcaacaugcuggagaccaucaaggugaccccccagaccauggacggcauccugaagagcauccugaaggugaagaagagccugggcauguucgugagcgacacccccggcgagagaaaccccuacgagaacauccuguacaagaucugccugagcggcgacggcuggcccuacaucgccagcagaaccagcaucgugggcagagccugggagaacaccaccguggaccuggagagcgacggcaagccccagaaggugggcagcgccggcagcaacaagagccugcagagcgccggcuuccccaccggccugaccuacagccagcugaugacccugaaggacagcaugaugcagcuggaccccagcgccaagaccuggaucgacaucgagggcagacccgaggaccccguggagaucgcccuguaccagcccaugagcggcugcuacauccacuucuucagagagcccaccgaccugaagcaguucaagcaggacgccaaguacagccacggcaucgacguggccgaccuguuccccgcccagcccggccugaccagcgccgugaucgaggcccugcccagaaacauggugcugaccugccagggcagcgacgacaucaagagacugcuggacagccagggcagaaaggacaucaagcugaucgacaucgcccugagcaaggccgacagcagaagauucgagaacgccgugugggaccagugcaaggaccugugccacaugcacaccggcguggugguggagaagaagaagagaggcggcaaggaggagaucaccccccacugcgcccugauggacugcaucauguacgacgccgccgugagcggcggccugaacauccccgugcugagagccgugcugcccagagacaugguguucagaaccagcagccccaagguggugcugugaggacuagucccuguucccagagcccacuuuuuuuucuuuuuuugaaauaaaauagccugucuuucagaucuaaaaaaaaaaaaaaaaaaaaaaaaaaaaaaaaaaaaaaaaaaaaaaaaaaaaaaaaaaaaaaaaaaaaaaaaaaaaaaaaaaaaaaaaaaaaaaaaaaaa

SEQ ID NO: 20019 - RNA, 2028 nt, Artificial Sequence
  mRNA product Design a-2 (A100) comprising derived and/or modified sequence from LASV(Lassa virus/H.sapiens-wt/NGA/2016/ISTH_0009;Clade II)__AVO03572__SP-HsALB_NP(2-569) (opt4)
aggagaguccgcucagccagguugcagaagcggcuuagcguguguccuaaucuucucucugcguguagguaggccugugccgcaaacaagcuuaccaugaagugggugaccuucaucagccugcuguuccuguucagcagcgccuacagcagcgccagcaaggaggugaagagcuuccuguggacccagagccugagaagagagcugagcggcuacugcagcaacaucaagcugcagguggugaaggacgcccaggcccugcugcacggccuggacuucagcgaggugagcaacgugcagagacugaugagaaagcagaagagagacgacagcgaccugaagagacugagagaccugaaccaggccgugaacaaccugguggagcugaagagcacccagcagaagagcauccugagagugggcacccugaccagcgacgaccugcugacccuggccgccgaccuggagaagcugaagagcaaggugaucagaaccgagagaccccugagcagcggcguguacaugggcaaccugagcacccagcagcuggagcagagaagagcccugcugaacaugaucggcauggugggcggcgcccagggcacccagcccggcagagacggcguggugagagugugggacgugaagaaccccgaccugcugaacaaccaguucggcaccaugcccagccugacccuggccugccugaccaagcagggccagguggaccugaacgacgccgugcuggcccugaccgaccugggccugaucuacaccgccaaguaccccaacagcagcgaccuggacagacugagccagagccaccccauccugaacaugguggacaccaagaagagcagccugaacaucagcggcuacaacuucagccugggcgccgccgugaaggccggcgccugcaugcuggacggcggcaacaugcuggagaccaucaaggugaccccccagaccauggacggcauccugaagagcauccugaaggugaagaagagccugggcauguucgugagcgacacccccggcgagagaaaccccuacgagaacauccuguacaagaucugccugagcggcgacggcuggcccuacaucgccagcagaaccagcaucgugggcagagccugggagaacaccaccguggaccuggagagcgacggcaagccccagaaggugggcagcgccggcagcaacaagagccugcagagcgccggcuuccccaccggccugaccuacagccagcugaugacccugaaggacagcaugaugcagcuggaccccagcgccaagaccuggaucgacaucgagggcagacccgaggaccccguggagaucgcccuguaccagcccaugagcggcugcuacauccacuucuucagagagcccaccgaccugaagcaguucaagcaggacgccaaguacagccacggcaucgacguggccgaccuguuccccgcccagcccggccugaccagcgccgugaucgaggcccugcccagaaacauggugcugaccugccagggcagcgacgacaucaagagacugcuggacagccagggcagaagagacaucaagcugaucgacaucgcccugagcaaggccgacagcagaagauucgagaacgccgugugggaccagugcaaggaccugugccacaugcacaccggcguggugguggagaagaagaagagaggcggcaaggaggagaucaccccccacugcgcccugauggacugcaucauguacgacgccgccgugagcggcggccugaacauccccgugcugagagccgugcugcccagagacaugguguucagaaccagcagccccaagguggugcugugaggacuagucccuguucccagagcccacuuuuuuuucuuuuuuugaaauaaaauagccugucuuucagaucuaaaaaaaaaaaaaaaaaaaaaaaaaaaaaaaaaaaaaaaaaaaaaaaaaaaaaaaaaaaaaaaaaaaaaaaaaaaaaaaaaaaaaaaaaaaaaaaaaaaa

SEQ ID NO: 20020 - RNA, 2028 nt, Artificial Sequence
  mRNA product Design a-2 (A100) comprising derived and/or modified sequence from LASV(Lassa virus/H.sapiens-wt/NGA/2016/ISTH_0017;Clade II)__AVO03568__SP-HsALB_NP(2-569) (opt4)
aggagaguccgcucagccagguugcagaagcggcuuagcguguguccuaaucuucucucugcguguagguaggccugugccgcaaacaagcuuaccaugaagugggugaccuucaucagccugcuguuccuguucagcagcgccuacagcagcgccagcaaggaggugaagagcuuccuguggacccagagccugagaagagagcugagcggcuacugcagcagcaucaagcugcagguggugaaggacgcccaggcccugcugcacggccuggacuucagcgaggugagcaacgugcagagacugaugagaaagcagaagagagacgacagcgaccugaagagacugagagaccugaaccaggccgugaacaaccugguggagcugaagagcacccagcagaagagcauccugagagugggcacccugaccagcgacgaccugcugacccuggccgccgaccuggagaagcugaagagcaaggugaucagaaccgagagaccccugagcagcggcguguacaugggcaaccugagcacccagcagcuggagcagagaagagcccugcugaacaugaucggcauggccggcggcgcccagggcacccagcccggcagagacggcguggugagagugugggacgugaagaaccccgaccugcugaacaaccaguucggcaccaugcccagccugacccuggccugccugaccaagcagggccagguggaccugaacgacgccgugcuggcccugaccgaccugggccugaucuacaccgccaaguaccccaacagcagcgaccuggacagacugagccagagccaccccauccugaacaugguggacaccaagaagagcagccugaacaucagcggcuacaacuucagccugggcgccgccgugaaggccggcgccugcaugcuggacggcggcaacaugcuggagaccaucaaggugaccccccagaccauggacggcauccugaagagcauccugaaggugaagagaagccugggcauguucgugagcgacgcccccggcgagagaaaccccuacgagaacauccuguacaagaucugccugagcggcgacggcuggcccuacaucgccagcagaaccagcaucgugggcagagccugggagaacaccaccguggaccuggagagcgacggcaagccccagaaggugggcgccaccggcagcaacaagagccugcagagcgccggcuuccccaccggccugaccuacagccagcugaugacccugaaggacagcaugaugcagcuggaccccagcgccaagaccuggaucgacaucgagggcagacccgaggaccccguggagguggcccuguaccagcccgugagcggcugcuacauccacuucuucagagagcccaccgaccugaagcaguucaagcaggacgccaaguacagccacggcaucgacguggccgaccuguuccccgcccagcccggccugaccagcgccgugaucgaggcccugcccagaaacauggugcugaccugccagggcagcgacgacaucaagaagcugcuggacagccagggcagaaaggacaucaagcugaucgacaucgcccugagcaaggccgacagcagaagauucgagaacgccgugugggaccagugcaaggaccugugccacaugcacaccggcguggugguggagaagaagaagagaggcggcaaggaggagaucaccccccacugcgcccugauggacugcaucauguacgacgccgccgugagcggcggccugaacauccccgugcugagagccgugcugcccagagacaugguguucagaaccagcagccccaagguggugcugugaggacuagucccuguucccagagcccacuuuuuuuucuuuuuuugaaauaaaauagccugucuuucagaucuaaaaaaaaaaaaaaaaaaaaaaaaaaaaaaaaaaaaaaaaaaaaaaaaaaaaaaaaaaaaaaaaaaaaaaaaaaaaaaaaaaaaaaaaaaaaaaaaaaaa

SEQ ID NO: 20021 - RNA, 2028 nt, Artificial Sequence
  mRNA product Design a-2 (A100) comprising derived and/or modified sequence from LASV(Lassa virus/H.sapiens-wt/NGA/2018/ISTH_0959;Clade II)__AVV65100__SP-HsALB_NP(2-569) (opt4)
aggagaguccgcucagccagguugcagaagcggcuuagcguguguccuaaucuucucucugcguguagguaggccugugccgcaaacaagcuuaccaugaagugggugaccuucaucagccugcuguuccuguucagcagcgccuacagcagcgccagcaaggaggugaagagcuuccuguggacccagagccugagaagagagcugagcggcuacugcagcaacaucaagcugcagguggugaaggacgcccaggcccugcugcacggccuggacuucagcgaggugagcaacgugcagagacugaugagaaagcagaagagagacgacagcgaccugaagagacugagagaccugaaccaggccgugaacaaccugguggagcugaagagcacccagcagaagagcauccugagagugggcacccugaccagcgacgaccugcugacccuggccgccgaccuggagaagcugaagagcaaggugaucagaaccgagagaccccugagcagcggcguguacaugggcaaccugagcacccagcagcuggagcagagaagagcccugcugaaccugaucggcauggugggcggcgcccagggcacccagcccggcagagacggcguggugagagugugggacgugaagaaccccgaccugcugaacaaccaguucggcaccaugcccagccugacccuggccugccugaccaagcagggccagguggaccugaacgacguggugcuggcccugaccgaccugggccugaucuacaccgccaaguaccccaacagcagcgaccuggacagacugagccagagccaccccauccugaacaugguggacaccaagaagagcagccugaacaucagcggcuucaacuucagccugggcgccgccgugaaggccggcgccugcaugcuggacggcggcaacaugcuggagaccaucaaggugaccccccagaccauggacggcauccugaagagcauccugaaggugaagaagagccugggcauguucgugagcgacacccccggcgagagaaaccccuacgagaacauccuguacaagaucugccugagcggcgacggcuggcccuacaucgccagcagaaccagcaucgugggcagagccugggagaacaccaccguggaccuggagagcgacggcaagccccacaaggugggcaccgccggcagcaacaagagccugcagagcgccggcuuccccaccggccugaccuacagccagcugaugacccugaaggacagcaugaugcagcuggaccccagcgccaagaccuggaucgacaucgagggcagacccgaggaccccguggagaucgcccuguaccagcccaugagcggcugcuacauccacuucuucagagagcccaccgaccugaagcaguucaagcaggacgccaaguacagccacggcaucgacguggccgaccuguuccccgcccagcccggccugaccagcgccgugaucgaggcccugcccagaaacauggugcugaccugccagggcagcgacgacaucaagagacugcuggacagccagggcagaaaggacaucaagcugaucgacaucgcccugagcaagaccgacagcagaagauucgagaacgccgugugggaccagugcaaggaccugugccacaugcacaccggcguggugguggagaagaagaagagaggcggcaaggaggagaucaccccccacugcgcccugauggacugcaucauguacgacgccgccgugagcggcggccugaacauccccgugcugagagccgugcugcccagagacaugguguucagaaccagcagccccaagguggugcugugaggacuagucccuguucccagagcccacuuuuuuuucuuuuuuugaaauaaaauagccugucuuucagaucuaaaaaaaaaaaaaaaaaaaaaaaaaaaaaaaaaaaaaaaaaaaaaaaaaaaaaaaaaaaaaaaaaaaaaaaaaaaaaaaaaaaaaaaaaaaaaaaaaaaa

SEQ ID NO: 20022 - RNA, 2028 nt, Artificial Sequence
  mRNA product Design a-2 (A100) comprising derived and/or modified sequence from LASV(LASV003-NIG-2008;Clade II)__AIT17581__SP-HsALB_NP(2-569) (opt4)
aggagaguccgcucagccagguugcagaagcggcuuagcguguguccuaaucuucucucugcguguagguaggccugugccgcaaacaagcuuaccaugaagugggugaccuucaucagccugcuguuccuguucagcagcgccuacagcagcgccagcaaggaggugaagagcuuccuguggacccagagccugagaagagagcugagcggcuacugcagcagcaucaagcugcagguggugaaggacgcccaggcccugcugcacggccuggacuucagcgaggugagcaacgugcagagacugaugagaaagcagaagagagacgacagcgaccugaagagacugagagaccugaaccaggccgugaacaaccugguggagcugaagagcacccagcagaagagcgugcugagagugggcacccugaccagcgacgaccugcugacccuggccgccgaccuggagaagcugaagagcaaggugaucagaaccgagagaccccugagcagcggcguguacaugggcaaccugagcgcccagcagcuggagcagagaagaacccugcugaacaugaucggcauggugggcggcgcccagggcacccagcccggcagagacggcguggugagagugugggacgugaagaaccccgaccugcugaacaaccaguucggcaccaugcccagccugacccuggccugccugaccaagcagggccagguggaccugaacgacguggugcuggcccugaccgaccugggccugaucuacaccgccaaguaccccaacagcagcgaccuggacagacugagccagagccaccccauccugagcaugguggacaccaagaagagcagccugaacaucagcggcuacaacuucagccugggcgccgccgugaaggccggcgccugcaugcuggacggcggcaacaugcuggagaccaucaaggugaccccccagaccauggacggcauccugaagagcauccugaaggugaagaagagccugggcauguucgugagcgacacccccggcgagagaaaccccuacgagaacauccuguacaagaucugccugagcggcgacggcuggcccuacaucgccagcagaaccagcaucgugggcagagccugggagaacaccaccguggaccuggagagcgacggcaagccccagaaggugggcaccgccggcagcaacaagagccugcagagcgccggcuuccccaccggccugaccuacagccagcugaugacccugaaggacagcaugaugcagcuggaccccagcgccaagaccuggaucgacaucgagggcagacccgaggaccccguggagaucgcccuguaccagcccaugagcggcugcuacauccacuucuucagagagcccaccgaccugaagcaguucaagcaggacgccaaguacagccacggcaucgacgugaccgaccuguuccccgcccagcccggccugaccagcgccgugaucgaggcccugcccagaaacauggugcugaccugccagggcagcgacgacaucaagagacugcuggacagccagggcagaagagacaucaagcugaucgacaucgcccugagcaaggccgacagcagaagauucgagaacgccgugugggaccagugcaaggaccugugccacaugcacaccggcguggugguggagaagaagaagagaggcggcaaggaggagaucaccccccacugcgcccugauggacugcaucauguacgacgccgccgugagcggcggccugaacauccccgugcugagagccgugcugcccagagacaugguguucagaaccagcagccccaagguggugcugugaggacuagucccuguucccagagcccacuuuuuuuucuuuuuuugaaauaaaauagccugucuuucagaucuaaaaaaaaaaaaaaaaaaaaaaaaaaaaaaaaaaaaaaaaaaaaaaaaaaaaaaaaaaaaaaaaaaaaaaaaaaaaaaaaaaaaaaaaaaaaaaaaaaaa

SEQ ID NO: 20023 - RNA, 2028 nt, Artificial Sequence
  mRNA product Design a-2 (A100) comprising derived and/or modified sequence from LASV(LASV035-NIG-2009;Clade II)__AIT17589__SP-HsALB_NP(2-569) (opt4)
aggagaguccgcucagccagguugcagaagcggcuuagcguguguccuaaucuucucucugcguguagguaggccugugccgcaaacaagcuuaccaugaagugggugaccuucaucagccugcuguuccuguucagcagcgccuacagcagcgccagcaaggaggugaagagcuuccuguggacccagagccugagaagagagcugagcggcuacugcagcagcaucaagcugcagguggugaaggacgcccaggcccugcugcacggccuggacuucagcgaggugagcaacgugcagagacugaugagaaagcagaagagagacgacagcgaccugaagagacugagagaccugaaccaggccgugaacaaccugguggagcugaagagcacccagcagaagagcauccugagagugggcacccugaccagcgacgaccugcugacccuggccgccgaccuggagaagcugaagagcaaggugaucagaaccgagagaccccugagcagcggcguguacaugggcaaccugagcgcccagcagcuggagcagagaagagcccugcugaacaugaucggcauggugggcggcgcccagggcacccagcccggcagagacggcguggugagagugugggacgugaagaaccccgaccugcugaacaaccaguucggcaccaugcccagccugacccuggccugccugaccaagcagggccagguggaccugaacgacgccgugcuggcccugaccgaccugggccugaucuacaccgccaaguaccccaacagcagcgaccuggacagacugagccagagccaccccauccugaacaugguggacaccaagaagagcagccugaacaucagcggcuacaacuucagccugggcgccgccgugaaggccggcgccugcaugcuggacggcggcaacaugcuggagaccaucaaggugaccccccagaccauggacggcauccugaagagcauccugaaggugaagagaagccugggcauguucgugagcgacacccccggcgagagaaaccccuacgagaacauccuguacaagaucugccugagcggcgacggcuggcccuacaucgccagcagaaccagcaucgugggcagagccugggagaacaccaccguggaccuggagagcgacggcaagccccagaaggugggcaccaccggcagcaacaagagccugcagagcgccggcuuccccaccggccugaccuacagccagcugaugacccugaaggacagcaugaugcagcuggaccccagcgccaagaccuggaucgacaucgagggcagacccgaggaccccguggagaucgcccuguaccagcccaugagcggcugcuacauccacuucuucagagagcccaccgaccugaagcaguucaagcaggacgccaaguacagccacggcaucgacguggccgaccuguuccccgcccagcccggccugaccagcgccgugaucgaggcccugcccagaaacauggugcugaccugccagggcagcgacgacaucaagaagcugcuggacagccagggcagaagagacaucaagcugaucgacaucgcccugagcaaggccgacagcagaaaguucgagaacgccgugugggaccagugcaaggaccugugccacaugcacaccggcguggugguggagaagaagaagagaggcggcaaggaggagaucaccccccacugcgcccugauggacugcaucauguacgacgccgccgugagcggcggccugaacauccccgugcugagagccgugcugcccagagacaugguguucagaaccagcagccccaagguggugcugugaggacuagucccuguucccagagcccacuuuuuuuucuuuuuuugaaauaaaauagccugucuuucagaucuaaaaaaaaaaaaaaaaaaaaaaaaaaaaaaaaaaaaaaaaaaaaaaaaaaaaaaaaaaaaaaaaaaaaaaaaaaaaaaaaaaaaaaaaaaaaaaaaaaaa

SEQ ID NO: 20024 - RNA, 2028 nt, Artificial Sequence
  mRNA product Design a-2 (A100) comprising derived and/or modified sequence from LASV(LASV1000-NIG-2009;Clade II)__AIT17783__SP-HsALB_NP(2-569) (opt4)
aggagaguccgcucagccagguugcagaagcggcuuagcguguguccuaaucuucucucugcguguagguaggccugugccgcaaacaagcuuaccaugaagugggugaccuucaucagccugcuguuccuguucagcagcgccuacagcagcgccagcaaggaggugaagagcuuccuguggacccagagccugagaagagagcugagcggcuacugcagcaacaucaagcugcagguggugaaggacgcccaggcccugcugcacggccuggacuucagcgaggugagcaacgugcagagacugaugagaaagcagaagagagacgacagcgaccugaagagacugagagaccugaaccaggccgugaacaaccugguggagcugaagagcacccagcagaagagcauccugagagugggcacccugaccagcgacgaccugcugacccuggccgccgaccuggagaagcugaagagcaaggugaucagaaccgagagaccccugagcagcggcguguacaugggcaaccugagcacccagcagcuggagcagagaagagcccugcugaacaugaucggcauggugggcggcgcccagggcacccagcccggcagagacggcguggugagagugugggacgugaagaaccccgaccugcugaacaaccaguucggcaccaugcccagccugacccuggccugccugaccaagcagggccagguggaccugaacgacguggugcuggcccugaccgaccugggccugaucuacaccgccaaguaccccaacagcagcgaccuggacagacugagccagagccaccccauccugaacaugguggacaccaagaagagcagccugaacaucagcggcuacaacuucagccugggcgccgccgugaaggccggcgccugcaugcuggacggcggcaacaugcuggagaccaucaaggugaccccccagaccauggacggcauccugaagagcauccugaaggugaagaagagccugggcauguucgugagcgacacccccggcgagagaaaccccuacgagaacauccuguacaagaucugccugagcggcgacggcuggcccuacaucgccagcagaaccagcaucgugggcagagccugggagaacaccaccguggaccuggagagcgacggcaagccccagaaggugggcaccgccggcagcaacaagagccugcagagcgccggcuuccccaccggccugaccuacagccagcugaugacccugaaggacagcaugaugcagcuggaccccagcgccaagaccuggaucgacaucgagggcagacccgaggaccccguggagaucgcccuguaccagcccgugagcggcugcuacauccacuucuucagagagcccaccgaccugaagcaguucaagcaggacgccaaguacagccacggcaucgacguggccgaccuguuccccgcccagcccggccugaccagcgccgugaucgaggcccugcccagaaacauggugcugaccugccagggcagcgacgacaucaagagacugcuggacagccagggcagaagagacaucaagcugaucgacaucgcccugagcaaggccgacagcagaagauucgagaacgccgugugggaccagugcaaggaccugugccacaugcacaccggcguggugguggagaagaagaagagaggcggcaaggaggagaucaccccccacugcgcccugauggacugcaucauguacgacgccgccgugagcggcggccugaacauccccgugcugagagccgugcugcccagagacaugguguucagaaccagcagccccaagguggugcugugaggacuagucccuguucccagagcccacuuuuuuuucuuuuuuugaaauaaaauagccugucuuucagaucuaaaaaaaaaaaaaaaaaaaaaaaaaaaaaaaaaaaaaaaaaaaaaaaaaaaaaaaaaaaaaaaaaaaaaaaaaaaaaaaaaaaaaaaaaaaaaaaaaaaa

SEQ ID NO: 20025 - RNA, 2028 nt, Artificial Sequence
  mRNA product Design a-2 (A100) comprising derived and/or modified sequence from LASV(LASV221-NIG-2010;Clade II)__AIT17625__SP-HsALB_NP(2-569) (opt4)
aggagaguccgcucagccagguugcagaagcggcuuagcguguguccuaaucuucucucugcguguagguaggccugugccgcaaacaagcuuaccaugaagugggugaccuucaucagccugcuguuccuguucagcagcgccuacagcagcgccagcaaggaggugaagagcuuccuguggacccagagccugagaagagagcugagcggcuacugcagcagcaucaagcugcagguggugaaggacgcccaggcccugcugcacggccuggacuucagcgaggugagcaacgugcagagacugaugagaaagcagagaagagacgacagcgaccugaagagacugagagaccugaaccaggccgugaacaaccugguggagcugaagagcacccagcagaagagcauccugagagugggcacccugaccagcgacgaccugcugacccuggccgccgaccuggagaagcugaagagcaaggugaucagaaccgagagaccccugagcagcggcguguacaugggcaaccugagcacccagcagcuggagcagagaagagcccugcugaacaugaucggcauggugggcggcgcccagggcacccagcccggcagagacggcguggugagagugugggacgugaagaaccccgaccugcugaacaaccaguucggcaccaugcccagccugacccuggccugccugaccaagcagggccagguggaccugaacgacgccgugcuggcccugaccgaccugggccugaucuacaccgccaaguaccccaacagcagcgaccuggacagacugagccagagccaccccauccugaacaugguggacaccaagaagagcagccugaacaucagcggcuacaacuucagccugggcgccgccgugaaggccggcgccugcaugcuggacggcggcaacaugcuggagaccaucaaggugaccccccagaccguggacggcauccugaagagcauccugaaggugaagagaagccugggcauguucgugagcgacacccccggcgagagaaaccccuacgagaacauccuguacaagaucugccugagcggcgacggcuggcccuacaucgccagcagaaccagcaucgugggcagagccugggagaacaccaccguggaccuggagagcgacggcaagccccagaaggugggcaccgccggcagcaacaagagccugcagagcgccggcuuccccaccggccugaccuacagccagcugaugacccugaaggacagcaugaugcagcuggaccccagcgccaagaccuggaucgacaucgagggcagacccgaggaccccguggagaucgcccuguaccagcccaugagcggcugcuacauccacuucuucagagagcccaccgaccugaagcaguucaagcaggacgccaaguacagccacggcaucgacguggccgaccuguuccccgcccagcccggccugaccagcgccgugaucgaggcccugcccagaaacauggugcugaccugccagggcagcgacgacaucaagagacugcuggacagccagggcagaagagacaucaagcugaucgacaucgcccugagcaaggccgacagcagaaaguucgagaacgccgugugggaccagugcaaggaccugugccacaugcacaccggcguggugguggagaagaagaagagaggcggcaaggaggagaucaccccccacugcgcccugauggacugcaucauguacgacgccgccgugagcggcggccugaacauccccgugcugagagccgugcugcccagagacaugguguucagaaccagcagccccaagguggugcugugaggacuagucccuguucccagagcccacuuuuuuuucuuuuuuugaaauaaaauagccugucuuucagaucuaaaaaaaaaaaaaaaaaaaaaaaaaaaaaaaaaaaaaaaaaaaaaaaaaaaaaaaaaaaaaaaaaaaaaaaaaaaaaaaaaaaaaaaaaaaaaaaaaaaa

SEQ ID NO: 20026 - RNA, 2028 nt, Artificial Sequence
  mRNA product Design a-2 (A100) comprising derived and/or modified sequence from LASV(LASV237-NIG-2010;Clade II)__AIT17639__SP-HsALB_NP(2-569) (opt4)
aggagaguccgcucagccagguugcagaagcggcuuagcguguguccuaaucuucucucugcguguagguaggccugugccgcaaacaagcuuaccaugaagugggugaccuucaucagccugcuguuccuguucagcagcgccuacagcagcgccagcaaggaggugaagagcuuccuguggacccagagccugagaagagagcugagcggcuacugcagcaacaucaagcugcagguggugaaggacgcccaggcccugcugcacggccuggacuucagcgaggugagcaacgugcagagacugaugagaaagcagaagagagacgacagcgaccugaagagacugagagaccugaaccaggccgugaacaaccugguggagcugaagagcacccagcagaagagcauccugagagugggcacccugaccagcgacgaccugcugacccuggccgccgaccuggagaagcugaagagcaaggugaucagaaccgagagaccccugagcagcggcguguacaugggcaaccugagcacccagcagcuggagcagagaagagcccugcugaacaugaucggcauggugggcggcgcccagggcacccagcccggcagagacggcguggugagagugugggacgugaagaaccccgaccugcugaacaaccaguucggcaccaugcccagccugacccuggccugccugaccaagcagggccagguggaccugaacgacgccgugcuggcccugaccgaccugggccugaucuacaccgccaaguaccccaacagcagcgaccuggacagacugagccagagccaccccauccugaacaugguggacaucaagaagagcagccugaacaucagcggcuacaacuucagccugggcgccgccgugaaggccggcgccugcaugcuggacggcggcaacaugcuggagaccaucaaggugaccccccagaccauggacggcauccugaagagcauccugaaggugaagagaagccugggcauguucgugagcgacacccccggcgagagaaaccccuacgagaacauccuguacaagaucugccugagcggcgacggcuggcccuacaucgccagcagaaccagcaucgugggcagagccugggagaacaccaccguggaccuggagagcgacggcaagccccagaaggugggcagcgccggcagcaacaagagccugcagagcgccggcuuccccaccggccugaccuacagccagcugaugacccugaaggacagcaugaugcagcuggaccccagcgccaagaccuggaucgacaucgagggcagacccgaggaccccguggagaucgcccuguaccagcccaugagcggcugcuacauccacuucuucagagagcccaccgaccugaagcaguucaagcaggacgccaaguacagccacggcaucgacguggccgaccuguuccccgcccagcccggccugaccagcgccgugaucgaggcccugcccagaaacauggugcugaccugccagggcagcgacgacaucaagagacugcuggacagccagggcagaagagacaucaagcugaucgacaucgcccugagcaaggccgacagcagaagauucgagaacgccgugugggaccagugcaaggaccugugccacaugcacaccggcguggugguggagaagaagaagagaggcggcaaggaggagaucaccccccacugcgcccugauggacugcaucauguacgacgccgccgugagcggcggccugaacauccccgugcugagagccgugcugcccagagacaugguguucagaaccagcagccccaagguggugcugugaggacuagucccuguucccagagcccacuuuuuuuucuuuuuuugaaauaaaauagccugucuuucagaucuaaaaaaaaaaaaaaaaaaaaaaaaaaaaaaaaaaaaaaaaaaaaaaaaaaaaaaaaaaaaaaaaaaaaaaaaaaaaaaaaaaaaaaaaaaaaaaaaaaaa

SEQ ID NO: 20027 - RNA, 2028 nt, Artificial Sequence
  mRNA product Design a-2 (A100) comprising derived and/or modified sequence from LASV(LASV253-NIG-2011;Clade II)__AIT17671__SP-HsALB_NP(2-569) (opt4)
aggagaguccgcucagccagguugcagaagcggcuuagcguguguccuaaucuucucucugcguguagguaggccugugccgcaaacaagcuuaccaugaagugggugaccuucaucagccugcuguuccuguucagcagcgccuacagcagcgccagcaaggaggugaagagcuuccuguggacccagagccugagaagagagcugagcggcuacugcagcagcaucaagcugcagguggugaaggacgcccaggcccugcugcacggccuggacuucagcgaggugagcaacgugcagagacugaugagaaagcagaagagagacgacagcgaccugaagagacugagagaccugaaccaggccgugaacaaccugguggagcugaagagcacccagcagaagagcgugcugagagugggcacccugaccagcgacgaccugcugacccuggccgccgaccuggagaagcugaagagcaaggugaucagaaccgagagaccccugagcagcggcguguacaugggcaaccugagcacccagcagcuggagcagagaagagcccugcugaacaugaucggcauggugggcggcgcccagggcacccagcccggcagagacggcguggugagagugugggacgugaagaaccccgaccugcugaacaaccaguucggcaccaugcccagccugacccuggccugccugaccaagcagggccagguggaccugaacgacguggugcuggcccugaccgaccugggccugaucuacaccgccaaguaccccaacagcagcgaccuggacagacugagccagagccaccccauccugaacaugguggacaccaagaagagcagccugaacaucagcggcuacaacuucagccugggcgccgccgugaaggccggcgccugcaugcuggacggcggcaacaugcuggagaccaucaaggugaccccccagaccauggacggcauccugaagagcauccugaaggugaagaagagccugggcauguucgugagcgacacccccggcgagagaaaccccuacgagaacauccuguacaagaucugccugagcggcgacggcuggcccuacaucgccagcagaaccagcaucgugggcagagccugggagaacaccaccguggaccuggagagcgacggcaagccccagaaggugggcaccgccggcagcaacaagagccugcagagcgccggcuuccccaccggccugaccuacagccagcugaugacccugaaggacagcaugaugcagcuggaccccagcgccaagaccuggaucgacaucgagggcagacccgaggaccccguggagaucgcccuguaccagcccaugagcggcugcuacauccacuucuucagagagcccaccgaccugaagcaguucaagcaggacgccaaguacagccacggcaucgacgugaccgaccuguuccccgcccagcccggccugaccagcgccgugaucgaggcccugcccagaaacauggugcugaccugccagggcagcgacgacaucaagagacugcuggacagccagggcagaagagacaucaagcugaucgacaucgcccugagcaaggccgacagcagaagauucgagaacgccgugugggaccagugcaaggaccugugccacaugcacaccggcguggugguggagaagaagaagagaggcggcaaggaggagaucaccccccacugcgcccugauggacugcaucauguacgacgccgccgugagcggcggccugaacauccccgugcugagagccgugcugcccagagacaugguguucagaaccagcagccccaagguggugcugugaggacuagucccuguucccagagcccacuuuuuuuucuuuuuuugaaauaaaauagccugucuuucagaucuaaaaaaaaaaaaaaaaaaaaaaaaaaaaaaaaaaaaaaaaaaaaaaaaaaaaaaaaaaaaaaaaaaaaaaaaaaaaaaaaaaaaaaaaaaaaaaaaaaaa

SEQ ID NO: 20028 - RNA, 2028 nt, Artificial Sequence
  mRNA product Design a-2 (A100) comprising derived and/or modified sequence from LASV(LASV254-NIG-2011;Clade II)__AIT17675__SP-HsALB_NP(2-569) (opt4)
aggagaguccgcucagccagguugcagaagcggcuuagcguguguccuaaucuucucucugcguguagguaggccugugccgcaaacaagcuuaccaugaagugggugaccuucaucagccugcuguuccuguucagcagcgccuacagcagcgccagcaaggaggugaagagcuuccuguggacccagagccugagaagagagcugagcggcuacugcagcagcaucaagcugcagguggugaaggacgcccaggcccugcugcacggccuggacuucagcgaggugagcaacgugcagagacugaugagaaagcagaagagagacgacagcgaccugaagagacugagagaccugaaccaggccgugaacaaccugguggagcugaagagcacccagcagaagagcgugcugagagugggcacccugaccagcgacgaccugcugacccuggccgccgaccuggagaagcugaagagcaaggugaucagaaccgagagaccccugagcagcggcguguacaugggcaaccugagcacccagcagcuggagcagagaagagcccugcugaacaugaucggcauggugggcggcgcccagggcacccagcccggcagagacggcguggugagagugugggacgugaagaaccccgaccugcugaacaaccaguucggcaccaugcccagccugacccuggccugccugaccaagcagggccagguggaccugaacgacgccgugcuggcccugaccgaccugggccugaucuacaccgccaaguaccccaacagcagcgaccuggacagacugagccagagccaccccauccugaacaugguggacaccaagaagagcagccugaacaucagcggcuacaacuucagccugggcgccgccgugaaggccggcgccugcaugcuggacggcggcaacaugcuggagaccaucaaggugaccccccagaccauggacggcauccugaagagcauccugaaggugaagaagagccugggcauguucgugagcgacacccccggcgagagaaaccccuacgagaacauccuguacaagaucugccugagcggcgacggcuggcccuacaucgccagcagaaccagcaucgugggcagagccugggagaacaccaucguggaccuggagagcgacggcaagccccagaaggugggcaccgccggcagcaacaagagccugcagagcgccggcuuccccaccggccugaccuacagccagcugaugacccugaaggacagcaugaugcagcuggaccccagcgccaagaccuggaucgacaucgagggcagacccgaggaccccguggagaucgcccuguaccagcccaugagcggcugcuacauccacuucuucagagagcccaccgaccugaagcaguucaagcaggacgccaaguacagccacggcaucgacguggccgaccuguuccccgcccagcccggccugaccagcgccgugaucgaggcccugcccagaaacauggugcugaccugccagggcagcgacgacaucaagagacugcuggacagccagggcagaagagacaucaagcugaucgacaucgcccugagcaaggccgacagcagaagauucgagaacgccgugugggaccagugcaaggaccugugccacaugcacaccggcguggugguggagaagaagaagagaggcggcaaggaggagaucaccccccacugcgcccugauggacugcaucauguacgacgccgccgugagcggcggccugaacauccccgugcugagagccgugcugcccagagacaugguguucagaaccagcagccccaagguggugcugugaggacuagucccuguucccagagcccacuuuuuuuucuuuuuuugaaauaaaauagccugucuuucagaucuaaaaaaaaaaaaaaaaaaaaaaaaaaaaaaaaaaaaaaaaaaaaaaaaaaaaaaaaaaaaaaaaaaaaaaaaaaaaaaaaaaaaaaaaaaaaaaaaaaaa

SEQ ID NO: 20029 - RNA, 2028 nt, Artificial Sequence
  mRNA product Design a-2 (A100) comprising derived and/or modified sequence from LASV(Nig08-04;Clade II)__ADU56611__SP-HsALB_NP(2-569) (opt4)
aggagaguccgcucagccagguugcagaagcggcuuagcguguguccuaaucuucucucugcguguagguaggccugugccgcaaacaagcuuaccaugaagugggugaccuucaucagccugcuguuccuguucagcagcgccuacagcagcgccagcaaggaggugaagagcuuccuguggacccagagccugagaagagagcugagcggcuacugcagcaacaucaagcugcagguggugaaggacgcccaggcccugcugcacggccuggacuucagcgaggugagcaacgugcagagacugaugagaaagcagaagagagacgacggcgaccugaagagacugagagaccugaaccaggccgugaacaaccugguggagcugaagagcacccagcagaagagcgugcugagagugggcacccugaccagcgacgaccugcugacccuggccgccgaccuggagaagcugaagagcaaggugaucagaaccgagagaccccugagcagcggcguguacaugggcaaccugagcacccagcagcuggagcagagaaaggcccugcugagcaugaucggcauggugggcggcgcccagggcacccagcccggcagagacggcguggugagagugugggacgugaagaaccccgaccugcugaacaaccaguucggcaccaugcccagccugacccuggccugccugaccaagcagggccagguggaccugaacgacgccgugcuggcccugaccgaccugggccugaucuacaccgccaaguaccccaacagcagcgaccuggacagacugagccagagccaccccauccugaacaugguggacaccaagaagagcagccugaacaucagcggcuacaacuucagccugggcgccgccgugaaggccggcgccugcaugcuggacggcggcaacaugcuggagaccaucaaggugaccccccagaccauggacggcauccugaagagcauccugaaggugaagagaagccugggcauguucgugagcgacacccccggcgagagaaaccccuacgagaacauccuguacaagaucugccugagcggcgacggcuggcccuacaucgccagcagaaccagcaucgugggcagagccugggagaacaccaccguggaccuggagagcgacggcaagccccagaaggugggcaccgccggcagcaacaagagccugcagagcgccggcuuccccaccggccugaccuacagccagcugaugacccugaaggacagcaugaugcagcuggaccccagcgccaagaccuggaucgacaucgagggcagacccgaggaccccguggagaucgcccuguaccagcccaugagcggcugcuacauccacuucuucagagagcccaccgaccugaagcaguucaagcaggacgccaaguacagccacggcaucgacgugaccgaccuguucagcgcccagcccggccugaccagcgccgugaucgaggcccugcccagaaacauggugcugaccugccagggcagcgacgacaucaagaagcugcuggacagccagggcagaagagacaucaagcugaucgacaucagccugaacaaggccgacagcagaagauucgagaacgccgugugggaccagugcaaggaccugugccacaugcacaccggcguggugguggagaagaagaagagaggcggcaaggaggagaucaccccccacugcgcccugauggacugcaucauguucgacgccgccgugagcggcggccugaacauccccauccugagagccgugcugcccagagacaugguguucagaaccagcagccccaagguggugcugugaggacuagucccuguucccagagcccacuuuuuuuucuuuuuuugaaauaaaauagccugucuuucagaucuaaaaaaaaaaaaaaaaaaaaaaaaaaaaaaaaaaaaaaaaaaaaaaaaaaaaaaaaaaaaaaaaaaaaaaaaaaaaaaaaaaaaaaaaaaaaaaaaaaaa

SEQ ID NO: 20030 - RNA, 2031 nt, Artificial Sequence
  mRNA product Design a-2 (A100) comprising derived and/or modified sequence from LASV(GA391;Clade III)__AAA46284__SP-HsALB_NP(2-570) (opt4)
aggagaguccgcucagccagguugcagaagcggcuuagcguguguccuaaucuucucucugcguguagguaggccugugccgcaaacaagcuuaccaugaagugggugaccuucaucagccugcuguuccuguucagcagcgccuacagcagcgccagcaaggaggugagaagcugccuguggacccagagccugagaagagagcugagcggcuacugcagcaacaucaagcugcagguggugaaggacgcccaggcccugcugcacggccuggacuucagcgaggugagcaacgugcagagacugaugagaaagcagaagagagacgacggcgaccugaagagacugagagaccugaaccaggccgugaacaaccugguggagcugaagagcacccagcagaagagcgugcugagagugggcacccugagcagcgacgaccugcugauccuggccgccgaccuggagaagcugaagagcaaggugaccagaaccgagagaccccugagcagcggcguguacaugggcaaccugagcagccagcagcuggaccagagaagagcccugcugaacaugaucggcaugaccggcgugagcggcggcggcaagggcgccagcaacggcaucgugagagugugggacgugaagaacgccgagcugcugaacaaccaguucggcaccaugcccagccugacccuggccugccugaccaagcagggccagguggaccugaacgacgccgugcaggcccugaccgaccugggccugaucuacaccgccaaguaccccaacagcagcgaccuggacagacugagccagagccaccccauccugaacaugaucgacaccaagaagagcagccugaacaucagcggcuacaacuucagccugggcgccgccgugaaggccggcgccugcaugcuggacggcggcaacaugcuggagaccaucaaggugagcccccagaccauggacggcauccugaagagcauccugaaggugaagaagagccugggcauguucgugagcgacacccccggcgagagaaaccccuacgagaacauccuguacaagaucugccugagcggcgacggcuggagcuacaucgccagcagaaccagcaucgugggcagagccugggagaacaccgugguggaccuggagcaggacaacaagccccagaagaucggcaacggcggcagcaacaagagccugcagagcgccggcuucgccgccggccugaucuacagccagcugaugacccugaaggacuucaagugcuucaaccugauccccaacgccaagaccuggauggacaucgagggcagacccgaggaccccguggagaucgcccuguaccagcccagcagcggcugcuacgugcacuucuucagagagcccaccgaccugaagcaguucaagcaggacgccaaguacagccacggcagagacgugaccgaccuguucgccgcccagcccggccugaccagcgccgugaucgaggcccugcccagaaacauggugaucaccugccagggcagcgaggacaucagaaagcugcuggagagccagggcagaagagacaucaagcugaucgacaucacccugagcaaggccgacagcagaaaguucgagaacgccgugugggaccaguucaaggaccugugccacaugcacaccggcguggugguggagaagaagaagagaggcggcaaggaggagaucaccccccacugcgcccugauggacugcaucauguucgacgccgccgugagcggcggccuggacgccaaggugcugagaguggugcugcccagagacaugguguucagaaccagcacccccaagguggugcugugaggacuagucccuguucccagagcccacuuuuuuuucuuuuuuugaaauaaaauagccugucuuucagaucuaaaaaaaaaaaaaaaaaaaaaaaaaaaaaaaaaaaaaaaaaaaaaaaaaaaaaaaaaaaaaaaaaaaaaaaaaaaaaaaaaaaaaaaaaaaaaaaaaaaa

SEQ ID NO: 20031 - RNA, 2028 nt, Artificial Sequence
  mRNA product Design a-2 (A100) comprising derived and/or modified sequence from LASV(Nig08-A19;Clade III)__ADU56619__SP-HsALB_NP(2-569) (opt4)
aggagaguccgcucagccagguugcagaagcggcuuagcguguguccuaaucuucucucugcguguagguaggccugugccgcaaacaagcuuaccaugaagugggugaccuucaucagccugcuguuccuguucagcagcgccuacagcagcgccagcaaggaggugaagagcuuccuguggacccagagccugagaagagagcugagcggcuacugcagcaacaucaagcugcagguggugaaggacgcccaggcccugcugcacggccuggacuucagcgaggugagcaacgugcagagacugaugagaaagcagaagagagacgacggcgaccugaagagacugagagaccugaaccaggccgugaacaaccugguggagcugaagagcacccagcagaagagcgugcugagagugggcacccugagcagcgacgaccugcuggugcuggccgccgaccuggagaagcugaagagcaagguggugagaaccgagagaccccugagcagcggcaucuacaugggcaaccugagcagccagcagcuggaccagagaaaggcccugcugaacaugaucggcaugaccggcggcaacggcggcagaaacaccaccagcgacggcaucgugagagugugggacgugaagaacgccgagcugcugaacaaccaguucggcaccaugcccagccugacccuggccugccugaccaagcagggccagguggaccugaacgacgccgugcaggcccugaccgaccugggccugaucuacaccgccaaguaccccaacagcagcgaccuggacagacuggcccagagccaccccauccugaacaugaucgacaccaagaagagcagccugaacaucagcggcuacaacuucagccugggcgccgccgugaaggccggcgccugcaugcuggacggcggcaacaugcuggagaccaucaaggugagcccccagaccauggacggcauccugaagagcauccugaaggugaagagaagccugggcauguucaucagcgacacccccggcgagagaaaccccuacgagaacauccuguacaagaucugccugagcggcgacggcuggcccuacaucgccagcagaaccagcaucgugggcagagccugggagaacaccgugguggaccuggagagcgacaacaagccccagaagaccggcaacggcggcagcaacaagagccugcagagcgccggcuucgccgccggccugaccuacagccagcugaugacccugaaggacagcaugcugcagcuggaccccaacgccaagaccuggauggacaucgagggcagacccgaggaccccguggagaucgcccuguaccagcccagcagcggcugcuacauccacuucuucagagagcccaccgaccugaagcaguucaagcaggacgccaaguacagccacggcaucgacgugaccgaccuguucgccgcccagcccggccugaccagcgccgugaucgaggcccugcccagaaacauggugaucaccugccagggcagcgaggacaucagaaagcugcuggagagccagggcagaagagacaucaagcugaucgacaucagccugagcaagguggacagcagaaaguucgagaacgccgugugggaccaguucaaggaccugugccacaugcacaccggcaucgugguggagaagaagaagagaggcggcaaggaggagaucaccccccacugcgcccugauggacugcaucauguucgacgccgccgugagcggcggcguggacgccaaggugcugagagccgugcugcccagagacaugguguucagaaccagcacccccaagguggugcugugaggacuagucccuguucccagagcccacuuuuuuuucuuuuuuugaaauaaaauagccugucuuucagaucuaaaaaaaaaaaaaaaaaaaaaaaaaaaaaaaaaaaaaaaaaaaaaaaaaaaaaaaaaaaaaaaaaaaaaaaaaaaaaaaaaaaaaaaaaaaaaaaaaaaa

SEQ ID NO: 20032 - RNA, 2028 nt, Artificial Sequence
  mRNA product Design a-2 (A100) comprising derived and/or modified sequence from LASV(G1180-SLE-2010;Clade IV)__AIT17169__SP-HsALB_NP(2-569) (opt4)
aggagaguccgcucagccagguugcagaagcggcuuagcguguguccuaaucuucucucugcguguagguaggccugugccgcaaacaagcuuaccaugaagugggugaccuucaucagccugcuguuccuguucagcagcgccuacagcagcgccagcaaggagaucaagagcuuccuguggacccagagccugagaagagagcugagcggcuacugcagcaacaucaagcugcagguggugaaggacgcccaggcccugcugcacggccuggacuucagcgaggugagcaacgugcagagacugaugagaaaggagagaagagacgacaacgaccugaagagacugagagaccugaaccaggccgugaacaaccugguggagcugaagagcacccagcagaagagcauccugagagugggcacccugaccagcgacgaccugcugauccuggccgccgaccuggagaagcugaagagcaaggugaucagaaccgagagaccccugagcgccggcguguacaugggcaaccugagcagccagcagcuggaccagagaagagcccugcugagcaugaucggcaugagcagcggcaaccagagagcccaggccggcagagacggcguggugagagugugggacgugaagaacguggagcugcugaacaaccaguucggcaccaugcccagccugacccuggccugccugaccaagcagggccagguggaccugaacgacgccgugcaggcccugaccgaccugggccugaucuacaccgccaaguaccccaacaccagcgaccuggacagacugacccagagccaccccauccugaacaugaucgacaccaagaagagcagccugaacaucagcggcuacaacuucagccugggcgccgccgugaaggccggcgccugcaugcuggacggcggcaacaugcuggagaccaucaaggugagcccccagaccauggacggcauccugaagagcauccugaaggugaagaaggcccugggcauguucaucagcgacacccccggcgagagaaaccccuacgagaacauccuguacaagaucugccugagcggcgacggcuggcccuacaucgccagcagaaccagcaucaccggcagagccugggagaacaccgugguggaccuggagagcgacggcaagccccagaaggccggcagcaacaacagcaacaagagccugcagagcgugggcuucaccgccggccugaccuacagccagcugaugacccugaaggacgccaugcugcagcuggaccccaacgccaagaccuggauggacaucgagggcagacccgaggaccccguggagaucgcccuguaccagcccagcagcggcugcuacauccacuucuucagagagcccaccgaccugaagcaguucaagcaggacgccaaguacagccacggcaucgacgugaccgaccuguucgccgcccagcccggccugaccagcgccgugaucgacgcccugcccagaaacauggugaucaccugccagggcagcgacgacaucagaaagcugcuggagagccagggcagaaaggacaucaagcugaucgacaucgcccugagcaagaccgacagcagaaaguacgagaacgccgugugggaccaguacaaggaccugugccacaugcacaccggcguggugguggagaagaagaagagaggcggcaaggaggagaucaccccccacugcgcccugauggacugcaucauguucgacgccgccgugagcggcggccugaacaccagcgugcugagagccgugcugcccagagacaugguguucagaaccagcacccccagaguggugcugugaggacuagucccuguucccagagcccacuuuuuuuucuuuuuuugaaauaaaauagccugucuuucagaucuaaaaaaaaaaaaaaaaaaaaaaaaaaaaaaaaaaaaaaaaaaaaaaaaaaaaaaaaaaaaaaaaaaaaaaaaaaaaaaaaaaaaaaaaaaaaaaaaaaaa

SEQ ID NO: 20033 - RNA, 2028 nt, Artificial Sequence
  mRNA product Design a-2 (A100) comprising derived and/or modified sequence from LASV(G1442-SLE-2011;Clade IV)__AIT17181__SP-HsALB_NP(2-569) (opt4)
aggagaguccgcucagccagguugcagaagcggcuuagcguguguccuaaucuucucucugcguguagguaggccugugccgcaaacaagcuuaccaugaagugggugaccuucaucagccugcuguuccuguucagcagcgccuacagcagcgccagcaaggaggugaagagcuuccuguggacccagagccugagaagagagcugagcggcuacugcagcaacaucaagcugcagguggugaaggacgcccaggcccugcugcacggccuggacuucagcgaggugagcaacgugcagagacugaugagaaagcagagaagagacgacaacgaccugaagagacugagagaccugaaccaggccgugaacaaccugguggagcugaagagcacccagcagaagagcgugcugagagugggcacccugaccagcgacgaccugcuggugcuggccgccgaccuggagaagcugaagagcaaggugaucagaaccgagagaccccugagcgccggcguguacaugggcaaccugagcagccagcagcuggaccagagaagagcccugcugaacaugaucggcaugagcggcggcauccagggcaccagaaccggcagagacggcguggugagagugugggacgugaagaacgccgaccugcugaacaaccaguucggcaccaugcccagccugacccuggccugccugaccaagcagggccagguggaccugaacgacguggugcaggcccugaccgaccugggccugaucuacaccgccaaguaccccaacgccagcgaccuggacagacugacccagagccaccccauccugaacaugaucgacaccaagaagagcagccugaacaucagcggcuacaacuucagccugggcgccgccgugaaggccggcgccugcaugcuggacggcggcaacaugcuggagaccaucaaggugagcccccagaccauggacggcauccugaagagcauccugaaggugaagaagacccugggcauguucaucagcgacacccccggcgagagaaaccccuacgagaacauccuguacaagaucugccugagcggcgacggcuggcccuacaucgccagcagaaccagcaucaccggcagagccugggagaacaccgugguggaccuggagagcgacggcaagccccagaaggccggcagcaacaacagcaacaagagccugcagagcgccggcuucgccgccggccugaccuacagccagcugaugacccugaaggacgccaugcugcagcuggaccccaacgccaagaccuggauggacaucgagggcagacccgaggaccccguggagaucgcccuguaccagcccagcagcggcugcuacauccacuucuucagagagcccaccgaccugaagcaguucaagcaggacgccaaguacagccacggcaucgacgugaccgaccuguucgccgcccagcccggccugaccagcgccgugaucgaggcccugcccagaaacauggugaucaccugccagggcagcgacgacaucaagaagcugcuggagagccagggcagaaaggacaucaagcugaucgacaucgcccugagcaagaccgacagcagaaaguacgagaacgccgugugggaccaguacaaggaccugugccacaugcacaccggcguggugguggagaagaagaagagaggcggcaaggaggagaucaccccccacugcgcccugauggacugcaucauguucgacgccgccgugagcggcggccugaacacccuggugcugagagccgugcugcccagagacaugguguucagaaccagcacccccagaguggugcugugaggacuagucccuguucccagagcccacuuuuuuuucuuuuuuugaaauaaaauagccugucuuucagaucuaaaaaaaaaaaaaaaaaaaaaaaaaaaaaaaaaaaaaaaaaaaaaaaaaaaaaaaaaaaaaaaaaaaaaaaaaaaaaaaaaaaaaaaaaaaaaaaaaaaa

SEQ ID NO: 20034 - RNA, 2028 nt, Artificial Sequence
  mRNA product Design a-2 (A100) comprising derived and/or modified sequence from LASV(G3010-SLE-2013;Clade IV)__AIT17345__SP-HsALB_NP(2-569) (opt4)
aggagaguccgcucagccagguugcagaagcggcuuagcguguguccuaaucuucucucugcguguagguaggccugugccgcaaacaagcuuaccaugaagugggugaccuucaucagccugcuguuccuguucagcagcgccuacagcagcgccagcaaggagaucaagagcuuccuguggacccagagccugagaagagagcugagcggcuacugcagcaacaucaagcugcagguggugaaggacgcccaggcccugcugcacggccuggacuucagcgaggugagcaacgugcagagacugaugagaaaggagagaagagacgacaacgaccugaagagacugagagaccugaaccaggccgugaacaaccugguggagcugaagagcacccagcagaagagcauccugagagugggcacccugaccagcgacgaccugcugauccuggccgccgaccuggagaagcugaagagcaaggugaccagaaccgagagaccccugagcgccggcguguacaugggcaaccugagcagccagcagcuggaccagagaagagcccugcugagcaugaucggcaugagcagcggcgugcagggcgccagagccggcagagacggcguggugagagugugggacgugaagaacgccgagcugcugaacaaccaguucggcaccaugcccagccugacccuggccugccugaccaagcagggccagguggaccugaacgacguggugcaggcccugaccgaccugggccugaucuacaccgccaaguaccccaacaccagcgaccuggacagacugacccagagccaccccauccugaacaugaucgacaccaagaagagcagccugaacaucagcggcuacaacuucagccugggcgccgccgugaaggccggcgccugcaugcuggacggcggcaacaugcuggagaccaucaaggugagcccccagaccauggacggcauccugaagagcauccugaaggugaagaaggcccugggcauguucaucagcgagacccccggcgagagaaaccccuacgagaacauccuguacaagaucugccugagcggcgacggcuggcccuacaucgccagcagaaccagcaucaccggcagagccugggagaacaccgugguggaccuggagagcgacggcaagccccagaaggccggcagcaacaacagcaacaagagccugcagagcgccggcuucaccgccggccugaccuacagccagcugaugacccugaaggacgccaugcugcagcuggaccccaacgccaagaccuggauggacaucgagggcagacccgaggaccccguggagguggcccuguaccagcccagcagcggcugcuacauccacuucuucagagagcccaccgaccugaagcaguucaagcaggacgccaaguacagccacggcaucgacgugaccgaccuguucgccgcccagcccggccugaccagcgccgugaucgacgcccugcccagaaacauggugaucaccugccagggcagcgacgacaucaagaagcugcuggagagccagggcagaaaggacaucaagcugaucgacaucgcccugagcaagaccgacagcagaaaguacgagaacgccgugugggaccaguacaaggaccugugccacaugcacaccggcguggugguggagaagaagaagagaggcggcaaggaggagaucaccccccacugcgcccugauggacugcaucauguucgacgccgccgugagcggcggccugaacaccagcgugcugagagccgugcugcccagagacaugguguucagaaccagcacccccagaguggugcugugaggacuagucccuguucccagagcccacuuuuuuuucuuuuuuugaaauaaaauagccugucuuucagaucuaaaaaaaaaaaaaaaaaaaaaaaaaaaaaaaaaaaaaaaaaaaaaaaaaaaaaaaaaaaaaaaaaaaaaaaaaaaaaaaaaaaaaaaaaaaaaaaaaaaa

SEQ ID NO: 20035 - RNA, 2028 nt, Artificial Sequence
  mRNA product Design a-2 (A100) comprising derived and/or modified sequence from LASV(G502-SLE-2009;Clade IV)__AIT17127__SP-HsALB_NP(2-569) (opt4)
aggagaguccgcucagccagguugcagaagcggcuuagcguguguccuaaucuucucucugcguguagguaggccugugccgcaaacaagcuuaccaugaagugggugaccuucaucagccugcuguuccuguucagcagcgccuacagcagcgccagcaaggagaucaagagcuuccuguggacccagagccugagaagagagcugagcggcuacugcagcaacaucaagcugcagguggugaaggacgcccaggcccugcugcacggccuggacuucagcgaggugagcaacgugcagagacugaugagaaaggagagaagagacgacaacgaccugaagagacugagagaccugaaccaggccgugaacaaccugguggagcugaagagcacccagcagaagagcauccugagagugggcacccugaccagcgacgaccugcugauccuggccgccgaccuggagaagcugaagagcaaggugaucagaaccgagagaccccugagcgccggcguguacaugggcaaccugagcagccagcagcuggaccagagaagagcccugcugagcaugaucggcaugagcggcggcaaccagggcgugagagccggcaaggacggcguggugagagugugggacgugaagaacgccgagcugcugaacaaccaguucggcaccaugcccagccugacccuggccugccugaccaagcagggccagguggaccugaacgacgccgugcaggcccugaccgaccugggccugaucuacaccgccaaguaccccaacaccagcgaccuggacagacugacccagagccaccccauccugaacaugaucgacaccaagaagagcagccugaacaucagcggcuacaacuucagccugggcgccgccgugaaggccggcgccugcaugcuggacggcggcaacaugcuggagaccaucaaggugagcccccagaccauggacggcauccugaagagcauccugaaggugaagaaggcccugggcauguucaucagcgacacccccggcgagagaaaccccuacgagaacauccuguacaagaucugccugagcggcgacggcuggcccuacaucgccagcagaaccagcaucaccggcagagccugggagaacaccgugguggaccuggagagcgacggcaagccccagaaggccggcagcaacaacagcaacaagagccugcagagcgccggcuucaccgccggccugaccuacagccagcugaugacccugaaggacgccaugcugcagcuggaccccaacaccaagaccuggauggacaucgagggcagacccgaggaccccguggagaucgcccuguaccagcccagcagcggcugcuacauccacuucuucagagagcccaccgaccugaagcaguucaagcaggacgccaaguacagccacggcaucgacgugaccgaccuguucgccgcccagcccggccugaccagcgccgugaucgacgcccugcccagaaacauggugaucaccugccagggcagcgacgacaucagaaagcugcuggagagccagggcagaaaggacaucaagcugaucgacaucgcccugaacaagaccgacagcagaaaguacgagaacgccgugugggaccaguacaaggaccugugccacaugcacaccggcguggugguggagaagaagaagagaggcggcaaggaggagaucaccccccacugcgcccugauggacugcaucauguucgacgccgccgugagcggcggccugaacaccagcgugcugagagccgugcugcccagagacaugguguucagaaccagcacccccagaguggugcugugaggacuagucccuguucccagagcccacuuuuuuuucuuuuuuugaaauaaaauagccugucuuucagaucuaaaaaaaaaaaaaaaaaaaaaaaaaaaaaaaaaaaaaaaaaaaaaaaaaaaaaaaaaaaaaaaaaaaaaaaaaaaaaaaaaaaaaaaaaaaaaaaaaaaa

SEQ ID NO: 20036 - RNA, 2028 nt, Artificial Sequence
  mRNA product Design a-2 (A100) comprising derived and/or modified sequence from LASV(G733-SLE-2010;Clade IV)__AIT17155__SP-HsALB_NP(2-569) (opt4)
aggagaguccgcucagccagguugcagaagcggcuuagcguguguccuaaucuucucucugcguguagguaggccugugccgcaaacaagcuuaccaugaagugggugaccuucaucagccugcuguuccuguucagcagcgccuacagcagcgccagcaaggagaucaagagcuuccuguggacccagagccugagaagagagcugagcggcuacugcagcaacaucaagcugcagguggugaaggacgcccaggcccugcugcacggccuggacuucagcgaggugagcaacgugcagagacugaugagaaaggagagaagagacgacaacgaccugaagagacugagagaccugaaccaggccgugaacaaccugguggagcugaagagcacccagcagaagagcgugcugagagugggcacccugaccagcgacgagcugcuggugcuggccgccgaccuggagaagcugaagagcaaggugaucagaaccgagagaccccugagcgccggcguguacaugggcaaccugagcagccagcagcuggaccagagaagagcccugcugagcaugaucggcaugagcggcggcaaccagggcgccagaaccggcagagacggcguggugagagugugggacgugaagaacgccgagcugcugaacaaccaguucggcaccaugcccagccugacccuggccugccugaccaagcagggccagguggaccugaacgacgccgugcaggcccugaccgaccugggccugaucuacaccgccaaguaccccaacaccagcgaccuggacagacugacccagagccaccccauccugaacaugaucgacaccaagaagagcagccugaacaucagcggcuacaacuucagccugggcgccgccgugaaggccggcgccugcaugcuggacggcggcaacaugcuggagaccaucaaggugagcccccagaccauggacggcauccugaagagcauccugaaggugaagaaggcccugggcauguucaucagcgacacccccggcgagagaaaccccuacgagaacauccuguacaagaucugccugagcggcgacggcuggcccuacaucgccagcagaaccagcaucaccggcagagccugggagaacaccgugguggaccuggagagcgacggcaagccccagaaggccggcagcaacaacagcaacaagagccugcagagcgccggcuucaccgccggccugaccuacagccagcugaugacccugaaggacgccaugcugcagcuggaccccaacgccaagaccuggauggacaucgagggcagacccgaggaccccguggagaucgcccuguaccagcccagcagcggcugcuacauccacuucuucagagagcccaccgaccugaagcaguucaagcaggacgccaaguacagccacggcaucgacgugaccgaccuguucgccgcccagcccggccugaccagcgccgugaucgacgcccugcccagaaacauggugaucaccugccagggcagcgacgacaucagaaagcugcuggagagccagggcagaaaggacaucaagcugaucgacaucgcccugagcaagaucgacagcagaaaguacgagaacgccgugugggaccaguacaaggaccugugccacaugcacaccggcguggugguggagaagaagaagagaggcggcaaggaggagaucaccccccacugcgcccugauggacugcaucauguucgacgccgccgugagcggcggccugaacagccuggugcugagagccgugcugcccagagacaugguguucagaaccagcacccccagaguggugcugugaggacuagucccuguucccagagcccacuuuuuuuucuuuuuuugaaauaaaauagccugucuuucagaucuaaaaaaaaaaaaaaaaaaaaaaaaaaaaaaaaaaaaaaaaaaaaaaaaaaaaaaaaaaaaaaaaaaaaaaaaaaaaaaaaaaaaaaaaaaaaaaaaaaaa

SEQ ID NO: 20037 - RNA, 2028 nt, Artificial Sequence
  mRNA product Design a-2 (A100) comprising derived and/or modified sequence from MOPV/LASV reassortant(IGS-1;Clade IV)__AFY05578__SP-HsALB_NP(2-569) (opt4)
aggagaguccgcucagccagguugcagaagcggcuuagcguguguccuaaucuucucucugcguguagguaggccugugccgcaaacaagcuuaccaugaagugggugaccuucaucagccugcuguuccuguucagcagcgccuacagcagcgccagcaaggagaucaagagcuuccuguggacccagagccugagaagagagcugagcggcuacugcagcaacaucaagcugcagguggugaaggacgcccaggcccugcugcacggccuggacuucagcgaggugagcaacgugcagagacugaugagaaaggagagaagagacgacaacgaccugaagagacugagagaccugaaccaggccgugaacaaccugguggagcugaagagcacccagcagaagagcauccugagagugggcacccugaccagcgacgaccugcugauccuggccgccgaccuggagaagcugagaagcaaggugaucagaaccgagagaccccugagcgccggcguguacaugggcaaccugagcagccagcagcuggaccagagaagagcccugcugaacaugaucggcaugagcggcggcaaccagggcgccagagccggcagagacggcguggugagagugugggacgugaagaacgccgagcugcugagcaaccaguucggcaccaugcccagccugacccuggccugccugaccaagcagggccagguggaccugaacgacgccgugcaggcccugaccgaccugggccugaucuacaccgccaaguaccccaacaccagcgaccuggacagacugacccagagccaccccauccugaacaugaucgacaccaagaagagcagccugaacaucagcggcuacaacuucagccugggcgccgccgugaaggccggcgccugcaugcuggacggcggcaacaugcuggagaccaucaaggugagcccccagaccauggacggcauccugaagagcauccugaaggugaagaaggcccugggcauguucaucagcgacacccccggcgagagaaaccccuacgagaacauccuguacaagaucugccugagcggcgacggcuggcccuacaucgccagcagaaccagcaucaccggcagagccugggagaacaccgugguggaccuggagagcgacggcaagccccagaaggccgacagcaacaacagcagcaagagccugcagagcgccggcuucaccgccggccugaccuacagccagcugaugacccugaaggacgccaugcugcagcuggaccccaacgccaagaccuggauggacaucgagggcagacccgaggaccccguggagaucgcccuguaccagcccagcagcggcugcuacauccacuucuucagagagcccaccgaccugaagcaguucaagcaggacgccaaguacagccacggcaucgacgugaccgaccuguucgccacccagcccggccugaccagcgccgugaucgacgcccugcccagaaacauggugaucaccugccagggcagcgacgacaucagaaagcugcuggagagccagggcagaaaggacaucaagcugaucgacaucgaccugagcaagaccgacagcagaaaguacgagaacgccgugugggaccaguacaaggaccugugccacaugcacaccggcguggugguggagaagaagaagagaggcggcaaggaggagaucaccccccacugcgcccugauggacugcaucauguucgacgccgccgugagcggcggccugaacaccagcgugcugagagccgugcugcccagagacaugguguucagaaccagcacccccagaguggugcugugaggacuagucccuguucccagagcccacuuuuuuuucuuuuuuugaaauaaaauagccugucuuucagaucuaaaaaaaaaaaaaaaaaaaaaaaaaaaaaaaaaaaaaaaaaaaaaaaaaaaaaaaaaaaaaaaaaaaaaaaaaaaaaaaaaaaaaaaaaaaaaaaaaaaa

SEQ ID NO: 20038 - RNA, 2028 nt, Artificial Sequence
  mRNA product Design a-2 (A100) comprising derived and/or modified sequence from LASV(LM765-SLE-2012;Clade IV)__AIT17815__SP-HsALB_NP(2-569) (opt4)
aggagaguccgcucagccagguugcagaagcggcuuagcguguguccuaaucuucucucugcguguagguaggccugugccgcaaacaagcuuaccaugaagugggugaccuucaucagccugcuguuccuguucagcagcgccuacagcagcgccagcaaggagaucaagagcuuccuguggacccagagccugagaagagagcugagcggcuacugcagcaacaucaagcugcagguggugaaggacgcccaggcccugcugcacggccuggacuucagcgaggugagcaacgugcagagacugaugagaaaggagagaagagacgacaacgaccugaagagacugagagaccugaaccaggccgugaacaaccugguggagcugaagagcacccagcagaagagcauccugagagugggcacccugaccagcgacgaccugcugauccuggccgccgaccuggagaagcugaagagcaaggugaccagaaccgagagaccccugagcgccggcguguacaugggcaaccugagcagccagcagcuggaccagagaagagcccugcuggacaugaucggcaugagcggcagcaaccagggcgccagagccggcagagacggcguggugagagugugggacgugaagaacgccgagcugcugaacaaccaguucggcaccaugcccagccugacccuggccugccugaccaagcagggccagguggaccugaacgacgccgugcaggcccugaccgaccugggccugaucuacaccgccaaguaccccaacaccagcgaccuggacagacugacccagagccaccccauccugaacaugaucgacaccaagaagagcagccugaacaucagcggcuacaacuucagccugggcgccgccgugaaggccggcgccugcaugcuggacggcggcaacaugcuggagaccaucaaggugagcccccagaccauggacggcauccugaagagcauccugaaggugaagaaggcccugggcauguucaucagcgacgcccccggcgagagaaaccccuacgagaacauccuguacaagaucugccugagcggcgacggcuggcccuacaucgccagcagaaccagcaucaccggcagagccugggagaacaccgugguggaccuggagagcgacggcaagccccagaaggccggcagcaacggcagcaacaagagccugcagagcgccggcuucaccgccggccugaccuacagccagcugaugacccugaaggacgccaugcugcagcuggaccccaacgccaagaccuggauggacaucgagggcagacccgaggaccccguggagaucgcccuguaccagcccagcagcggcugcuacauccacuucuucagagagcccaccgaccugaagcaguucaagcaggacgccaaguacagccacggcaucgacgugaccgaccuguucgccgcccagcccggccugaccagcgccgugaucgacgcccugcccagaaacauggugaucaccugccagggcagcgacgacaucagaaagcuguucgagagccagggcagaaaggacaucaagcugaucgacaucgcccugagcaagaccgacagcagaaaguacgagaacgccgugugggaccaguacaaggaccugugccacaugcacaccggcaucgugguggagaagaagaagagaggcggcaaggaggagaucaccccccacugcgcccugauggacugcaucauguucgacgccgccgugagcggcggccugaacaccagcgugcugagagccgugcugcccagagacaugguguucagaaccagcacccccagaguggugcugugaggacuagucccuguucccagagcccacuuuuuuuucuuuuuuugaaauaaaauagccugucuuucagaucuaaaaaaaaaaaaaaaaaaaaaaaaaaaaaaaaaaaaaaaaaaaaaaaaaaaaaaaaaaaaaaaaaaaaaaaaaaaaaaaaaaaaaaaaaaaaaaaaaaaa

SEQ ID NO: 20039 - RNA, 2028 nt, Artificial Sequence
  mRNA product Design a-2 (A100) comprising derived and/or modified sequence from LASV(LM776-SLE-2012;Clade IV)__AIT17825__SP-HsALB_NP(2-569) (opt4)
aggagaguccgcucagccagguugcagaagcggcuuagcguguguccuaaucuucucucugcguguagguaggccugugccgcaaacaagcuuaccaugaagugggugaccuucaucagccugcuguuccuguucagcagcgccuacagcagcgccagcaaggagaucaagagcuuccuguggacccagagccugagaagagagcugagcagcuacugcagcaacaucaagcugcagguggugaaggacgcccaggcccugcugcacggccuggacuucagcgaggugagcaacgugcagagacugaugagaaaggagagaagagacgacaacgaccugaagagacugagagaccugaaccaggccgugaacaaccugguggagcugaagagcacccagcagaagagcauccugagagugggcacccugaccagcgacgaccugcugauccuggccgccgaccuggagaagcugaagagcaaggugaccagaaccgagagaccccugagcgccggcguguacaugggcaaccugagcagccagcagcuggaccagagaagagcccugcugagcaugaucggcaugagcggcagcaaccagggcgccagagccggcagagacggcguggugagagugugggacgugaagaacgccgagcugcugaacaaccaguucggcaccaugcccagccugacccuggccugccugaccaagcagggccagguggaccugaacgacgccgugcaggcccugaccgaccugggccugaucuacaccgccaaguaccccaacaccagcgaccuggacagacugacccagagccaccccauccugaacaugaucgacaccaagaagagcagccugaacaucagcggcuacaacuucagccugggcgccgccgugaaggccggcgccugcaugcuggacggcggcaacaugcuggagaccaucaaggugagcccccagaccauggacggcauccugaagagcauccugaaggugaagaaggcccugggcauguucaucagcgacacccccggcgagagaaaccccuacgagaacauccuguacaagaucugccugagcggcgacggcuggcccuacaucgccagcagaaccagcaucaccggcagagccugggagaacaccgugguggaccuggagagcgacggcaagccccagaaggccggcagcaacaacagcaacaagagccugcagagcgccggcuucaccgccggccugaccuacagccagcugaugacccugaaggacgccaugcugcagcuggaccccaacgccaagaccuggauggacaucgagggcagacccgaggaccccguggagguggcccuguaccagcccagcagcggcugcuacauccacuucuucagagagcccaccgaccugaagcaguucaagcaggacgccaaguacagccacggcaucgacgugaccgaccuguucgccgcccagcccggccugaccagcgccgugaucgacgcccugcccagaaacauggugaucaccugccagggcagcgacgacaucagaaagcugcuggagagccagggcagaaaggacaucaagcugaucgacaucgcccugagcaagaccgacagcagaaaguacgagaacgccgugugggaccaguacaaggaccugugccacaugcacaccggcguggugguggagaagaagaagagaggcggcaaggaggagaucaccccccacugcgcccugauggacugcaucauguucgacgccgccgugagcggcggccugaacaccagcgugcugagagccgugcugcccagagacaugguguucagaaccagcacccccagaguggugcugugaggacuagucccuguucccagagcccacuuuuuuuucuuuuuuugaaauaaaauagccugucuuucagaucuaaaaaaaaaaaaaaaaaaaaaaaaaaaaaaaaaaaaaaaaaaaaaaaaaaaaaaaaaaaaaaaaaaaaaaaaaaaaaaaaaaaaaaaaaaaaaaaaaaaa

SEQ ID NO: 20040 - RNA, 2028 nt, Artificial Sequence
  mRNA product Design a-2 (A100) comprising derived and/or modified sequence from LASV(Mad39;Clade IV)__ANH09723__SP-HsALB_NP(2-569) (opt4)
aggagaguccgcucagccagguugcagaagcggcuuagcguguguccuaaucuucucucugcguguagguaggccugugccgcaaacaagcuuaccaugaagugggugaccuucaucagccugcuguuccuguucagcagcgccuacagcagcgccagcaaggagaucaagagcuuccuguggacccagagccugagaagagagcugagcggcuacugcagcaacaucaagcugcagguggugaaggacgcccaggcccugcugcacggccuggacuucagcgaggugagcaacgugcagagacugaugagaaagcagagaagagacgacaacgaccugaagagacugagagaccugaaccaggccgugaacaaccugguggagcugaagagcacccagcagaagagcgugcugagagugggcacccugaccagcgacgaccugcugacccuggccgccgaccuggagaagcugaagagcaaggugaccagaaccgagagaccccugaccgccggcguguacaugggcaaccugagcagccagcagcuggaccagagaagagcccugcugaacaugaucggcaugagcggcggcaaccagggcgccagaaccggcagagacggcguggugagagugugggacgugaagaacgccgagcugcugaacaaccaguucggcaccaugcccagccugacccuggccugccugaccaagcagggccagguggaccugaacgacguggugcaggcccugaccgaccugggccugaucuacaccgccaaguaccccaacaccagcgaccuggacagacugacccagagccaccccauccugaacaugaucgacaccaacaagagcagccugaacaucagcggcuacaacuucagccugggcgccgccgugaaggccggcgccugcaugcuggacggcggcaacaugcuggagaccaucaaggugagcccccagaccauggacggcauccugaagagcauccugaaggugaagaagagccugggcauguucaucagcgacacccccggcgagagaaaccccuacgagaacauccuguacaagaucugccugagcggcgacggcuggcccuacaucgccagcagaaccagcaucaccggcagagccugggagaacaccgugguggaccuggagagcggcggcaagccccagaaggccggcagcaacaacagcaacaagagccugcagagcgccggcuucgccgccggccugaccuacagccagcugaugacccugaaggacgccaugcugcagcuggaccccaacgccaagaccuggauggacaucgagggcagacccgaggaccccguggagaucgcccuguaccagcccaucagcggcugcuacauccacuucuucagagagcccaccgaccugaagcaguucaagcaggacgccaaguacagccacggcaucgacgugaccgaccuguucgccgcccagcccggccugaccagcgccgugaucgaggcccugcccagaaacauggugaucaccugccagggcagcgacgacaucagaaagcuguucgagagccagggcagaaaggacaucaagcugaucgacaucgcccugagcaagaccgacagcagaaaguacgagaacgccgugugggaccaguacaaggaccugugccacaugcacaccggcguggugguggagaagaagaagaagggcggcaaggaggagaucaccccccacugcgcccugauggacugcaucauguucgacgccgccgugagcggcggccugaacacccuggugcugagagccgugcugcccagagacaugguguucagaaccagcacccccaagguggugcugugaggacuagucccuguucccagagcccacuuuuuuuucuuuuuuugaaauaaaauagccugucuuucagaucuaaaaaaaaaaaaaaaaaaaaaaaaaaaaaaaaaaaaaaaaaaaaaaaaaaaaaaaaaaaaaaaaaaaaaaaaaaaaaaaaaaaaaaaaaaaaaaaaaaaa

SEQ ID NO: 20041 - RNA, 2028 nt, Artificial Sequence
  mRNA product Design a-2 (A100) comprising derived and/or modified sequence from LASV(Z0947-SLE-2011;Clade IV)__AIT17841__SP-HsALB_NP(2-569) (opt4)
aggagaguccgcucagccagguugcagaagcggcuuagcguguguccuaaucuucucucugcguguagguaggccugugccgcaaacaagcuuaccaugaagugggugaccuucaucagccugcuguuccuguucagcagcgccuacagcagcgccagcaaggagaucaagagcuuccuguggacccagagccugagaagagagcugagcggcuacugcagcaacaucaagcugcagguggugaaggacgcccaggcccugcugcacggccuggacuucagcgaggugagcaacgugcagagacugaugagaaaggagagaagagacgacaacgaccugaagagacugagagaccugaaccaggccgugaacaaccugguggagcugaagagcacccagcagaagagcauccugagagugggcacccugaccagcgacgaccugcugauccuggccgccgaccuggagaagcugaagagcaaggugaccagaaccgagagaccccugagcgccggcguguacaugggcaaccugagcagccagcagcuggaccagagaagagcccugcugaacaugaucggcaugagcggcagcaaccagggcgccagaaccggcagagacggcguggugagagugugggacgugaagaacgccgagcugcugaacaaccaguucggcaccaugcccagccugacccuggccugccugaccaagcagggccagguggaccugaacgacgccgugcaggcccugaccgaccugggccugaucuacaccgccaaguaccccaacaccagcgaccuggacagacugacccagagccaccccauccugaacaugaucgacaccaagaagagcagccugaacaucagcggcuacaacuucagccugggcgccgccgugaaggccggcgccugcaugcuggacggcggcaacaugcuggagaccaucaaggugagcccccagaccauggacggcauccugaagagcauccugaaggugaagaaggcccugggcauguucaucagcgacgcccccggcgagagaaaccccuacgagaacauccuguacaagaucugccugagcggcgacggcuggcccuacaucgccagcagaaccagcaucaccggcagagccugggagaacaccgugguggaccuggagagcgacggcaagccccagaaggccggcagcaacggcagcaacaagagccugcagagcgccggcuucaccgccggccugaccuacagccagcugaugacccugaaggacgccaugcugcagcuggaccccaacgccaagaccuggauggacaucgagggcagacccgaggaccccguggagaucgcccuguaccagcccagcagcggcugcuacauccacuucuucagagagcccaccgaccugaagcaguucaagcaggacgccaaguacagccacggcaucgacgugaccgaccuguucgccgcccagcccggccugaccagcgccgugaucgacgcccugcccagaaacauggugaucaccugccagggcagcgacgacaucagaaagcuguucgagagccagggcagaaaggacaucaagcugaucgacaucgcccugagcaagaccgacagcagaaaguacgagaacgccgugugggaccaguacaaggaccugugccacaugcacaccggcaucgugguggagaagaagaagagaggcggcaaggaggagaucaccccccacugcgcccugauggacugcaucauguucgacgccgccgugagcggcggccugaacaccagcgugcugagagccgugcugcccagagacaugguguucagaaccagcacccccagaguggugcugugaggacuagucccuguucccagagcccacuuuuuuuucuuuuuuugaaauaaaauagccugucuuucagaucuaaaaaaaaaaaaaaaaaaaaaaaaaaaaaaaaaaaaaaaaaaaaaaaaaaaaaaaaaaaaaaaaaaaaaaaaaaaaaaaaaaaaaaaaaaaaaaaaaaaa

SEQ ID NO: 20042 - RNA, 2028 nt, Artificial Sequence
  mRNA product Design a-2 (A100) comprising derived and/or modified sequence from LASV(Josiah;Clade IV)__NP_694869__SP-HsALB_NP(2-569) (opt5)
aggagaguccgcucagccagguugcagaagcggcuuagcguguguccuaaucuucucucugcguguagguaggccugugccgcaaacaagcuuaccaugaagugggugaccuucaucagccugcucuuucuguucuccucugccuacagcagcgccuccaaggagaucaaaucuuuccuguggacccagagccucagacgggaacuguccggcuacugcucuaacauuaagcugcaaguggucaaagacgcucaggcccugcuccacgggcuggauuuuagcgagguuuccaaugugcagcgccuuaugagaaaggaacggcgcgacgauaacgaccugaaaagacuccgggaucugaaucaggcggugaacaaucuggucgagcucaagucuacacaacaaaagagcauccugcgcgugggaacgcuuaccuccgacgaucugcucauucuggcugccgaccuugaaaaacuuaagagcaaaguuaucagaacagagcggccccucucugccggcguguauauggggaaccuguccagccagcagcuggaucagcgcagagcucuccugaauaugauuggaaugucuggcgggaaccagggagcccgggcuggccgcgacggcgucgugagaguuugggaugugaagaaugccgagcuucugaacaaucaguucgggaccaugccuucccucacacuggcgugucuuaccaaacagggacaagucgaccugaacgaugccgugcaggcucucacagaccugggccugaucuacaccgccaaguauccgaauacgagcgaccucgaucggcugacccagucucaucccauccuuaacaugauugacacaaagaaauccagccugaauaucuccggguacaacuuuucucucggagcugccgugaaggcgggcgccugcaugcuggaugggggaaacaugcuugaaaccauuaaagucagcccucaaacaauggacggcauccugaaguccauucucaaaguuaagaaagcucugggcauguucaucagcgauacccccggggagcgcaauccuuaugaaaacauucuguacaagaucugucucucuggagacggcuggcccuauaucgccuccagaacgagcauuacagggcgggcuugggagaauaccgugguggaucuggagucugacggaaagccucagaaagccgauagcaacaauuccucuaagagccuucaguccgccggcuuuacagcugggcugaccuacagccagcucaugacccugaaagacgcgaugcugcaacuugauccgaacgccaagacauggauggacaucgaaggaagacccgaggacccugucgaaauugcucucuaccagcccucuuccggcugcuauauccacuucuuucgcgagccuacggaucugaaacaguucaagcaggacgccaaguacagccauggcauugaugugaccgaccuguuugccacacaacccgggcucaccucugcuguuaucgaugcccugccgcggaauauggugaucacaugucagggauccgacgauauuagaaaacuucuggaaagccagggccgcaaggacaucaaacucauugauaucgcgcuguccaagaccgacucucggaaauaugagaacgcugucugggaucaguacaaggaccugugccacaugcauacgggggugguuguggagaagaaaaagagaggaggcaaagaagagauuacaccucacugugcccuuauggauugcaucauguucgacgccgcugucagcgggggccucaauaccuccgugcugcgcgccguccugccccgggacaugguguuuagaaccucuacaccucgcguugugcucugaggacuagucccuguucccagagcccacuuuuuuuucuuuuuuugaaauaaaauagccugucuuucagaucuaaaaaaaaaaaaaaaaaaaaaaaaaaaaaaaaaaaaaaaaaaaaaaaaaaaaaaaaaaaaaaaaaaaaaaaaaaaaaaaaaaaaaaaaaaaaaaaaaaaa

SEQ ID NO: 20043 - RNA, 2028 nt, Artificial Sequence
  mRNA product Design a-2 (A100) comprising derived and/or modified sequence from LASV(LP;Clade I)__AAF86702__SP-HsALB_NP(2-569) (opt5)
aggagaguccgcucagccagguugcagaagcggcuuagcguguguccuaaucuucucucugcguguagguaggccugugccgcaaacaagcuuaccaugaagugggugaccuucaucagccugcucuuucuguucuccucugccuacagcagcaacuccaaggagaucaaaucuuuccuguggacccagagccucagacgggaacuguccggcuacugcucuaauauuaagcuccaaguggucaaagacgcccaggcucugcuccacgggcuggauuuuagcgagguuuccaacgugcagcgccuuaugagaaagcagaaacgggacgaugccgaccugaagcgccucagagaucugaaucaagcggugaacaaucuggucgaacucaagucuacacagcagaaaaacgugcugcggguuggaacgcuuagcuccgacgaucugaucacccucgcugccgaccuggagaaacuuaaaagcaaggugauucgcacagaaagaccccugucuuccggcgucuauauggggaaucucagcucucagcaacuggaucagcggcgcgcccugcucuccaugaucggaaugagcggcgggccucagggaaacagaaccggcggcgacggggugguucgggugugggaugucaaaaaugcugagcugcuuaacaaucaguucggaacaaugccgucucugacccucgccugucugacaaagcaaggccagguggaccuuaacgaugcugugcaggcccugaccgaccucgggcugauuuacacggcgaaguaucccaauuccagcgaccuggauaugcucacccaaucccauccuauccugggaauggucgacacaaagaagucuagccuuaacaucuccggcuacaauuuuagccugggggccgcuguuaaagccggagcuugcaugcucgauggcggcaacaugcuggagaccauuaaggugucuccccagacaauggacgggauccuuaaauccauucugaaggugaaacgcagccucggaauguucaucucugauaccccuggcgaaagaaaccccuaugagaauauucuguacaagaucugucugagcggggaaggauggccuuauauugccucccggacgucuaucacaggccgcgcgugggagaacacccucgucgaccuggagagcgauaauaagccgcccaaacuuaacuccgccgggagcaauaagucucugcaggcugccggacucaacgcuggccugacauacucccagcugaugacccuuaaagacugcaugcuccaacuggauccuagcucuaagaccuggaucgacauugaaggcagacccgaggauccuguggaaaucgcccuguuucagcccuccagcggguguuacauucacuucuuucgggagccgacagaccucaaacaguucaagcaggacgccaaguauucccauggaaucgauguuacggaccuguuuucuacccaaccuggccuuacaagcgcugugauugaagcgcugcccagaaauaugguccuuaccugccagggguccgaugacaucaaaaagcugcuggagucucagggacgccgggauaucaaacuuauugacaucagccucuccaaggccgauagcagaaaauucgagaacgcugugugggaccaguacaaggaucugugucacaugcauacaggcguuguggucgaaaagaaaaagcgcgggggcaaagaggaaauuaccccucacugcgcccugcucgacuguaucauguuugaugccgcuacgacaggaucucugaauauuaccacccuucgggccgugcugcccagagacauggucuuccgcacauccacccccaaggugguucucugaggacuagucccuguucccagagcccacuuuuuuuucuuuuuuugaaauaaaauagccugucuuucagaucuaaaaaaaaaaaaaaaaaaaaaaaaaaaaaaaaaaaaaaaaaaaaaaaaaaaaaaaaaaaaaaaaaaaaaaaaaaaaaaaaaaaaaaaaaaaaaaaaaaaa

SEQ ID NO: 20044 - RNA, 2028 nt, Artificial Sequence
  mRNA product Design a-2 (A100) comprising derived and/or modified sequence from LASV(803213;Clade II)__AAF86704__SP-HsALB_NP(2-569) (opt5)
aggagaguccgcucagccagguugcagaagcggcuuagcguguguccuaaucuucucucugcguguagguaggccugugccgcaaacaagcuuaccaugaagugggugaccuucaucagccugcucuuucuguucuccucugccuacagcagcgccuccaaggaggugaaaucuuuccuguggacccagagccucagacgggaacuguccggcuacugcucuaacaucaaacuucaagucguuaaggacgcucaggcccugcuccacgggcuggauuuuagcgaggugaauaacgugcagcgccuuaugagaaagcagaaacgggacgauggagaccugaagcgccucagagaucugaaucaagcggucaacaaucugguggaacucaaguccacacagcagaaaucuauucugcggguuggcacgcuuaccagcgacgaucugcucacacuggcugccgaccuugagaagcugaaauccaaggugauccgcaccgaaagaccccucagcucuggggucuauaugggaaaccuguccacacagcaacuggagcagcggcgcgcccuccugaauaugauuggcauggugggaggagcucagggcacccagccuggcagagaugggguugugcgggucugggacgugaaaaacccggaucuucugaauaaccaauucggaacaaugcccagccucacccuggccugucuuacgaagcagggccagguggaccugaaugaugcuguccucgcccugaccgaccuggggcucaucuacacagcgaaguauccuaacucuuccgaccuggaucgccuuagccaaucucaucccauucugaauaugguugacaccaaaaaguccagccucaacaucuccggauacaauuuuucucugggcgccgcugugaaagccggggcuugcaugcuugauggaggcaacaugcuggagacaaucaaggugaccccucagacgauggacggcauucucaaaagcauccugaaggucaaaagaucccuggggauguucgugagcgauacacccggagaacggaacccuuaugagaauauucucuacaagaucugucugucuggcgacggguggccguauauugccucccgcaccagcaucguugggagagcgugggaaaacacaaccguggaucuugagucugacggcaagccccagaaagucgggaccgccggaagcaauaagucccugcagucugcuggcuuuccuacaggccucacguacagccaacugaugacccugaaagauuccaugaugcagcuugaccccagcgccaagacauggauugauaucgaggggcggccugaagaccccguggagaucgcucucuaccagccgaugucuggaugcuauauucacuucuuuagagaaccuaccgaccugaaacaguucaagcaagaugccaaguacucccauggcaucgacguugccgaucuguuucccgcucagccugggcucacaagcgcggugauugaggcccugccccgcaacaugguccuuaccugucagggaucugacgauaucaaaaagcugcucgacucccagggccggagagauauuaaacugaucgacaucagccuguccaagguggauucucgcaaauucgaaaaugcugucugggaccaaugcaaggaucuuugucacaugcauacgggggugguuguggagaagaaaaagcggggcggaaaagaggaaauuacaccccacugcgcccucauggacuguaucauguuugaugccgcugucagcggcgggcugaacauuccugugcugagagccguucucccgcgcgacaugguguuccggaccuccucucccaaggucgugcugugaggacuagucccuguucccagagcccacuuuuuuuucuuuuuuugaaauaaaauagccugucuuucagaucuaaaaaaaaaaaaaaaaaaaaaaaaaaaaaaaaaaaaaaaaaaaaaaaaaaaaaaaaaaaaaaaaaaaaaaaaaaaaaaaaaaaaaaaaaaaaaaaaaaaa

SEQ ID NO: 20045 - RNA, 2031 nt, Artificial Sequence
  mRNA product Design a-2 (A100) comprising derived and/or modified sequence from LASV(GA391;Clade III)__CAA36646__SP-HsALB_NP(2-570) (opt5)
aggagaguccgcucagccagguugcagaagcggcuuagcguguguccuaaucuucucucugcguguagguaggccugugccgcaaacaagcuuaccaugaagugggugaccuucaucagccugcucuuucuguucuccucugccuacagcagcgccuccaaggaggugagaucuuuccuguggacccagagccuccggcgcgaacuguccggcuacugcucuaacaucaaacuucaagucguuaaggacgcucaggcccugcuccacgggcuggauuuuagcgagguguccaaugugcagagacuuaugcggaaacagaagcgcgacgauggagaccugaaaagacuccgggaucugaaccaagcggucaauaaccugguggaacucaagucuacacagcagaaaagcguucugcgcgugggcacgcuuuccagcgacgaucugcucauucuggcugccgaccuugagaaacugaagucuaaagucaccagaacagaacggccccucuccagcgggguguauaugggaaaucugucuucccagcaacuggaucagcgcagagcccuccugaacaugaucggcaugaccgggguuagcggaggcggcaagggggcuucugacggaauugugcgggucugggaugugaaaaaugccgagcuucugaacaaucaguucggcacaaugccuucccucacccuggcuugucuuacaaagcaggggcaaguggaccugaacgaugccguccaggcgcucaccgaccugggacugaucuacacggccaaguauccgaauagcuccgaccucgaucgccugucucagagccaucccauucuuaacaugaucgacaccaaaaaguccagccugaauaucucuggcuacaacuuuucccucggggcugccguuaaagcuggagccugcaugcuggauggcggcaauaugcuugagacaauuaaggugagcccucaaaccauggacgggauccugaaaucuauucucaaggugaaaaagagccugggaauguucgucuccgauacacccggcgaaagaaacccuuaugagaacauccuguacaagauuugucucucuggggacggauggcccuauaucgcgagccggaccuccauugugggccgcgccugggaaaauacgguuguggaucuggagcaggacaacaaaccucagaagaucgggaauggaggcagcaacaaaucucuucaguccgcuggcuuugccgcugggcugacauacagccaacucaugacccugaaggauuucaaaugcuuuaaucugaucccgaacgccaagacauggauggacauugagggaagacccgaagauccugucgagaucgcccuuuaccagcccucuuccggcuguuaugugcacuucuuucgggaaccuaccgaccucaagcaguucaaacaggacgcuaaguacagccaugggauugauguuaccgaccuguuugcggcccaacccggacugacauccgcugugaucgaggcccucccgagaaauauggucauuacgugccagggcucugaagauauccgcaaacugcuugagagccaggggcggagagacaucaagcugauugauaucacccucuccaaagccgacucucgcaaguucgagaacgcugugugggaucaguuuaaggaccugugucacaugcauacaggcgucgugguugaaaagaagaaacggggaggcaaggaggaaauuaccccucacugcgcccugauggauuguaucauguucgacgcggcugugagcgggggacuugaugccaaaguccucagagugguucugccccgcgacaugguguuccggacauccaccccuaaggucgugcugugaggacuagucccuguucccagagcccacuuuuuuuucuuuuuuugaaauaaaauagccugucuuucagaucuaaaaaaaaaaaaaaaaaaaaaaaaaaaaaaaaaaaaaaaaaaaaaaaaaaaaaaaaaaaaaaaaaaaaaaaaaaaaaaaaaaaaaaaaaaaaaaaaaaaa

SEQ ID NO: 20046 - RNA, 2028 nt, Artificial Sequence
  mRNA product Design a-2 (A100) comprising derived and/or modified sequence from LASV(AV;Clade V)__CCA30315__SP-HsALB_NP(2-569) (opt5)
aggagaguccgcucagccagguugcagaagcggcuuagcguguguccuaaucuucucucugcguguagguaggccugugccgcaaacaagcuuaccaugaagugggugaccuucaucagccugcucuuucuguucuccucugccuacagcagcgccuccaaggaggugaaaucuuuccuguggacccagagccucagacgggaacuguccggcuacugcucuaacaucaaacuucaagucguuaaggacgcucaggcccugcuccacgggcuggauuuuagcgagguguccaaugugcagcgccuuaugagaaagcagcggcgcgacgauucugaccugaaaagacuccgggaucugaaccaagcggucaauaaccugguggaacucaagagcacacagcagaaguccguucugcgcgugggaacgcuuagcucugacgaucugcucacccuggcugccgaccuugagaaacugaaguccaaagucacaagaaccgaacggccccucagcucuggcguguauauggggaaucuguccagccagcaacuggaucagcgcagagcccuccugaaccuuauuggaaugacaaauggcucucaggggucccaggcuggacgggacggcguugugcgcgucugggaugugaagaacgccgagcugcucaauaaccaauucggcaccaugccuagccugacacuugcuugucugaccaaacagggacagguggaccucaaugaugucguucaagcccugacggaccuggggcucaucuacaccgcgaaguauccgaacacauccgaccuggauagacuuacccagucucaucccauucugaauaugaucgacacaaagaaaagcucccucaacauuagcggcuacaauuuuucucugggggccgcugugaaggccggagcuugcaugcuugauggcgggaacaugcuggagaccaucaaaguguccccucagagcauggacggaauccucaagucuauucugaaagucaagcgggcccugggcauguucgugagcgauacgcccggcgaacgcaacccuuaugagaauauccucuacaaaauuugucuguccggggacggauggcccuauaucgcgucuagaacaagcauuguuggccgggccugggaaaacaccguggucgaucuugagacagacgggaagccucagaagaucggauccggcaauagcaacaaaucucugcaauccgcuggguuuagcgccggacucaccuacucucagcugaugacccugaaggaugcuaugcuucagcucgacccgaaugccaaaacauggauggauauugagggcagacccgaagacccuguggagguugcccuguaccagcccaucuccggcugcuauauccacuucuuucgcgaaccuacggaccugaagcaauucaaacaggaugcuaaguacagccaugggauugacaucgcggaucucuuugccgcucagcccggacugaccuccgccgugauugaggcccuuccgcggaacauggucaucacaugucagggcucugaagacauuaagaaacugcucgagagccaagggagaaaggauaucaaacugaucgacauugcucuguccaagaucgauucucgcaaauucgagaaugccgugugggaccaguauaaggaucuuugccacaugcauaccggagucgugguugaaaagaaaaagcggggcgggaaagaggaaauuacaccucacugugcgcucauggacugcaucauguuugaugcugccgugagcggcggacugaacacccugguccucagagccgugcugccccgcgacaugguuuuccggacguccacaccuagagugguccuuugaggacuagucccuguucccagagcccacuuuuuuuucuuuuuuugaaauaaaauagccugucuuucagaucuaaaaaaaaaaaaaaaaaaaaaaaaaaaaaaaaaaaaaaaaaaaaaaaaaaaaaaaaaaaaaaaaaaaaaaaaaaaaaaaaaaaaaaaaaaaaaaaaaaaa

SEQ ID NO: 20047 - RNA, 2028 nt, Artificial Sequence
  mRNA product Design a-2 (A100) comprising derived and/or modified sequence from LASV(Togo/2016/7082;Clade VI)__AMR44578__SP-HsALB_NP(2-569) (opt5)
aggagaguccgcucagccagguugcagaagcggcuuagcguguguccuaaucuucucucugcguguagguaggccugugccgcaaacaagcuuaccaugaagugggugaccuucaucagccugcucuuucuguucuccucugccuacagcagcaacuccaaggaggugaaaucuuuccuguggacccagagccucagacgggaacuguccggcuacugcucuaauaucaaacuucaagucguuaaagacgcccaggcucugcuccacgggcuggauuuuagcgagguguccaacgugcagcgccuuaugagaaagcagaaacgggacgauggagaccugaagcgccucagagaucugaaucaagccgucaacaaucugguggaacucaagucuguucagcagaaaagcauucugcgggugggcacacuuacguccgacgaucugcucacccuggcggcugaccuugagaagcugaaaagcaaggucacacgcaccgaaagaccccucucuuccgggguguauaugggaaaccugagcucucagcaacuggaucagcggcgcgcccuccuguccaugaucggcaugagcgggggaaaucagaacucucagccuaaaggcgacggcguugugagagucugggaugugaagaaugccgaccuucugaacaaucaauucgggacaaugccgucccucacccuggcuugucuuacaaagcagggacagguggaucugaacgacgccguccaagcucucaccgaccugggccugauuuacacggccaaauaucccaauagcuccgaucucgaccggcugucucagagccauccuauccuuaacaugauugauaccaagaaauccagccugaauaucucuggguacaacuuuucccucggagcggccaucaagacaggcgcuugcaugcuggacgggggaaacaugcuugagaccauuaaaguuacaccccagaccauggauggcauccucaagagcauucugaaagugaagcgcucucugggcauguucaucagcgacacgccuggggagagaaaucccuaugaaaacauucuguacaagaucugucucuccggagauggcuggccuuauauugccucucggacagcuaucaucgggcgcgccugggagaauaccguggucgaccuggaaagcgauuccaaaccgcagaagauuggaagcaacggcucuaauaaaucccuucaaagcgcgggguuugcccccggacugacauacucucagcucaugacccugaaggacuccaugcugcagcuugauccuaacgcuaaaaccuggaucgacauugagggcagacccgaggacccuguggaaguugcccucuuccagcccaucagcggcugcuacauucacuuuuuccgggagccgacagaucugaagcaauuuaagcaggacgcuaaauauucccaugggaucgaugugacggaccuguucgccgcccagccuggacucaccucugcugucaucgaagcgcugcccagaaauauggugcuuacaugucagggcagcgaugacauuaagaaacugcucgauucccaagggcgccgggacaucaagcugauugauguuucucugaacaaaaucgacagcagaaaguuugagaaugccgugugggaucaguacaaggaccuuugccacaugcauaccggagucguggucgaaaagaagaaaaagggcgggaaagaggagauuacaccucacugugcucuccuggauugcaucauguucgacgccgccguguccggcggacugaacgcuaccguucuccgcgccgugcugccccgggacauggucuuuagaacgagcucucccaaggugguucuuugaggacuagucccuguucccagagcccacuuuuuuuucuuuuuuugaaauaaaauagccugucuuucagaucuaaaaaaaaaaaaaaaaaaaaaaaaaaaaaaaaaaaaaaaaaaaaaaaaaaaaaaaaaaaaaaaaaaaaaaaaaaaaaaaaaaaaaaaaaaaaaaaaaaaa

SEQ ID NO: 20048 - RNA, 2028 nt, Artificial Sequence
  mRNA product Design a-2 (A100) comprising derived and/or modified sequence from LASV(KAK-428;Clade n.d. (VII))__ANH09741__SP-HsALB_NP(2-569) (opt5)
aggagaguccgcucagccagguugcagaagcggcuuagcguguguccuaaucuucucucugcguguagguaggccugugccgcaaacaagcuuaccaugaagugggugaccuucaucagccugcucuuucuguucuccucugccuacagcagcaacuccaaggaggugaaaucuuuccuguggacccagagccucagacgggaacuguccggcuacugcacaaauaucaaacuucaagucguuaaggacgcccaggcucugcuccacgggcuggauuuuucugaggugagcaacgugcagcgccuuaugagaaagcagaaacgggacgauaaugaccugaagcgccucagagaucugaaccaagccgucaauaaccugguggaacucaaguccguucagcagaaaucugugcugaaggucggaacgcuuaauagcgacgaucugcucacccuggcggcugaccuugagaaacugaaguccaaagugguucggacagaacgcccccucagcucuggcguguauauggggaaccuguccagccagcaacuggaucagagacgggcccuccugaauaugauuggaauggccggcgggucucagggaaaccagccuucccgcgacggcgucgugagagugugggaugucaagaaugcugaccuucugaacaaucaauucggcaccaugccgagccucacacuggccugucuuaccaagcaggggcagguugaucugaacgacguggugcucgcucugacagaccugggacucaucuacaccgccaaauaucccaauucuuccgaucuggaccggcuuagccaaaaccauccuguccugaacaugauugaugugaauaaguccucucucaacaucagcggcuacaauuuuucccugggggcggccguuaaagcuggagccugcaugcuugacggcgggaacaugcuggagacgauuaagaucagcccccagaccguggauggaauccucaaaucuauucugaaggucaaacgcgcucugggcauguucguguccgacacaccuggcgagagaaaucccuaugaaaacauccucuacaagguuugucugagcgggaauggauggccuuauauugccucucggaccagcaucgugggccgcgcgugggagaacacagucguggaucuugaauccaauaagaaccagccgaaagucgggaauaacggaucuaauaagaugcugcagagcuccggcuuugccaccgggcucacguacagccaacugaugacacugagagacucuaugcuucagcucgaucccaccgcuaaaacauggauugacaucgagggacggccugaggaucccguggaacuggcccuguuccagccuuccagcggcugcuacauucacuuuuucagagagcccaccgaccucaagcaguuuaaacaagacgcuaaguauucucauggcaucgauguuaacgaccuguucuccgcccagccggggcuuaccagcgccgugcuggaagcucucccucgcaauaugguccugacaugucagggauccgaugacauccggaagcugcuugauucucaggacagaaaagauauuaagcucaucgacauuagccuguccaaagcggaugcccgcaaguuugagaacgacgugugggaucaauucaaagaccugugccacaugcauacgggcaucguuguggaaaagaagaaaaagggagggaaacaggagaugacaccccacugugcucuccuggauugcauuauguuugacgccgccgucucuggcgggcuuaacgugccuacccugcgggcugugcuccccaccgacaugguuuucagaacaaucaccacgaaggucgugcugugaggacuagucccuguucccagagcccacuuuuuuuucuuuuuuugaaauaaaauagccugucuuucagaucuaaaaaaaaaaaaaaaaaaaaaaaaaaaaaaaaaaaaaaaaaaaaaaaaaaaaaaaaaaaaaaaaaaaaaaaaaaaaaaaaaaaaaaaaaaaaaaaaaaaa

SEQ ID NO: 20049 - RNA, 2028 nt, Artificial Sequence; identical to SEQ ID NO: 20043
  mRNA product Design a-2 (A100) comprising derived and/or modified sequence from LASV(Pinneo-NIG-1969;Clade I)__AIT17837__SP-HsALB_NP(2-569) (opt5)

SEQ ID NO: 20050 - RNA, 2028 nt, Artificial Sequence
  mRNA product Design a-2 (A100) comprising derived and/or modified sequence from LASV(ISTH0009-NIG-2011;Clade II)__AIT17405__SP-HsALB_NP(2-569) (opt5)
aggagaguccgcucagccagguugcagaagcggcuuagcguguguccuaaucuucucucugcguguagguaggccugugccgcaaacaagcuuaccaugaagugggugaccuucaucagccugcucuuucuguucuccucugccuacagcagcguguccaaggaggucaaaucuuuccuguggacccagagccucagacgggaacuguccggcuacugcucuaacaucaaacuucaaguugugaaggacgcccaggcucugcuccacgggcuggauuuuagcgagguguccaauguccagcgccuuaugagaaagcagaaacgggacgauucugaccugaagcgccucagagaucugaaccaagccgugaauaaccugguugaacucaagagcacacagcagaaauccauucugcgggugggaacgcuuaccagcgacgaucugcucacacuggcggcugaccuugagaagcugaaaucuaaggucauccgcaccgaaagaccccucuccagcggcguguauauggggaaucugucuacacagcaacuggagcagcggcgcgcccuccugaacaugauuggaaugguuggcggggcccagggaacccagccuggcagagauggcgugguccgggugugggacgugaaaaauccggaucuucugaacaaucaauucgggacaaugcccucccucacccuggcuugucuuacgaagcagggacaggucgaccugaacgaugccguucucgcucugaccgaccugggccucaucuacacagccaaguauccuaauagcucugaccuggaucgccuuucccaaagccaucccauucugaacaugguggacaucaaaaaguccucucucaauaucagcggguacaacuuuucccugggagcggccgugaaagcuggcgccugcaugcuugaugggggaaauaugcuggagaccauuaaggucacaccucagaccauggacggcauccucaaaagcauucugaaggugaaaagaucucugggcauguucguuuccgauacgcccggggaacggaacccuuaugagaacauccucuacaagauuugucugagcggagacggcuggccguauaucgcuucucgcacaagcauuguggggagagccugggaaaauaccacagucgaucuugaguccgacggaaagccccagaaagugggcucugcggggagcaacaagucccugcagagcgccggauuuccuaccggccucaccuacucucaacugaugacacugaaagauuccaugaugcagcuugaccccagcgcuaagacguggaucgauaucgagggccggccugaagaccccguugagauugcccucuaccagccgaugucugggugcuauauccacuucuuuagagaaccuaccgaccugaaacaguucaagcaagaugcuaaguacucccauggaauugacguggccgaucuguuucccgcccagccuggccucacaagcgcugucaucgaggcgcugccccgcaauauggugcuuaccugucagggguccgacgauauuaaacggcugcucgacucucagggaagacgcgauaucaagcugaucgacauugcccugagcaaagcugauucccggagauucgaaaacgccgucugggaccaaugcaaggaucuuugucacaugcauacaggcgugguuguggagaaaaagaagcgcgggggcaaagaggaaaucacgccccacugcgcccucauggacuguauuauguaugaugcugccgucucuggaggccugaauaucccugugcugcgggcgguucucccgagagacaugguguuucgcaccagcucccccaaggucgugcugugaggacuagucccuguucccagagcccacuuuuuuuucuuuuuuugaaauaaaauagccugucuuucagaucuaaaaaaaaaaaaaaaaaaaaaaaaaaaaaaaaaaaaaaaaaaaaaaaaaaaaaaaaaaaaaaaaaaaaaaaaaaaaaaaaaaaaaaaaaaaaaaaaaaaa

SEQ ID NO: 20051 - RNA, 2028 nt, Artificial Sequence
  mRNA product Design a-2 (A100) comprising derived and/or modified sequence from LASV(ISTH2010-NIG-2012;Clade II)__AIT17483__SP-HsALB_NP(2-569) (opt5)
aggagaguccgcucagccagguugcagaagcggcuuagcguguguccuaaucuucucucugcguguagguaggccugugccgcaaacaagcuuaccaugaagugggugaccuucaucagccugcucuuucuguucuccucugccuacagcagcgccuccaaggaggugaaaucuuuccuguggacccagagccucagacgggaacuguccggcuacugcucuaacaucaaacuucaagucguuaaggacgcucaggcccugcuccacgggcuggauuuuagcgagguguccaaugugcagcgccuuaugagaaagcagaaacgggacgauucugaccugaagcgccucagagaucugaaccaagcggucaauaaccugguggaacucaagagcacacagcagaaauccauucugcggguuggaacgcuuaccagcgacgaucugcucacacuggcugccgaccuugagaagcugaaaucuaaggugauccgcaccgaaagaccccucuccagcggcgucuauauggggaaucugucuacacagcaacuggagcagcggcgcgcccuccugaaccuuauuggaauggugggcggggcucagggaacccagccuggcagagauggcguugugcgggucugggacgugaaaaauccggaucugcucaacaaucaauucgggacaaugcccucccugacccuugccugucugacgaagcagggacagguggaccucaacgaugcuguccuggcccugaccgaccucggccugaucuacacagcgaaguauccuaauagcucugaccuugaucgccugucccaaagccaucccauucucaacaugguugacaccaaaaaguccucucugaauaucagcggguuuaacuucucccuuggagccgcugugaaagccggcgcuugcaugcuggaugggggaaauaugcucgagacaaucaaggugaccccucagacgauggacggcauucugaaaagcauccugaaggucaaaaagucucucggcauguuuguguccgauacacccggggaaagaaacccuuacgagaacauucuguauaagaucugucuuagcggagacggcuggccguacauugccucucggaccagcaucguugggcgcgcgugggaaaauacaaccguggaucuggaguccgacggaaaaccccacaaggucggcaccgccgggucuaacaaaagccuccaguccgcuggauucccuacaggccugacguauagccagcugaugacccuuaaggauucuaugaugcaacucgaccccuccgccaaaacauggauugauaucgagggcagaccugaagaccccguggagaucgcucuguaccagccgaugagcgggugcuacauucacuuuuuccgggaaccuaccgaccugaagcaguuuaagcaggaugccaaauauucucauggaaucgacguugccgaucucuuccccgcucaaccuggccugacauccgcggugauugaggcccuucccagaaauaugguccugaccugucaggggagcgacgauaucaagcgccuccuggacucccagggacggagagauauuaaacugaucgacaucgcucuuucuaaggccgauagccgccgguuugaaaacgccgugugggaccagugcaaagaucucugucauaugcacacgggcgucgugguugagaagaagaaaagagggggcaaggaggaaauuacaccccacugcgcucugauggacuguaucauguacgaugccgcgguguccggaggccugaauauuccuguccuccgcgcugugcugccgcgggacaugguuuucagaaccucuagccccaaagugguccuuugaggacuagucccuguucccagagcccacuuuuuuuucuuuuuuugaaauaaaauagccugucuuucagaucuaaaaaaaaaaaaaaaaaaaaaaaaaaaaaaaaaaaaaaaaaaaaaaaaaaaaaaaaaaaaaaaaaaaaaaaaaaaaaaaaaaaaaaaaaaaaaaaaaaaa

SEQ ID NO: 20052 - RNA, 2028 nt, Artificial Sequence
  mRNA product Design a-2 (A100) comprising derived and/or modified sequence from LASV(Lassa virus/H.sapiens-wt/NGA/2015/ISTH_0543;Clade II)__AVO03640__SP-HsALB_NP(2-569) (opt5)
aggagaguccgcucagccagguugcagaagcggcuuagcguguguccuaaucuucucucugcguguagguaggccugugccgcaaacaagcuuaccaugaagugggugaccuucaucagccugcucuuucuguucuccucugccuacagcagcgccuccaaggaggugaaaucuuuccuguggacccagagccucagacgggaacuguccggcuacugcucuaacaucaaacuucaagucguuaaggacgcucaggcccugcuccacgggcuggauuuuagcgagguguccaaugugcagcgccuuaugagaaagcagaaacgggacgauucugaccugaagcgccucagagaucugaaccaagcggucaauaaccugguggaacucaagagcacacagcagaaauccauucugcggguuggaacgcuuaccagcgacgaucugcucacacuggcugccgaccuugagaagcugaaaucuaaggugauccgcaccgaaagaccccucuccagcggcgucuauauggggaaucugucuacacagcaacuggagcagcggcgcgcccuccugaacaugauuggaauggugggcggggcucagggaacccagccuggcagagauggcguugugcgggucugggacgugaaaaauccggaucuucugaacaaucaauucgggacaaugcccucccucacccuggccugucuuacgaagcagggacagguggaccugaacgaugcuguccucgcccugaccgaccugggccucaucuacacagcgaaguauccuaauagcucugaccuggaucgccuuucccaaagccaucccauucugaacaugguugacaccaaaaaguccucucucaauaucagcggguacaacuuuucccugggagccgcugugaaagccggcgcuugcaugcuugaugggggaaauaugcuggagacaaucaaggugaccccucagacgauggacggcauucucaaaagcauccugaaggucaaaaagucucugggcauguucguguccgauacacccggggaaagaaacccuuaugagaacauucucuacaagaucugucugagcggagacggcuggccguauauugccucucggaccagcaucguugggcgcgcgugggaaaauacaaccguggaucuugaguccgacggaaaaccccagaaggucggcucugccgggagcaacaaaucccugcagagcgcuggauuuccuaccggccucacauacucucaacugaugacgcugaaggauuccaugaugcagcuugaccccagcgccaaaaccuggauugauaucgagggcagaccugaagaccccguggagaucgcucucuaccagccgaugucugggugcuauauucacuucuuucgggaaccuacagaccugaagcaguucaagcaagaugccaaauacucccauggaaucgacguugccgaucuguuucccgcucagccuggccucaccagcgcggugauugaggcccugcccagaaauaugguccuuacaugucagggguccgacgauaucaagcgccugcucgacucucagggacggaaagauauuaagcugaucgacaucgcucugagcaaagccgauuccagacgcuucgaaaacgccgugugggaccaaugcaaggaucuuugucacaugcauaccggcgucgugguugagaagaaaaagagagggggcaaagaggaaauuacgccccacugcgcucucauggacuguaucauguaugaugccgcggugucuggaggccugaauauuccuguccugcgggcugugcucccgcgcgacaugguuuuucggacaagcucccccaaggugguccugugaggacuagucccuguucccagagcccacuuuuuuuucuuuuuuugaaauaaaauagccugucuuucagaucuaaaaaaaaaaaaaaaaaaaaaaaaaaaaaaaaaaaaaaaaaaaaaaaaaaaaaaaaaaaaaaaaaaaaaaaaaaaaaaaaaaaaaaaaaaaaaaaaaaaa

SEQ ID NO: 20053 - RNA, 2028 nt, Artificial Sequence
  mRNA product Design a-2 (A100) comprising derived and/or modified sequence from LASV(Lassa virus/H.sapiens-wt/NGA/2016/ISTH_0009;Clade II)__AVO03572__SP-HsALB_NP(2-569) (opt5)
aggagaguccgcucagccagguugcagaagcggcuuagcguguguccuaaucuucucucugcguguagguaggccugugccgcaaacaagcuuaccaugaagugggugaccuucaucagccugcucuuucuguucuccucugccuacagcagcgccuccaaggaggugaaaucuuuccuguggacccagagccucagacgggaacuguccggcuacugcucuaacaucaaacuucaagucguuaaggacgcucaggcccugcuccacgggcuggauuuuagcgagguguccaaugugcagcgccuuaugagaaagcagaaacgggacgauucugaccugaagcgccucagagaucugaaccaagcggucaauaaccugguggaacucaagagcacacagcagaaauccauucugcggguuggaacgcuuaccagcgacgaucugcucacacuggcugccgaccuugagaagcugaaaucuaaggugauccgcaccgaaagaccccucuccagcggcgucuauauggggaaucugucuacacagcaacuggagcagcggcgcgcccuccugaacaugauuggaauggugggcggggcucagggaacccagccuggcagagauggcguugugcgggucugggacgugaaaaauccggaucuucugaacaaucaauucgggacaaugcccucccucacccuggccugucuuacgaagcagggacagguggaccugaacgaugcuguccucgcccugaccgaccugggccucaucuacacagcgaaguauccuaauagcucugaccuggaucgccuuucccaaagccaucccauucugaacaugguugacaccaaaaaguccucucucaauaucagcggguacaacuuuucccugggagccgcugugaaagccggcgcuugcaugcuugaugggggaaauaugcuggagacaaucaaggugaccccucagacgauggacggcauucucaaaagcauccugaaggucaaaaagucucugggcauguucguguccgauacacccggggaaagaaacccuuaugagaacauucucuacaagaucugucugagcggagacggcuggccguauauugccucucggaccagcaucguugggcgcgcgugggaaaauacaaccguggaucuugaguccgacggaaaaccccagaaggucggcucugccgggagcaacaaaucccugcagagcgcuggauuuccuaccggccucacauacucucaacugaugacgcugaaggauuccaugaugcagcuugaccccagcgccaaaaccuggauugauaucgagggcagaccugaagaccccguggagaucgcucucuaccagccgaugucugggugcuauauucacuucuuucgggaaccuacagaccugaagcaguucaagcaagaugccaaauacucccauggaaucgacguugccgaucuguuucccgcucagccuggccucaccagcgcggugauugaggcccugcccagaaauaugguccuuacaugucagggguccgacgauaucaagcgccugcucgacucucagggacggagagauauuaaacugaucgacaucgcucugagcaaggccgauucccgccgguucgaaaacgccgugugggaccaaugcaaagaucuuugucacaugcauaccggcgucgugguugagaagaagaaaagagggggcaaggaggaaauuacgccccacugcgcucucauggacuguaucauguaugaugccgcggugucuggaggccugaauauuccuguccugcgcgcugugcucccgcgggacaugguuuuuagaacaagcucccccaaagugguccugugaggacuagucccuguucccagagcccacuuuuuuuucuuuuuuugaaauaaaauagccugucuuucagaucuaaaaaaaaaaaaaaaaaaaaaaaaaaaaaaaaaaaaaaaaaaaaaaaaaaaaaaaaaaaaaaaaaaaaaaaaaaaaaaaaaaaaaaaaaaaaaaaaaaaa

SEQ ID NO: 20054 - RNA, 2028 nt, Artificial Sequence
  mRNA product Design a-2 (A100) comprising derived and/or modified sequence from LASV(Lassa virus/H.sapiens-wt/NGA/2016/ISTH_0017;Clade II)__AVO03568__SP-HsALB_NP(2-569) (opt5)
aggagaguccgcucagccagguugcagaagcggcuuagcguguguccuaaucuucucucugcguguagguaggccugugccgcaaacaagcuuaccaugaagugggugaccuucaucagccugcucuuucuguucuccucugccuacagcagcgccuccaaggaggugaaaucuuuccuguggacccagagccucagacgggaacuguccggcuacugcucuagcaucaaacuucaagucguuaaggacgcucaggcccugcuccacgggcuggauuuuuccgaggugucuaacgugcagcgccuuaugagaaagcagaaacgggacgauagcgaccugaagcgccucagagaucugaaucaagcggucaacaaucugguggaacucaaguccacacagcagaaaagcauucugcggguuggaacgcuuaccucugacgaucugcucacacuggcugccgaccuugagaagcugaaauccaaggugauccgcaccgaaagaccccucagcucuggcgucuauauggggaaccuguccacacagcaacuggagcagcggcgcgcccuccugaauaugauuggaauggcuggcggggcccagggaacccagccuggcagagauggcgugguucgggugugggacgucaaaaacccggaucuucugaauaaccaauucgggacaaugcccagccucacccuggcuugucuuacgaagcagggacagguggaccugaaugaugccgugcucgcgcugaccgaccugggccucaucuacacagccaaguauccuaacucuuccgaccuggaucgccuuagccaaucccaucccauucugaauauggucgacaccaaaaagucuagccucaacaucuccggguacaauuuuagccugggagcugccguuaaagcuggcgccugcaugcuugaugggggaaacaugcuggagacaaucaaggugaccccucagacgauggacggcauucucaaaucuauccugaaggugaaaagaucccugggcauguucgucagcgaugcgcccggggaacggaauccuuaugagaacauucucuacaagaucugucugucuggagacggcuggccguauauugccagccgcacauccaucguggggagagcuugggaaaacaccacaguugaucuugagucugacggaaagccccagaaagugggcgccaccgggagcaauaagucccugcagagcgcuggauuuccuaccggccucacauacucucaacugaugacgcugaaagauuccaugaugcagcuugaccccagcgccaagaccuggauugauaucgagggccggccugaagaccccgucgagguggcccucuaccagccgguuucugggugcuauauccacuucuuuagagaaccuacagaccugaaacaguucaagcaagaugcuaaguacucccauggaauugacguggcggaucuguuucccgcccagccuggccucaccagcgcugucaucgaggcccugccccgcaacauggugcuuacaugucagggguccgacgauauuaaaaagcugcucgacucucagggacggaaagauaucaagcugauugacaucgcccugagcaaagcugauuccagacgcuucgaaaaugccgucugggaccaaugcaaggaucuuugucacaugcauaccggcgugguuguggagaagaaaaagagagggggcaaagaggaaaucacgccccacugcgcgcucauggacuguauuauguaugaugcugccgucucuggaggccugaacaucccugugcugcgggccguucucccgcgcgacaugguguuucggacaagcucccccaaggucgugcugugaggacuagucccuguucccagagcccacuuuuuuuucuuuuuuugaaauaaaauagccugucuuucagaucuaaaaaaaaaaaaaaaaaaaaaaaaaaaaaaaaaaaaaaaaaaaaaaaaaaaaaaaaaaaaaaaaaaaaaaaaaaaaaaaaaaaaaaaaaaaaaaaaaaaa

SEQ ID NO: 20055 - RNA, 2028 nt, Artificial Sequence
  mRNA product Design a-2 (A100) comprising derived and/or modified sequence from LASV(Lassa virus/H.sapiens-wt/NGA/2018/ISTH_0959;Clade II)__AVV65100__SP-HsALB_NP(2-569) (opt5)
aggagaguccgcucagccagguugcagaagcggcuuagcguguguccuaaucuucucucugcguguagguaggccugugccgcaaacaagcuuaccaugaagugggugaccuucaucagccugcucuuucuguucuccucugccuacagcagcgccuccaaggaggugaaaucuuuccuguggacccagagccucagacgggaacuguccggcuacugcucuaacaucaaacuucaagucguuaaggacgcucaggcccugcuccacgggcuggauuuuagcgagguguccaaugugcagcgccuuaugagaaagcagaaacgggacgauucugaccugaagcgccucagagaucugaaccaagcggucaauaaccugguggaacucaagagcacccagcagaaauccauucugcggguuggaacgcuuaccagcgacgaucugcucacacuggcugccgaccuugagaagcugaaaucuaaggugauccgcaccgaaagaccccucuccagcggcgucuauauggggaaucugucuacacagcaacuggagcagcggcgcgcccuccugaaccuuauuggaauggugggcggggcucagggaacccagccuggcagagauggcguugugcgggucugggacgugaaaaauccggaucugcucaacaaucaauucgggacaaugcccucccugacccuugccugucugacgaagcagggacagguggaccucaacgaugucguucuggcucugaccgaccucggccugaucuacacagccaaguauccuaauagcucugaccuugaucgccugucccaaagccaucccauucucaacaugguggacaccaaaaaguccucucugaauaucagcggguuuaacuucucccuuggagcggccgugaaagcuggcgccugcaugcuggaugggggaaauaugcucgagacaaucaaggucaccccucagacgauggacggcauucugaaaagcauccugaaggugaaaaagucucucggcauguuuguuuccgauacacccggggaaagaaacccuuacgagaacauucuguauaagaucugucuuagcggagacggcuggccguacauugcuucucggaccagcaucguggggcgcgccugggaaaauacaaccgucgaucuggaguccgacggaaaaccccacaaggugggcaccgcggggucuaacaaaagccuccaguccgccggauucccuacaggccugacguauagccagcugaugacccuuaaggauucuaugaugcaacucgaccccuccgcuaaaacauggauugauaucgagggcagaccugaagaccccguugagaucgcccuguaccagccgaugagcgggugcuacauucacuuuuuccgggaaccuaccgaccugaagcaguuuaagcaggaugcuaaauauucucauggaaucgacguggccgaucucuuccccgcccaaccuggccugacauccgcugucauugaggcgcuucccagaaauauggugcugaccugucaggggagcgacgauaucaagcgccuccuggacucccagggacggaaagauauuaagcugaucgacaucgcccuuucuaaaacggauagcagacgcuuugaaaacgcugucugggaccagugcaaggaucucugucauaugcacacaggcgugguuguggagaagaaaaagagagggggcaaagaggaaauuacaccccacugcgcccugauggacuguaucauguacgaugccgcugucuccggaggccugaauauuccugugcuccgggccguucugccgcgcgacaugguguuccggaccucuagccccaaggucgugcuuugaggacuagucccuguucccagagcccacuuuuuuuucuuuuuuugaaauaaaauagccugucuuucagaucuaaaaaaaaaaaaaaaaaaaaaaaaaaaaaaaaaaaaaaaaaaaaaaaaaaaaaaaaaaaaaaaaaaaaaaaaaaaaaaaaaaaaaaaaaaaaaaaaaaaa

SEQ ID NO: 20056 - RNA, 2028 nt, Artificial Sequence
  mRNA product Design a-2 (A100) comprising derived and/or modified sequence from LASV(LASV003-NIG-2008;Clade II)__AIT17581__SP-HsALB_NP(2-569) (opt5)
aggagaguccgcucagccagguugcagaagcggcuuagcguguguccuaaucuucucucugcguguagguaggccugugccgcaaacaagcuuaccaugaagugggugaccuucaucagccugcucuuucuguucuccucugccuacagcagcgccuccaaggaggugaaaucuuuccuguggacccagagccucagacgggaacuguccggcuacugcucuagcaucaaacuucaagucguuaaggacgcucaggcccugcuccacgggcuggauuuuuccgaggugucuaacgugcagcgccuuaugagaaagcagaaacgggacgauagcgaccugaagcgccucagagaucugaaucaagcggucaacaaucugguggaacucaaguccacccagcagaaaagcguucugcgggugggaacgcuuaccucugacgaucugcucacacuggcugccgaccuugagaagcugaaauccaaggucauucgcaccgaaagaccccucagcucuggcguguauauggggaaccuguccgcccagcaacuggagcagcggcgcacacuccugaauaugaucggaaugguuggcggggcucagggaacccagccuggcagagauggcgugguccgggugugggacgugaaaaacccggaucuucugaauaaccaauucgggacaaugcccagccucacccuggccugucuuacgaagcagggacaggucgaccugaaugauguugugcucgcucugaccgaccugggccucauuuacacagccaaguauccuaacucuuccgaccuggaucgccuuagccaaucccaucccauccugucuaugguggacaccaaaaagagcucccucaauauuagcggguacaacuuuucucugggagcggccgucaaagcuggcgccugcaugcuugaugggggaaauaugcuggagacaaucaaggugaccccucagacgauggacggcauccucaaauccauucugaagguuaaaaagagccugggcauguucgugucugauacacccggggaaagaaacccuuaugagaauauccucuacaagauuugucugagcggagacggcuggccguauaucgcuucccggaccucuauugucgggcgcgccugggaaaacacaaccguggaucuugagagcgacggaaaaccccagaagguuggcaccgcgggguccaacaaaagccugcagucugccggauuuccuacaggccucacguacucccaacugaugacccugaaggauagcaugaugcagcuugaccccucugcuaaaacauggaucgauauugagggcagaccugaagaccccguggagaucgcccucuaccagccgauguccgggugcuauauccacuucuuucgggaaccuaccgaccugaagcaguucaagcaagaugcuaaauacagccauggaauugacgucacagaucuguuucccgcccagccuggccucaccuccgccgugaucgaggcucugcccagaaauaugguccuuacgugucaggggucugacgauauuaagcgccugcucgacagccagggacggagagauaucaaacugauugacaucgcgcuguccaaggccgauucucgccgguucgaaaacgcugugugggaccaaugcaaagaucuuugucacaugcauacaggcguuguggucgagaagaagaaaagagggggcaaggaggaaaucacaccccacugcgcccucauggacuguauuauguaugaugccgcugugagcggaggccugaauaucccuguucugcgcgccgugcucccgcgggacauggucuuuagaaccuccagccccaaaguggugcugugaggacuagucccuguucccagagcccacuuuuuuuucuuuuuuugaaauaaaauagccugucuuucagaucuaaaaaaaaaaaaaaaaaaaaaaaaaaaaaaaaaaaaaaaaaaaaaaaaaaaaaaaaaaaaaaaaaaaaaaaaaaaaaaaaaaaaaaaaaaaaaaaaaaaa

SEQ ID NO: 20057 - RNA, 2028 nt, Artificial Sequence
  mRNA product Design a-2 (A100) comprising derived and/or modified sequence from LASV(LASV035-NIG-2009;Clade II)__AIT17589__SP-HsALB_NP(2-569) (opt5)
aggagaguccgcucagccagguugcagaagcggcuuagcguguguccuaaucuucucucugcguguagguaggccugugccgcaaacaagcuuaccaugaagugggugaccuucaucagccugcucuuucuguucuccucugccuacagcagcgccuccaaggaggugaaaucuuuccuguggacccagagccucagacgggaacuguccggcuacugcucuagcaucaaacuucaagucguuaaagacgcucaggcccugcuccacgggcuggauuuuuccgaggugucuaacgugcagcgccuuaugagaaagcagaaacgggacgauagcgaccugaagcgccucagagaucugaaucaagcggucaacaaucugguggaacucaaguccacacagcagaaaagcauucugcggguuggaacgcuuaccucugacgaucugcucacacuggcugccgaccuugagaagcugaaauccaaggugauccgcaccgaaagaccccucagcucuggcgucuauauggggaaccuguccgcccagcaacuggagcagcggcgcgcucuccugaauaugauuggaauggugggcggggcccagggaacacagccuggcagagauggcguugugcgggucugggacgugaaaaacccggaucuucugaauaaccaauucgggaccaugcccagccucacacuggcuugucuuaccaagcagggacagguggaccugaaugaugccguccucgcgcugacggaccugggccucaucuacaccgccaaguauccuaacucuuccgaccuggaucgccuuagccaaucccaucccauucugaauaugguugacacaaagaagucuagccucaacaucuccggguacaauuuuagccugggagcugccgugaaagcuggcgccugcaugcuugaugggggaaacaugcuggagaccaucaaggugacaccucagaccauggacggcauucucaaaucuauccugaaggucaaaagaucccugggcauguucgugagcgauacgcccggggaacggaauccuuaugagaacauucucuacaagaucugucugucuggagacggcuggccguauauugcgagccgcacauccaucguugggagagccugggaaaacaccacaguggaucuugagucugacggaaagccccagaaagucggcaccaccgggagcaauaagucccugcagagcgcuggauuuccuacaggccucacguacucucaacugaugacccugaaagauuccaugaugcagcuugaccccagcgccaagacauggauugauaucgagggccggccugaagaccccguggagaucgcucucuaccagccgaugucugggugcuauauucacuucuuuagagaaccuaccgaccugaaacaguucaagcaagaugccaaguacucccauggaaucgacguugccgaucuguuucccgcucagccuggccucacaagcgcggugauugaggcccugccccgcaacaugguccuuaccugucagggguccgacgauaucaaaaagcugcucgacucucagggacggagagauauuaaacugaucgacaucgcucugagcaaggccgauucccgcaaauucgaaaaugccgugugggaccaaugcaaggaucuuugucacaugcauacgggcgucgugguugagaagaaaaagagagggggcaaagaggaaauuacaccccacugcgcucucauggacuguaucauguaugaugccgcggugucuggaggccugaacauuccuguccugcgggcugugcucccgcgcgacaugguuuuucggaccagcucccccaaggugguccugugaggacuagucccuguucccagagcccacuuuuuuuucuuuuuuugaaauaaaauagccugucuuucagaucuaaaaaaaaaaaaaaaaaaaaaaaaaaaaaaaaaaaaaaaaaaaaaaaaaaaaaaaaaaaaaaaaaaaaaaaaaaaaaaaaaaaaaaaaaaaaaaaaaaaa

SEQ ID NO: 20058 - RNA, 2028 nt, Artificial Sequence
  mRNA product Design a-2 (A100) comprising derived and/or modified sequence from LASV(LASV1000-NIG-2009;Clade II)__AIT17783__SP-HsALB_NP(2-569) (opt5)
aggagaguccgcucagccagguugcagaagcggcuuagcguguguccuaaucuucucucugcguguagguaggccugugccgcaaacaagcuuaccaugaagugggugaccuucaucagccugcucuuucuguucuccucugccuacagcagcgccuccaaggaggugaaaucuuuccuguggacccagagccucagacgggaacuguccggcuacugcucuaacaucaaacuucaagucguuaaggacgcucaggcccugcuccacgggcuggauuuuagcgagguguccaaugugcagcgccuuaugagaaagcagaaacgggacgauucugaccugaagcgccucagagaucugaaccaagcggucaauaaccugguggaacucaagagcacacagcagaaauccauucugcggguuggaacgcuuaccagcgacgaucugcucacacuggcugccgaccuugagaagcugaaaucuaaggugauccgcaccgaaagaccccucuccagcggcgucuauauggggaaucugucuacacagcaacuggagcagcggcgcgcccuccugaacaugauuggaauggugggcggggcucagggaacccagccuggcagagauggcguugugcgggucugggacgugaaaaauccggaucuucugaacaaucaauucgggacaaugcccucccucacccuggccugucuuacgaagcagggacagguggaccugaacgaugucguucucgcucugaccgaccugggccucaucuacacagccaaguauccuaauagcucugaccuggaucgccuuucccaaagccaucccauucugaacaugguggacaccaaaaaguccucucucaauaucagcggguacaacuuuucccugggagcggccgugaaagcuggcgccugcaugcuugaugggggaaauaugcuggagacaaucaaggucaccccucagacgauggacggcauucucaaaagcauccugaaggugaaaaagucucugggcauguucguuuccgauacacccggggaaagaaacccuuaugagaacauucucuacaagaucugucugagcggagacggcuggccguauauugcuucucggaccagcaucguggggcgcgccugggaaaauacaaccgucgaucuugaguccgacggaaaaccccagaaggugggcaccgcggggucuaacaaaagccugcaguccgccggauuuccuacaggccucacguacagccaacugaugacccugaaggauucuaugaugcagcuugaccccuccgcuaaaacauggauugauaucgagggcagaccugaagaccccguugagaucgcccucuaccagccggugagcgggugcuauauucacuucuuucgggaaccuaccgaccugaagcaguucaagcaagaugcuaaauacucucauggaaucgacgucgccgaucuguuucccgcccagccuggccucacauccgcugugauugaggcgcugcccagaaauaugguccuuaccugucaggggagcgacgauaucaagcgccugcucgacucccagggacggagagauauuaaacugaucgacaucgcccugucuaaggcugauagccgccgguucgaaaacgccgugugggaccaaugcaaagaucuuugucacaugcauacgggcguuguggucgagaagaagaaaagagggggcaaggaggaaauuacaccccacugcgcccucauggacuguaucauguaugaugcugccguguccggaggccugaauauuccuguucugcgcgcggugcucccgcgggacauggucuuuagaaccucuagccccaaaguggugcugugaggacuagucccuguucccagagcccacuuuuuuuucuuuuuuugaaauaaaauagccugucuuucagaucuaaaaaaaaaaaaaaaaaaaaaaaaaaaaaaaaaaaaaaaaaaaaaaaaaaaaaaaaaaaaaaaaaaaaaaaaaaaaaaaaaaaaaaaaaaaaaaaaaaaa

SEQ ID NO: 20059 - RNA, 2028 nt, Artificial Sequence
  mRNA product Design a-2 (A100) comprising derived and/or modified sequence from LASV(LASV221-NIG-2010;Clade II)__AIT17625__SP-HsALB_NP(2-569) (opt5)
aggagaguccgcucagccagguugcagaagcggcuuagcguguguccuaaucuucucucugcguguagguaggccugugccgcaaacaagcuuaccaugaagugggugaccuucaucagccugcucuuucuguucuccucugccuacagcagcgccuccaaggaggugaaaucuuuccuguggacccagagccucagacgggaacuguccggcuacugcucuagcaucaaacuucaagucguuaaggacgcucaggcccugcuccacgggcuggauuuuuccgaggugucuaacgugcagcgccuuaugagaaagcagcggcgcgacgauagcgaccugaaaagacuccgggaucugaaucaagcggucaacaaucugguggaacucaaguccacacagcaaaagagcauucugcgcguuggaacgcuuaccucugacgaucugcucacacuggcugccgaccuugagaaacugaaguccaaagugaucagaaccgaacggccccucagcucuggcgucuauauggggaaccuguccacacagcagcuggagcagcgcagagcccuccugaauaugauuggaauggugggcggggcucagggaacccagccuggccgggauggcguugugcgcgucugggacgugaagaacccggaucuucugaauaaccaauucgggacaaugcccagccucacccuggccugucuuacgaaacagggacagguggaccugaaugaugcuguccucgcccugaccgaccugggccucaucuacacagcgaaguauccuaacucuuccgaccuggauagacuuagccaaucccaucccauucugaauaugguugacaccaagaaaucuagccucaacaucuccggguacaauuuuagccugggagccgcugugaaggccggcgcuugcaugcuugaugggggaaacaugcuggagacaaucaaagugaccccucagacggucgacggcauucucaagucuauccugaaagugaagcggucccugggcauguucguuagcgauacacccggggaacgcaauccuuaugagaacauucucuacaaaaucugucugucuggagacggcuggccguauauugccagcagaaccuccaucguggggcgggcgugggaaaacacaaccgucgaucuugagucugacggaaagccccagaaggugggcaccgccgggagcaauaaaucccugcagagcgcuggauuuccuacaggccucacguacucucaacugaugacccugaaggauuccaugaugcagcuugaccccagcgccaaaacauggauugauaucgagggcagaccugaagaccccguugagaucgcucucuaccagccgaugucugggugcuauauucacuucuuucgcgaaccuaccgaccugaagcaguucaaacaagaugccaaguacucccauggaaucgacguggccgaucuguuucccgcucagccuggccucacaagcgcggucauugaggcccugccccggaacauggugcuuaccugucagggguccgacgauaucaagagacugcucgacucucagggacgccgggauauuaaacugaucgacaucgcucugagcaaggccgauuccagaaaauucgaaaaugccgucugggaccaaugcaaggaucuuugucacaugcauacgggcgugguuguggagaaaaagaagcgcgggggcaaagaggaaauuacaccccacugcgcucucauggacuguaucauguaugaugccgcggucucuggaggccugaacauuccugugcugcgggcuguucucccgagagacaugguguuucgcaccagcucccccaaggucgugcugugaggacuagucccuguucccagagcccacuuuuuuuucuuuuuuugaaauaaaauagccugucuuucagaucuaaaaaaaaaaaaaaaaaaaaaaaaaaaaaaaaaaaaaaaaaaaaaaaaaaaaaaaaaaaaaaaaaaaaaaaaaaaaaaaaaaaaaaaaaaaaaaaaaaaa

SEQ ID NO: 20060 - RNA, 2028 nt, Artificial Sequence
  mRNA product Design a-2 (A100) comprising derived and/or modified sequence from LASV(LASV237-NIG-2010;Clade II)__AIT17639__SP-HsALB_NP(2-569) (opt5)
aggagaguccgcucagccagguugcagaagcggcuuagcguguguccuaaucuucucucugcguguagguaggccugugccgcaaacaagcuuaccaugaagugggugaccuucaucagccugcucuuucuguucuccucugccuacagcagcgccuccaaggaggugaaaucuuuccuguggacccagagccucagacgggaacuguccggcuacugcucuaacaucaaacuucaagucguuaaggacgcucaggcccugcuccacgggcuggauuuuagcgagguguccaaugugcagcgccuuaugagaaagcagaaacgggacgauucugaccugaagcgccucagagaucugaaccaagcggucaauaaccugguggaacucaagagcacacagcagaaauccauucugcggguuggaacgcuuaccagcgacgaucugcucacacuggcugccgaccuugagaagcugaaaucuaaggugauccgcaccgaaagaccccucuccagcggcgucuauauggggaaucugucuacacagcaacuggagcagcggcgcgcccuccugaacaugauuggaauggugggcggggcucagggaacccagccuggcagagauggcguugugcgggucugggacgugaaaaauccggaucuucugaacaaucaauucgggacaaugcccucccucacccuggccugucuuacgaagcagggacagguggaccugaacgaugcuguccucgcccugaccgaccugggccucaucuacacagcgaaguauccuaauagcucugaccuggaucgccuuucccaaagccaucccauucugaacaugguugacaucaaaaaguccucucucaauaucagcggguacaacuuuucccugggagccgcugugaaagccggcgcuugcaugcuugaugggggaaauaugcuggagaccauuaaggugacaccucagaccauggacggcauccucaaaagcauucugaaggucaaaagaucucugggcauguucguguccgauacgcccggggaacggaacccuuaugagaacauccucuacaagauuugucugagcggagacggcuggccguauaucgccucucgcacaagcauuguugggagagcgugggaaaauaccacaguggaucuugaguccgacggaaagccccagaaagucggcucugccgggagcaacaagucccugcagagcgcuggauuuccuaccggccucaccuacucucaacugaugacacugaaagauuccaugaugcagcuugaccccagcgccaagacguggaucgauaucgagggccggccugaagaccccguggagauugcucucuaccagccgaugucugggugcuauauccacuucuuuagagaaccuaccgaccugaaacaguucaagcaagaugccaaguacucccauggaauugacguugccgaucuguuucccgcucagccuggccucacaagcgcggugaucgaggcccugccccgcaauaugguccuuaccugucagggguccgacgauauuaaacggcugcucgacucucagggaagacgcgauaucaagcugaucgacauugcucugagcaaagccgauucccggagauucgaaaacgccgugugggaccaaugcaaggaucuuugucacaugcauacaggcgucgugguugagaaaaagaagcgcgggggcaaagaggaaaucacgccccacugcgcucucauggacuguauuauguaugaugccgcggugucuggaggccugaauaucccuguccugcgggcugugcucccgagagacaugguuuuucgcaccagcucccccaaggugguccugugaggacuagucccuguucccagagcccacuuuuuuuucuuuuuuugaaauaaaauagccugucuuucagaucuaaaaaaaaaaaaaaaaaaaaaaaaaaaaaaaaaaaaaaaaaaaaaaaaaaaaaaaaaaaaaaaaaaaaaaaaaaaaaaaaaaaaaaaaaaaaaaaaaaaa

SEQ ID NO: 20061 - RNA, 2028 nt, Artificial Sequence
  mRNA product Design a-2 (A100) comprising derived and/or modified sequence from LASV(LASV253-NIG-2011;Clade II)__AIT17671__SP-HsALB_NP(2-569) (opt5)
aggagaguccgcucagccagguugcagaagcggcuuagcguguguccuaaucuucucucugcguguagguaggccugugccgcaaacaagcuuaccaugaagugggugaccuucaucagccugcucuuucuguucuccucugccuacagcagcgccuccaaggaggugaaaucuuuccuguggacccagagccucagacgggaacuguccggcuacugcucuagcaucaaacuucaagucguuaaggacgcucaggcccugcuccacgggcuggauuuuuccgaggugucuaacgugcagcgccuuaugagaaagcagaaacgggacgauagcgaccugaagcgccucagagaucugaaucaagcggucaacaaucugguggaacucaaguccacccagcagaaaagcguucugcgggugggaacgcuuaccucugacgaucugcucacacuggcugccgaccuugagaagcugaaauccaaggucauucgcaccgaaagaccccucagcucuggcguguauauggggaaccuguccacacagcaacuggagcagcggcgcgcccuccugaauaugaucggaaugguuggcggggcucagggaacccagccuggcagagauggcgugguccgggugugggacgugaaaaacccggaucuucugaauaaccaauucgggacaaugcccagccucacccuggccugucuuacgaagcagggacaggucgaccugaaugauguugugcucgcucugaccgaccugggccucauuuacacagccaaguauccuaacucuuccgaccuggaucgccuuagccaaucccaucccauccugaauaugguggacaccaaaaagucuagccucaacauuuccggguacaauuuuagccugggagcggccgucaaagcuggcgccugcaugcuugaugggggaaacaugcuggagacaaucaaggugaccccucagacgauggacggcauccucaaaucuauucugaagguuaaaaagucccugggcauguucgugagcgauacacccggggaaagaaauccuuaugagaacauccucuacaagauuugucugucuggagacggcuggccguauaucgcuagccggaccuccauugucgggcgcgccugggaaaacacaaccguggaucuugagucugacggaaaaccccagaagguuggcaccgcggggagcaauaaaucccugcagagcgccggauuuccuacaggccucacguacucucaacugaugacccugaaggauuccaugaugcagcuugaccccagcgcuaaaacauggaucgauauugagggcagaccugaagaccccguggagaucgcccucuaccagccgaugucugggugcuauauccacuucuuucgggaaccuaccgaccugaagcaguucaagcaagaugcuaaauacucccauggaauugacgucacagaucuguuucccgcccagccuggccucaccagcgccgugaucgaggcucugcccagaaacaugguccuuacgugucagggguccgacgauauuaagcgccugcucgacucucagggacggagagauaucaaacugauugacaucgcgcugagcaaggccgauucccgccgguucgaaaaugcugugugggaccaaugcaaagaucuuugucacaugcauacaggcguuguggucgagaagaagaaaagagggggcaaggaggaaaucacaccccacugcgcccucauggacuguauuauguaugaugccgcugugucuggaggccugaacaucccuguucugcgcgccgugcucccgcgggacauggucuuuagaaccagcucccccaaaguggugcugugaggacuagucccuguucccagagcccacuuuuuuuucuuuuuuugaaauaaaauagccugucuuucagaucuaaaaaaaaaaaaaaaaaaaaaaaaaaaaaaaaaaaaaaaaaaaaaaaaaaaaaaaaaaaaaaaaaaaaaaaaaaaaaaaaaaaaaaaaaaaaaaaaaaaa

SEQ ID NO: 20062 - RNA, 2028 nt, Artificial Sequence
  mRNA product Design a-2 (A100) comprising derived and/or modified sequence from LASV(LASV254-NIG-2011;Clade II)__AIT17675__SP-HsALB_NP(2-569) (opt5)
aggagaguccgcucagccagguugcagaagcggcuuagcguguguccuaaucuucucucugcguguagguaggccugugccgcaaacaagcuuaccaugaagugggugaccuucaucagccugcucuuucuguucuccucugccuacagcagcgccuccaaggaggugaaaucuuuccuguggacccagagccucagacgggaacuguccggcuacugcucuagcaucaaacuucaagucguuaaggacgcucaggcccugcuccacgggcuggauuuuuccgaggugucuaacgugcagcgccuuaugagaaagcagaaacgggacgauagcgaccugaagcgccucagagaucugaaucaagcggucaacaaucugguggaacucaaguccacacagcagaaaagcguucugcgggugggaacgcuuaccucugacgaucugcucacacuggcugccgaccuugagaagcugaaauccaaggucauucgcaccgaaagaccccucagcucuggcguguauauggggaaccuguccacacagcaacuggagcagcggcgcgcccuccugaauaugaucggaaugguuggcggggcucagggaacccagccuggcagagauggcgugguccgggugugggacgugaaaaacccggaucuucugaauaaccaauucgggacaaugcccagccucacccuggccugucuuacgaagcagggacaggucgaccugaaugaugcuguucucgcccugaccgaccugggccucauuuacacagcgaaguauccuaacucuuccgaccuggaucgccuuagccaaucccaucccauccugaauaugguggacaccaaaaagucuagccucaacauuuccggguacaauuuuagccugggagccgcugugaaagccggcgcuugcaugcuugaugggggaaacaugcuggagacaaucaaggucaccccucagacgauggacggcauccucaaaucuauucugaaggugaaaaagucccugggcauguucguuagcgauacacccggggaaagaaauccuuaugagaacauccucuacaagauuugucugucuggagacggcuggccguauaucgccagccggaccuccauuguggggcgcgcgugggaaaacacaaucgucgaucuugagucugacggaaaaccccagaaggugggcaccgccgggagcaauaaaucccugcagagcgcuggauuuccuaccggccucacauacucucaacugaugacgcugaaggauuccaugaugcagcuugaccccagcgccaaaaccuggauugauaucgagggcagaccugaagaccccguugagaucgcucucuaccagccgaugucugggugcuauauucacuucuuucgggaaccuacagaccugaagcaguucaagcaagaugccaaauacucccauggaaucgacguggccgaucuguuucccgcucagccuggccucaccagcgcggucauugaggcccugcccagaaacauggugcuuacaugucagggguccgacgauaucaagcgccugcucgacucucagggacggagagauauuaaacugaucgacaucgcucugagcaaggccgauucccgccgguucgaaaaugccgucugggaccaaugcaaagaucuuugucacaugcauaccggcgugguuguggagaagaagaaaagagggggcaaggaggaaauuacgccccacugcgcucucauggacuguaucauguaugaugccgcggucucuggaggccugaacauuccugugcugcgcgcuguucucccgcgggacaugguguuuagaacaagcucccccaaagucgugcugugaggacuagucccuguucccagagcccacuuuuuuuucuuuuuuugaaauaaaauagccugucuuucagaucuaaaaaaaaaaaaaaaaaaaaaaaaaaaaaaaaaaaaaaaaaaaaaaaaaaaaaaaaaaaaaaaaaaaaaaaaaaaaaaaaaaaaaaaaaaaaaaaaaaaa

SEQ ID NO: 20063 - RNA, 2028 nt, Artificial Sequence
  mRNA product Design a-2 (A100) comprising derived and/or modified sequence from LASV(Nig08-04;Clade II)__ADU56611__SP-HsALB_NP(2-569) (opt5)
aggagaguccgcucagccagguugcagaagcggcuuagcguguguccuaaucuucucucugcguguagguaggccugugccgcaaacaagcuuaccaugaagugggugaccuucaucagccugcucuuucuguucuccucugccuacagcagcgccuccaaggaggugaaaucuuuccuguggacccagagccucagacgggaacuguccggcuacugcucuaacaucaaacuucaagucguuaaggacgcucaggcccugcuccacgggcuggauuuuagcgagguguccaaugugcagcgccuuaugagaaagcagaaacgggacgauggagaccugaagcgccucagagaucugaaccaagcggucaauaaccugguggaacucaagucuacccagcagaaaagcguucugcgggugggcacgcuuaccuccgacgaucugcucacacuggcugccgaccuugagaagcugaaaagcaaggucauucgcaccgaaagaccccucucuuccgggguguauaugggaaaucugagcacacagcaacuggagcagcggaaagcccuccugucuaugaucggcaugguugggggagcucagggcacccagccuggccgcgaugggguggucagagugugggacgugaagaacccggaucuucugaauaaccaauucggaacaaugcccucccucacccuggccugucuuacgaagcagggccaggucgaccugaaugaugcuguucucgcccugaccgaccuggggcucauuuacacagcgaaauauccuaacagcucugaccuggaucggcuuucccaaagccaucccauccugaauaugguggacaccaagaaauccucucucaacauuagcggauacaauuuuucccugggcgccgcugugaaggccggggcuugcaugcuugauggaggcaacaugcuggagacaaucaaagucaccccucagacgauggacggcauccucaagagcauucugaaagugaagcgcucucuggggauguucguuuccgauacacccggagaaagaaauccuuaugagaacauccucuacaagauuugucugagcggcgacggguggccguauaucgccucucggaccagcauugugggacgcgcgugggaaaacacaaccgucgaucuugaguccgacggcaaaccccagaagguggggaccgccggaucuaauaaaagccugcaguccgcuggcuuuccuacaggccucacguacagccaacugaugacccugaaggauucuaugaugcagcuugaccccuccgccaaaacauggaucgauauugaggggagaccugaagaccccguugagaucgcucucuaccagccgaugagcggaugcuauauccacuucuuucgggaaccuaccgaccugaagcaguucaagcaagaugccaaauacucucauggcauugacgugacagaucuguuuuccgcccagcccgggcucaccagcgcugucaucgaggcgcugccuagaaacauggugcuuacgugucagggauccgacgauauuaagaaacugcucgacucucagggccgccgggauaucaagcugauugacaucagccugaauaaagccgauuccagacgcuucgaaaacgcugucugggaccaaugcaaggaucuuugucacaugcauacaggggugguuguggagaagaaaaagcggggcggaaaagaggaaaucacaccccacugcgcccucauggacuguauuauguuugaugccgcugucucuggcgggcugaauauccccauucugagagccgugcucccucgcgacaugguuuuccggaccagcuccccgaaggugguccugugaggacuagucccuguucccagagcccacuuuuuuuucuuuuuuugaaauaaaauagccugucuuucagaucuaaaaaaaaaaaaaaaaaaaaaaaaaaaaaaaaaaaaaaaaaaaaaaaaaaaaaaaaaaaaaaaaaaaaaaaaaaaaaaaaaaaaaaaaaaaaaaaaaaaa

SEQ ID NO: 20064 - RNA, 2031 nt, Artificial Sequence
  mRNA product Design a-2 (A100) comprising derived and/or modified sequence from LASV(GA391;Clade III)__AAA46284__SP-HsALB_NP(2-570) (opt5)
aggagaguccgcucagccagguugcagaagcggcuuagcguguguccuaaucuucucucugcguguagguaggccugugccgcaaacaagcuuaccaugaagugggugaccuucaucagccugcucuuucuguucuccucugccuacagcagcgccuccaaggaggugagaucuugccuguggacccagagccuccggcgcgaacuguccggcuacuguucuaacaucaaacuucaagucguuaaggacgcucaggcccugcuccacgggcuggauuucagcgagguguccaaugugcagagacuuaugcggaaacagaagcgcgacgauggagaccugaaaagacuccgggaucugaaccaagcggucaauaaccugguggaacucaagucuacacagcagaaaagcguucugcgcgugggcacgcuuuccagcgacgaucugcucauucuggcugccgaccuugagaaacugaagucuaaagucaccagaacagaacggccccucuccagcgggguguauaugggaaaucugucuucccagcaacuggaucagcgcagagcccuccugaacaugaucggcaugaccgggguuagcggaggcggcaagggggcuucuaauggaauugugcgggucugggacgugaaaaacgccgagcuucugaauaaccaguuuggcacaaugccuucccucacccuggcuugccuuacaaagcaggggcaaguggaucugaaugacgccguccaggcgcucaccgaucugggacugaucuacacggccaaguauccgaacagcuccgaccucgaccgccugucucagagccaucccauucuuaauaugaucgauaccaaaaaguccagccugaacaucucuggcuacaauuucucccucggggcugccguuaaagcuggagccuguaugcuggacggcggcaacaugcuugagacaauuaaggugagcccucaaaccauggaugggauccugaaaucuauucucaaggugaaaaagagccugggaauguuugucuccgacacacccggcgaaagaaacccuuaugagaauauccuguacaagauuugccucucuggggauggauggagcuauaucgcgucccggaccagcauugugggccgcgccugggaaaacacgguuguggaccuggagcaggauaauaaaccccagaagaucgggaacggaggcucuaauaaaucccuucagagcgcuggcuucgccgcugggcugaucuacucucaacucaugacacugaaggacuuuaaauguuucaaccugauuccuaaugccaagaccuggauggauaucgagggaagaccggaagaccccgucgagauugcccuuuaccagccuuccagcggcugcuaugugcacuuuuuccgggaacccacagaucucaagcaguuuaaacaggacgcuaaguacucccaugggagagacguuaccgaucuguucgcggcccaaccuggacugaccucugcugugaucgaggcccucccccgcaacauggucauuacaugucagggcagcgaagacauccggaaacugcuugagucccaggggagacgcgauaucaagcugauugacaucacgcucucuaaagccgauagccggaaguuugagaaugcugugugggaccaguucaaggaucugugccacaugcauaccggcgucgugguugaaaagaagaaaagaggaggcaaggaggaaauuacaccgcacugugcccugauggacugcaucauguuugaugcggcuguguccgggggacuugacgccaaaguccuccgcgugguucugccucgggauaugguguucagaaccagcacacccaaggucgugcugugaggacuagucccuguucccagagcccacuuuuuuuucuuuuuuugaaauaaaauagccugucuuucagaucuaaaaaaaaaaaaaaaaaaaaaaaaaaaaaaaaaaaaaaaaaaaaaaaaaaaaaaaaaaaaaaaaaaaaaaaaaaaaaaaaaaaaaaaaaaaaaaaaaaaa

SEQ ID NO: 20065 - RNA, 2028 nt, Artificial Sequence
  mRNA product Design a-2 (A100) comprising derived and/or modified sequence from LASV(Nig08-A19;Clade III)__ADU56619__SP-HsALB_NP(2-569) (opt5)
aggagaguccgcucagccagguugcagaagcggcuuagcguguguccuaaucuucucucugcguguagguaggccugugccgcaaacaagcuuaccaugaagugggugaccuucaucagccugcucuuucuguucuccucugccuacagcagcgccuccaaggaggugaaaucuuuccuguggacccagagccucagacgggaacuguccggcuacugcucuaacaucaaacuucaagucguuaaggacgcucaggcccugcuccacgggcuggauuuuagcgagguguccaaugugcagcgccuuaugagaaagcagaaacgggacgauggagaccugaagcgccucagagaucugaaccaagcggucaauaaccugguggaacucaagucuacacagcagaaaagcguucugcgggugggcacgcuuuccagcgacgaucugcucguccuggcugccgaccuugagaagcugaaaucuaaggugguucgcaccgaaagaccccucuccagcgggauuuauaugggaaaucugucuucccagcaacuggaucagcggaaagcccuccugaacaugaucggcaugacagggggaaauggcggccgcaacaccacaagcgacgggauugugagagucugggaugugaagaaugcugagcuucugaacaaucaguucggaaccaugccuucucucacacuggccugucuuaccaagcagggccaaguggaccugaacgaugcuguccaggcccucacggaccuggggcugaucuacaccgcgaaauaucccaauuccagcgaccucgaucggcuggcccagucccauccgauucuuaacaugaucgacacaaagaaaucuagccugaauaucuccggauacaacuuuagccucggcgcugccguuaaggcuggggccugcaugcuggauggaggcaacaugcuugagaccauuaaagugucuccucaaacaauggacggcauccugaaguccauucucaaagugaagcgcagccuggggauguucaucucugauacccccggagaaagaaauccuuaugagaacauucuguacaagaucugucucagcggcgacggguggcccuauauugcgucccggacgucuaucgucggacgcgccugggaaaauacagugguugaucuggagagcgacaacaaaccucagaagaccggcaaugggggauccaacaaaagccuucagucugcuggcuuugccgcuggccugacauacucccagcucaugacccugaaggauagcaugcugcaacuugacccgaaugccaaaaccuggauggauaucgaggggagacccgaagacccuguggagauugcccucuaccagcccucuuccggaugcuauauccacuucuuucgggaaccuacagaccugaagcaguucaagcaggaugcuaaauacagccauggcauugacgucacggaucuguuugcggcccaacccgggcucaccuccgcugugaucgaggcccugccgagaaacaugguuauuacaugucagggaucugaagacauccgcaaacuucuggagagccagggccggagagauaucaagcucauugacaucucccugucuaagguggauagccgcaaauucgagaaugccgucugggaccaguuuaaggaucugugccacaugcauaccgggauuguggucgaaaagaaaaagcggggcggaaaagaggaaaucacaccucacugugcucuuauggacugcauuauguucgaugccgcgguguccggcgggguugacgcuaaggugcucagagccguccugccccgcgauaugguguuucggaccagcacgccuaaaguugugcugugaggacuagucccuguucccagagcccacuuuuuuuucuuuuuuugaaauaaaauagccugucuuucagaucuaaaaaaaaaaaaaaaaaaaaaaaaaaaaaaaaaaaaaaaaaaaaaaaaaaaaaaaaaaaaaaaaaaaaaaaaaaaaaaaaaaaaaaaaaaaaaaaaaaaa

SEQ ID NO: 20066 - RNA, 2028 nt, Artificial Sequence
  mRNA product Design a-2 (A100) comprising derived and/or modified sequence from LASV(G1180-SLE-2010;Clade IV)__AIT17169__SP-HsALB_NP(2-569) (opt5)
aggagaguccgcucagccagguugcagaagcggcuuagcguguguccuaaucuucucucugcguguagguaggccugugccgcaaacaagcuuaccaugaagugggugaccuucaucagccugcucuuucuguucuccucugccuacagcagcgccuccaaggagaucaaaucuuuccuguggacccagagccucagacgggaacuguccggcuacugcucuaacauuaagcugcaaguggucaaagacgcucaggcccugcuccacgggcuggauuuuagcgagguuuccaaugugcagcgccuuaugagaaaggaacggcgcgacgauaacgaccugaaaagacuccgggaucugaaucaggcggugaacaaucuggucgagcucaagucuacacaacaaaagagcauccugcgcgugggaacgcuuaccuccgacgaucugcucauucuggcugccgaccuugaaaaacuuaagagcaaaguuaucagaacagagcggccccucucugccggcguguauauggggaaccuguccagccagcagcuggaucagcgcagagcucuccugucuaugauuggaauguccagcggcaaucagcgggcccaggcugggcgcgacggagucgugagaguuugggaugugaagaacgucgagcuucugaauaaccaguucggcaccaugccuucucucacacuggccugucuuaccaaacaaggccagguggaccugaaugaugcggugcaggcccucacagaccuggggcugaucuacaccgcuaaguauccgaacacguccgaccucgaucggcugacccaaagccaucccauccuuaauaugauugacacaaagaaauccucucugaacaucagcggauacaauuuuucccucggcgccgcugucaaggccggggcgugcaugcuggauggaggcaacaugcuugaaaccauuaaaguuagcccucagacaauggacgggauccugaagucuauucucaaagugaagaaagcccugggaauguucaucuccgauacccccggcgagcgcaacccuuaugaaaauauucuguacaagaucugucucagcggcgacggguggcccuauaucgcuucuagaacgagcauuacaggacgggccugggagaacaccguggucgaucuggaguccgacggcaagccucagaaagcugggucuaauaacagcaauaagucccuucagagcgugggauuuacagccggccugaccuacucucaacucaugacccugaaagaugccaugcugcagcuugacccgaacgcuaagacauggauggauaucgaagggagacccgaggacccuguugaaauugcgcucuaccagcccuccagcggaugcuauauccacuucuuucgcgagccuacggaccugaaacaguucaagcaagaugccaaguacucucauggcauugacgugaccgaucuguuugcugcccagcccggccucacauccgccgucaucgacgcucugccgcggaauauggugaucaccugucaggggagcgaugacauuagaaaacuucuggaaucccagggacgcaaggauaucaaacucauugacaucgcccugucuaagacagauagccggaaauaugagaacgcgguuugggaccaauacaaggaucugugccacaugcauaccggcguggucguggagaagaaaaagagagggggaaaagaagagauuacgccucacugugcucuuauggacugcaucauguucgaugccgccgucuccggcgggcucaauacaucugugcugcgcgcuguucugccccgggacaugguguuuagaaccagcaccccucgcgucgugcucugaggacuagucccuguucccagagcccacuuuuuuuucuuuuuuugaaauaaaauagccugucuuucagaucuaaaaaaaaaaaaaaaaaaaaaaaaaaaaaaaaaaaaaaaaaaaaaaaaaaaaaaaaaaaaaaaaaaaaaaaaaaaaaaaaaaaaaaaaaaaaaaaaaaaa

SEQ ID NO: 20067 - RNA, 2028 nt, Artificial Sequence
  mRNA product Design a-2 (A100) comprising derived and/or modified sequence from LASV(G1442-SLE-2011;Clade IV)__AIT17181__SP-HsALB_NP(2-569) (opt5)
aggagaguccgcucagccagguugcagaagcggcuuagcguguguccuaaucuucucucugcguguagguaggccugugccgcaaacaagcuuaccaugaagugggugaccuucaucagccugcucuuucuguucuccucugccuacagcagcgccuccaaggaggugaaaucuuuccuguggacccagagccucagacgggaacuguccggcuacugcucuaacaucaaacuucaagucguuaaggacgcucaggcccugcuccacgggcuggauuuuagcgagguguccaaugugcagcgccuuaugagaaagcagcggcgcgacgauaacgaccugaaaagacuccgggaucugaaucaagcggucaacaaucugguggaacucaagucuacacagcaaaagagcguucugcgcgugggaacgcuuaccuccgacgaucugcucguccuggcugccgaccuugagaaacuuaagagcaaagugauuagaacagaacggccccucucugccggcguuuauauggggaaccuguccagccagcagcuggaucagcgcagagcucuccugaauaugaucggaaugucuggcgggauucagggaacccggacaggccgcgacggcguggucagagugugggaugugaagaacgccgaccuucugaauaaccaguucgggaccaugccuucccucacacuggcuugucuuaccaaacaaggacaggucgaucugaaugacguugugcaggcccucacggaccugggccugaucuacaccgcgaaguauccgaacgccagcgaucucgaccggcugacacaaucucaucccauucuuaauaugaucgauaccaagaaauccagccugaacaucuccggguacaauuuuucucucggagcugccgugaaggcuggcgccugcaugcuggacgggggaaacaugcuugagacaauuaaagucagcccucagaccauggauggcauccugaaguccauucucaaagugaagaaaacgcugggcauguucaucagcgacacacccggggagcgcaacccuuaugaaaauauucuguacaagaucugucucucuggagauggcuggcccuauauugcguccagaaccagcaucacagggcgggccugggagaacaccguuguggaccuggaaucugauggaaagccucagaaagcuggcagcaauaacuccaauaagucucuucagagcgccggguuugcugccggacugaccuacucccaacucaugacacugaaagacgccaugcugcagcuugauccgaacgcuaagacguggauggacaucgagggcagacccgaggacccugucgaaauugcgcucuaccagcccagcucuggcugcuauauccacuucuuucgcgagccuaccgaucugaaacaguucaagcaagacgccaaguacucccaugggauugaugugacagaccuguuugcugcccagcccggacucaccagcgccguuaucgaagcucugccgcggaauauggugauuacaugucagggcucugaugacaucaaaaagcugcuggagucccaggggagaaaagauaucaagcucauugacaucgcccugagcaaaaccgauucccgcaaguaugaaaacgcggucugggaccaauacaaggaucugugccacaugcauacgggaguggucguggagaaaaagaaacggggcgggaaggaggaaauuacaccucacugugcucuuauggacugcaucauguucgaugccgccguuucuggcggacucaauacccuggugcugagagcuguccucccccgcgacaugguguuucggaccagcacaccuagaguugugcugugaggacuagucccuguucccagagcccacuuuuuuuucuuuuuuugaaauaaaauagccugucuuucagaucuaaaaaaaaaaaaaaaaaaaaaaaaaaaaaaaaaaaaaaaaaaaaaaaaaaaaaaaaaaaaaaaaaaaaaaaaaaaaaaaaaaaaaaaaaaaaaaaaaaaa

SEQ ID NO: 20068 - RNA, 2028 nt, Artificial Sequence
  mRNA product Design a-2 (A100) comprising derived and/or modified sequence from LASV(G3010-SLE-2013;Clade IV)__AIT17345__SP-HsALB_NP(2-569) (opt5)
aggagaguccgcucagccagguugcagaagcggcuuagcguguguccuaaucuucucucugcguguagguaggccugugccgcaaacaagcuuaccaugaagugggugaccuucaucagccugcucuuucuguucuccucugccuacagcagcgccuccaaggagaucaaaucuuuccuguggacccagagccucagacgggaacuguccggcuacugcucuaacauuaaacuucaaguggucaaagacgcucaggcccugcuccacgggcuggauuuuagcgagguuuccaaugugcagcgccuuaugagaaaggaacggcgcgacgauaacgaccugaaaagacuccgggaucugaaucaggcggugaacaaucuggucgagcucaagucuacacaacaaaagagcauccugcgcgugggaacgcuuaccuccgacgaucugcucauucuggcugccgaccuugaaaaacuuaagagcaaaguuacaagaaccgagcggccccucucugccggcguguauauggggaaccuguccagccagcagcuggaucagcgcagagcucuccugucuaugaucggaauguccagcggcguccagggggcccgggcuggacgcgacggcgugguuagagugugggaugucaagaaugccgagcuucugaacaaucaguucggcacaaugccuucucucacccuggcgugucuuacaaaacaggggcaaguggaccugaacgaugugguccaggcccucaccgaccugggacugauuuacacggcuaaguauccgaauaccuccgaccucgaucggcugacacagagccaucccauccuuaacaugaucgacaccaagaaauccucucugaauauuagcggcuacaacuuuucccucggggccgcuguuaaggccggagcgugcaugcuggauggcgggaauaugcuugaaacaaucaaagugagcccucaaaccauggacggcauucugaagucuauccucaaagugaagaaagcccugggaauguucauuuccgagacgcccggcgaacgcaacccuuaugagaacauccuguacaagauuugucucagcggggauggauggcccuauaucgcuucuagaacaagcaucaccggccgggccugggagaauacagucguggaccuggaauccgaugggaagccucagaaagcuggaucuaacaauagcaacaagucccuucagagcgccggcuuuaccgccgggcugaccuacucucagcucaugacacugaaagacgcuaugcugcaacuugauccgaaugcgaagacguggauggacauugagggaagacccgaagauccuguugagguggcccucuaccagcccuccagcggcugcuauauccacuucuuucgcgaaccuaccgaccugaaacaguucaagcaggacgcuaaguacucucauggcauugaugucacagaccuguuugccgcccaacccgggcucaccuccgcugugaucgaugcccugccgcggaacaugguuauuacaugucagggaagcgacgauaucaaaaagcugcuggagucccagggcagaaaagacaucaagcucauugauaucgcgcugucuaaaaccgacagccgcaaguaugagaaugcugugugggaucaguacaaggaccugugccacaugcauacgggggucguggucgaaaagaagaaacggggaggcaaggaggaaauuacaccucacugugcccuuauggauugcaucauguucgacgccgcuguguccgggggccucaacaccucuguucugagagccgugcugccccgcgauauggucuuucggaccagcacaccuagagugguucucugaggacuagucccuguucccagagcccacuuuuuuuucuuuuuuugaaauaaaauagccugucuuucagaucuaaaaaaaaaaaaaaaaaaaaaaaaaaaaaaaaaaaaaaaaaaaaaaaaaaaaaaaaaaaaaaaaaaaaaaaaaaaaaaaaaaaaaaaaaaaaaaaaaaaa

SEQ ID NO: 20069 - RNA, 2028 nt, Artificial Sequence
  mRNA product Design a-2 (A100) comprising derived and/or modified sequence from LASV(G502-SLE-2009;Clade IV)__AIT17127__SP-HsALB_NP(2-569) (opt5)
aggagaguccgcucagccagguugcagaagcggcuuagcguguguccuaaucuucucucugcguguagguaggccugugccgcaaacaagcuuaccaugaagugggugaccuucaucagccugcucuuucuguucuccucugccuacagcagcgccuccaaggagaucaaaucuuuccuguggacccagagccucagacgggaacuguccggcuacugcucuaacauuaagcugcaaguggucaaagacgcucaggcccugcuccacgggcuggauuuuagcgagguuuccaaugugcagcgccuuaugagaaaggaacggcgcgacgauaacgaccugaaaagacuccgggaucugaaucaggcggugaacaaucuggucgagcucaagucuacacaacaaaagagcauccugcgcgugggaacgcuuaccuccgacgaucugcucauucuggcugccgaccuugaaaaacuuaagagcaaaguuaucagaacagagcggccccucucugccggcguguauauggggaaccuguccagccagcagcuggaucagcgcagagcucuccugucuaugauuggaauguccggcgggaaucagggaguccgggccggcaaggacggcgugguucgcgugugggaugucaaaaacgcugagcuucugaauaaccaguucgggaccaugccuagccucacacuggccugucuuaccaagcagggacaaguggaccugaaugaugcggugcaggcccucacagaccugggccugaucuacaccgcuaaguauccgaacacgucugaccucgauagacugacccagucccaucccauccuuaauaugauugacaccaaaaagagcucccugaacaucucuggguacaauuuuagccucggagccgcugucaaagccggcgcgugcaugcuggaugggggaaacaugcuugaaacaauuaagguuuccccucaaacaauggacggcauccugaaaagcauucucaaggugaaaaaggcccugggcauguucaucucugauacccccggggagcggaacccuuaugaaaauauucuguacaagaucugucucuccggagacggcuggcccuauaucgcuagccgcacgucuauuacagggagagccugggagaacaccguggucgaucuggagagcgacggaaaaccucagaaggcuggcuccaauaacucuaauaaaagccuucaguccgccggguuuacagccggacugaccuacagccagcucaugacccugaaggaugcuaugcugcaacuugacccgaacacaaaaacguggauggauaucgaaggccggcccgaggacccuguggaaauugcgcucuaccagcccucuuccggcugcuauauccacuucuuuagagagccuaccgaccugaagcaguucaagcaggaugccaaauacagccaugggauugacguuacagaucuguuugcugcccaacccggacucaccucugccgugaucgacgcucugccgcgcaauauggucaucacaugucagggcuccgaugacauucggaaacuucuggaaagccaggggagaaaggauaucaagcucauugacaucgcccugaacaaaaccgauucccgcaaguaugagaaugcggugugggaccaguacaaggaucugugccacaugcauacgggaguuguggucgagaaaaagaaacggggcgggaaggaagagauuacaccucacugugcucuuauggacugcaucauguucgaugccgccgugucuggcggacucaacaccagcguccugagagcugugcugccccgcgacaugguuuuucggaccuccacaccuagagugguccucugaggacuagucccuguucccagagcccacuuuuuuuucuuuuuuugaaauaaaauagccugucuuucagaucuaaaaaaaaaaaaaaaaaaaaaaaaaaaaaaaaaaaaaaaaaaaaaaaaaaaaaaaaaaaaaaaaaaaaaaaaaaaaaaaaaaaaaaaaaaaaaaaaaaaa

SEQ ID NO: 20070 - RNA, 2028 nt, Artificial Sequence
  mRNA product Design a-2 (A100) comprising derived and/or modified sequence from LASV(G733-SLE-2010;Clade IV)__AIT17155__SP-HsALB_NP(2-569) (opt5)
aggagaguccgcucagccagguugcagaagcggcuuagcguguguccuaaucuucucucugcguguagguaggccugugccgcaaacaagcuuaccaugaagugggugaccuucaucagccugcucuuucuguucuccucugccuacagcagcgccuccaaggagaucaaaucuuuccuguggacccagagccucagacgggaacuguccggcuacugcucuaacauuaagcugcaaguggucaaagacgcucaggcccugcuccacgggcuggauuuuagcgagguuuccaaugugcagcgccuuaugagaaaggaacggcgcgacgauaacgaccugaaaagacuccgggaucugaaucaggcggugaacaaucuggucgagcucaagucuacacaacaaaagagcgugcugcgcguuggaacgcuuaccuccgacgaacugcucgugcuggcugccgaucuugagaaacuuaagagcaaagucaucagaacagagcggccccucucugccggcguguauauggggaaccuguccagccagcagcuggaccagcgcagagcucuccugucuaugauuggaauguccggcgggaaucagggagcccggaccggccgcgauggcguugugagagucugggacgugaagaacgcugaacuucugaauaaccaguucgggacaaugccuagccucacccuggccugucuuacaaaacagggacaaguggaucugaaugacgcgguccaggcccucaccgaucugggccugaucuacacggcuaaguauccgaacaccucugaccucgaccggcugacacagucccaucccauucuuaauaugaucgauaccaagaaaagcucccugaacaucucuggguacaauuuuagccucggagccgcuguuaaggccggcgcgugcaugcuggacgggggaaacaugcuugagacaauuaaaguguccccucaaaccauggauggcauccucaagagcauucugaaagugaagaaagcccugggcauguucaucucugacacgcccggggaacgcaacccuuaugagaauauucuguacaagaucugucucuccggagauggcuggcccuauauugcuagcagaacaucuaucaccgggcgggccugggagaacacagucguggaccuggaaagcgauggaaagccucagaaagcuggcuccaauaacucuaauaagagccuucaguccgccggguuuaccgccggacugaccuacagccagcucaugacacugaaagacgcuaugcugcaacuugauccgaacgcgaagacguggauggacaucgagggcagacccgaagauccuguugagauugcccucuaccagcccucuuccggcugcuauauccacuucuuucgcgaaccuaccgaccugaaacaguucaagcaggacgcuaaguacagccaugggauugaugugacagaccuguuugccgcccaacccggacucaccucugcugucaucgaugcccugccgcggaauauggugauuacaugucagggcuccgacgauaucagaaaacuucuggagagccaggggcgcaaggacaucaaacucauugauaucgcgcuguccaagauugacucucggaaauaugagaacgcuguuugggaucaguacaaggaccugugccacaugcauaccggaguggucguggaaaagaaaaagagaggcgggaaagaggaaaucacgccucacugugcccuuauggauugcauuauguucgacgccgcugucagcggcggacucaauucccuggugcugcgcgccguucucccccgggauaugguguuuagaacaucuaccccucgcgucgugcugugaggacuagucccuguucccagagcccacuuuuuuuucuuuuuuugaaauaaaauagccugucuuucagaucuaaaaaaaaaaaaaaaaaaaaaaaaaaaaaaaaaaaaaaaaaaaaaaaaaaaaaaaaaaaaaaaaaaaaaaaaaaaaaaaaaaaaaaaaaaaaaaaaaaaa

SEQ ID NO: 20071 - RNA, 2028 nt, Artificial Sequence
  mRNA product Design a-2 (A100) comprising derived and/or modified sequence from MOPV/LASV reassortant(IGS-1;Clade IV)__AFY05578__SP-HsALB_NP(2-569) (opt5)
aggagaguccgcucagccagguugcagaagcggcuuagcguguguccuaaucuucucucugcguguagguaggccugugccgcaaacaagcuuaccaugaagugggugaccuucaucagccugcucuuucuguucuccucugccuacagcagcgccuccaaggagaucaaaucuuuccuguggacccagagccucagacgggaacuguccggcuacugcucuaacauuaaacuucaaguggucaaggacgcucaggcccugcuccacgggcuggauuuuagcgagguuuccaaugugcagcgccuuaugagaaaggaacggcgcgacgauaacgaccugaaaagacuccgggaucugaaucaggcggugaacaaucuggucgagcucaagucuacacaacaaaagagcauccugcgcgugggaacgcuuaccuccgacgaucugcucauucuggcugccgaccuugaaaaacugagaagcaagguuauccggacagagcgcccccucucugccggcguguauauggggaaccuguccagccagcagcuggaucagagacgggcucuccugaauaugauuggaaugucuggcgggaaccagggagcccgcgcuggcagagacggcgucgugcggguuugggaugugaaaaaugccgagcuucuguccaaccaguucgggaccaugccuagccucacacuggcgugucuuaccaagcagggacaagucgaccugaaugaugccgugcaggcucucacagaccugggccugaucuacaccgccaaauauccgaacacgucugaccucgaucgccugacccagucccaucccauccuuaauaugauugacacaaagaaaagcucccugaacaucucuggguacaauuuuagccucggagcugccgugaaggcgggcgccugcaugcuggaugggggaaacaugcuugaaaccauuaaggucuccccucaaacaauggacggcauccugaaaagcauucucaagguuaaaaaggcucugggcauguucaucucugauacccccggggagagaaacccuuaugaaaauauucuguacaaaaucugucucuccggagacggcuggcccuauaucgccagccggacgucuauuacagggagagcuugggagaacaccgugguggaucuggagagcgacggaaagccucagaaggccgauuccaauaacucuagcaaaucccuucagagcgccggcuuuacagcugggcugaccuacucucagcucaugacccugaaggacgcgaugcugcaacuugauccgaaugccaaaacauggauggacaucgaaggacgccccgaggacccugucgaaauugcucucuaccagcccuccagcggcugcuauauccacuucuuucgggagccuacggaucugaagcaguucaaacaggacgccaaguacucucauggcauugaugugaccgaccuguuugccacacaacccgggcucaccuccgcuguuaucgaugcccugccgagaaacauggugaucacaugucagggaagcgacgauauucgcaaacuucuggaaucccagggccggaaggacaucaagcucauugauaucgaccugucuaaaaccgauagcagaaaguaugagaaugcggucugggaccaguacaaagaucugugccacaugcauacgggggugguuguggagaagaagaaacgcggaggcaaggaagagauuacaccucacugugcucuuauggacugcaucauguucgacgccgccgucuccgggggccucaacaccucugugcugcgggcuguccugcccagagauaugguguuucgcaccagcacaccucggguugugcucugaggacuagucccuguucccagagcccacuuuuuuuucuuuuuuugaaauaaaauagccugucuuucagaucuaaaaaaaaaaaaaaaaaaaaaaaaaaaaaaaaaaaaaaaaaaaaaaaaaaaaaaaaaaaaaaaaaaaaaaaaaaaaaaaaaaaaaaaaaaaaaaaaaaaa

SEQ ID NO: 20072 - RNA, 2028 nt, Artificial Sequence
  mRNA product Design a-2 (A100) comprising derived and/or modified sequence from LASV(LM765-SLE-2012;Clade IV)__AIT17815__SP-HsALB_NP(2-569) (opt5)
aggagaguccgcucagccagguugcagaagcggcuuagcguguguccuaaucuucucucugcguguagguaggccugugccgcaaacaagcuuaccaugaagugggugaccuucaucagccugcucuuucuguucuccucugccuacagcagcgccuccaaggagaucaaaucuuuccuguggacccagagccucagacgggaacuguccggcuacugcucuaacauuaagcugcaaguggucaaagacgcucaggcccugcuccacgggcuggauuuuagcgagguuuccaaugugcagcgccuuaugagaaaggaacggcgcgacgauaacgaccugaaaagacuccgggaucugaaucaggcggugaacaaucuggucgagcucaagucuacacaacaaaagagcauccugcgcgugggaacgcuuaccuccgacgaucugcucauucuggcugccgaccuugaaaaacuuaagagcaaaguuacaagaaccgagcggccccucucugccggcguguauauggggaaccuguccagccagcagcuggaucagcgcagagcucuccuggacaugaucggaaugucuggcuccaaucagggggcccgggcuggacgcgauggcgucgugagaguuugggacgugaagaacgccgagcuucugaauaaccaguucggcacaaugccuagccucacccuggcgugucuuacaaaacaggggcaagucgaucugaaugacgccgugcaggcucucaccgaccugggacugauuuacacggccaaguauccgaacaccucugaucucgaccggcugacacagucccaucccauccuuaauaugaucgauaccaagaaaagcucccugaacauuucuggcuacaauuuuagccucggggcugccgugaaggcgggagccugcaugcuggacggcgggaacaugcuugaaacaaucaaagucuccccucaaaccauggauggcauucucaagagcauccugaaaguuaagaaagcucugggaauguucauuucugacgcccccggcgagcgcaacccuuaugaaaauauccuguacaagauuugucucuccggggauggauggcccuauaucgcuagcagaacgucuaucacaggccgggccugggagaacaccgugguggaccuggagagcgaugggaagccucagaaagccggauccaauggcucuaacaagagccuucaguccgcuggguuuacagcgggacugaccuacagccagcucaugacccugaaagacgccaugcugcaacuugauccgaaugcuaagacauggauggacauugaaggcagacccgaggacccugucgaaaucgcccucuaccagcccucuuccggcugcuauauucacuucuuucgcgagccuacggaucugaaacaguucaagcaggacgccaaguacagccaugggaucgaugugaccgaccuguuugcugcccaacccggacucacaucugcgguuauugaugcucugccgcggaacauggugaucaccugucagggcuccgacgauaucagaaaacuuuucgaaagccaggggcgcaaggacauuaaacugaucgauauugcccucuccaagacagacucucggaaauaugagaaugccgucugggaucaguacaaggaccugugccacaugcauaccggaaucgugguugagaagaaaaagagaggcgggaaagaagagauuacgccucacugugcucugauggauugcaucauguuugacgccgcugugagcggcggacuuaacacauccguccuccgcgccgugcugccccgggacauggucuucagaaccucuaccccucgcgugguucugugaggacuagucccuguucccagagcccacuuuuuuuucuuuuuuugaaauaaaauagccugucuuucagaucuaaaaaaaaaaaaaaaaaaaaaaaaaaaaaaaaaaaaaaaaaaaaaaaaaaaaaaaaaaaaaaaaaaaaaaaaaaaaaaaaaaaaaaaaaaaaaaaaaaaa

SEQ ID NO: 20073 - RNA, 2028 nt, Artificial Sequence
  mRNA product Design a-2 (A100) comprising derived and/or modified sequence from LASV(LM776-SLE-2012;Clade IV)__AIT17825__SP-HsALB_NP(2-569) (opt5)
aggagaguccgcucagccagguugcagaagcggcuuagcguguguccuaaucuucucucugcguguagguaggccugugccgcaaacaagcuuaccaugaagugggugaccuucaucagccugcucuuucuguucuccucugccuacagcagcgccuccaaggagaucaaaucuuuccuguggacccagagccucagacgggaacuguccucuuacugcagcaacauuaaacuucaaguggucaaggacgcucaggcccugcuccacggccuggauuuuuccgagguuucuaaugugcagcgccuuaugagaaaggaacggcgcgacgauaacgaccugaaaagacuccgggaucugaaucaggcggugaacaaucuggucgagcucaagagcacacaacagaaguccauccugcgcguggggacgcuuaccagcgacgaucugcucauucuggcugccgaccuugaaaaacugaagucuaaaguuacaagaaccgagcggccccucuccgccggaguguauaugggcaaccugagcucucagcagcuggaucaacgcagagcucuccuguccaugaucgggaugagcggaucuaaucagggcgcccgggcugggcgcgacggagucgugagaguuugggaugugaagaacgccgagcuucugaauaaccaguucggcacaaugccuucccucacccuggcgugucuuacaaaacagggccaagucgaccugaaugaugccgugcaggcucucaccgaccuggggcugauuuacacggccaaguauccgaacaccagcgaccucgaucggcugacacagucccaucccauccuuaauaugaucgacaccaagaaaucuagccugaacauuuccggauacaauuuuagccucggcgcugccgugaaggcgggggccugcaugcuggauggaggcaacaugcuugaaacaaucaaagucucuccucaaaccauggacgggauucugaaguccauccucaaaguuaagaaagcucugggaauguucauuagcgauacgcccggcgagcgcaacccuuaugaaaauauccuguacaagauuugucucucuggcgacggguggcccuauaucgccagcagaacauccaucaccggacgggcuugggagaacacagugguggaucuggagucugacggcaagccucagaaagccgggagcaauaacuccaauaagagccuucagucugccggauuuaccgcuggccugaccuacucccagcucaugacacugaaagaugcgaugcugcaacuugacccgaacgccaagacguggauggauauugaagggagacccgaggacccugucgaaguggcucucuaccagcccagcucuggaugcuauauccacuucuuucgcgagccuaccgaccugaaacaguucaagcaggaugccaaguacucccauggcauugacguuacagaucuguuugccgcucaacccggccucaccagcgccgugaucgacgcgcugccgcggaauauggucauuacaugucagggguccgaugacaucagaaaacuucuggaaucucagggacgcaaggauaucaaacucauugacaucgcucugagcaagaccgauucccggaaauaugagaacgccgugugggaccaguacaaggaucugugccacaugcauacgggcguuguggucgagaagaaaaagagagggggaaaagaagagauuacaccucacugugcccuuauggacugcaucauguucgaugcugccgugucuggcgggcucaauaccagcguccugcgcgcugugcugccccgggacaugguuuuuagaaccuccacaccucgcgugguccucugaggacuagucccuguucccagagcccacuuuuuuuucuuuuuuugaaauaaaauagccugucuuucagaucuaaaaaaaaaaaaaaaaaaaaaaaaaaaaaaaaaaaaaaaaaaaaaaaaaaaaaaaaaaaaaaaaaaaaaaaaaaaaaaaaaaaaaaaaaaaaaaaaaaaa

SEQ ID NO: 20074 - RNA, 2028 nt, Artificial Sequence
  mRNA product Design a-2 (A100) comprising derived and/or modified sequence from LASV(Mad39;Clade IV)__ANH09723__SP-HsALB_NP(2-569) (opt5)
aggagaguccgcucagccagguugcagaagcggcuuagcguguguccuaaucuucucucugcguguagguaggccugugccgcaaacaagcuuaccaugaagugggugaccuucaucagccugcucuuucuguucuccucugccuacagcagcgccuccaaggagaucaaaucuuuccuguggacccagagccucagacgggaacuguccggcuacugcucuaacauuaagcugcaaguggucaaagacgcucaggcccugcuccacgggcuggauuuuagcgagguuuccaaugugcagcgccuuaugagaaagcagcggcgcgacgauaacgaccugaaaagacuccgggaucugaaucaagcggugaacaaucuggucgaacucaagucuacacagcaaaagagcgugcugcgcguuggaacgcuuaccuccgacgaucugcucacacuggcugccgaccuugagaaacuuaagagcaaagugaccagaacagaacggccccucaccgccggcgucuauauggggaaccugucuucccagcagcuggaucagcgcagagcucuccugaauaugaucggaaugagcggcgggaaccagggagcccggacaggccgcgacggcgugguuagagugugggaugucaagaaugcugagcuucugaacaaucaguucgggaccaugccuucucucacgcuggccugucuuaccaaacaaggacagguggaccugaacgaugugguccaggcgcucacagaccugggccugauuuacaccgccaaguauccgaauacauccgaccucgaucggcugacccaaagccaucccauccuuaacaugauugacacgaauaagucuucccugaacaucagcggguacaacuuuucccucggagcugccguuaaagcuggcgccugcaugcuggaugggggaaauaugcuugagacaaucaaggugucuccucagaccauggacggcauucugaaaagcauccucaaggugaaaaagucccugggcauguucauuagcgauacacccggggaacgcaacccuuaugagaauauccuguacaaaauuugucucucuggagacggcuggcccuauaucgcguccagaaccagcauuaccgggcgggccugggaaaacacagucguggaucuggagucuggaggcaagccucagaaggcugggagcaauaacuccaauaaaucucuucagagcgccggauuugcugccggccugacguacucccaacucaugacccugaaggacgccaugcugcagcuugauccgaacgcuaaaacauggauggacaucgagggcagacccgaagauccuguugagaucgcgcucuaccagcccauuagcgggugcuauauccacuucuuucgcgaaccuaccgaccugaagcaguucaaacaagacgccaaguacucucauggaauugaugugacagaccuguuugcugcccagcccggccucaccuccgccgucaucgaggcucugccgcggaauauggugauuacgugucaggggagcgaugacaucagaaaacuuuucgaaucucagggacgcaaggauaucaagcugauugacaucgcccucuccaaaacagauagccggaaguaugagaacgcgguuugggaccaauacaaagaucugugccacaugcauaccggcguggucguggagaagaagaaaaagggcgggaaagaagagauuaccccucacugugcucugauggacugcaucauguuugaugccgccgucuccggaggccuuaauacacucgugcugagagcuguucugccccgcgacaugguguuccggaccucuacaccuaaggucgugcucugaggacuagucccuguucccagagcccacuuuuuuuucuuuuuuugaaauaaaauagccugucuuucagaucuaaaaaaaaaaaaaaaaaaaaaaaaaaaaaaaaaaaaaaaaaaaaaaaaaaaaaaaaaaaaaaaaaaaaaaaaaaaaaaaaaaaaaaaaaaaaaaaaaaaa

SEQ ID NO: 20075 - RNA, 2028 nt, Artificial Sequence
  mRNA product Design a-2 (A100) comprising derived and/or modified sequence from LASV(Z0947-SLE-2011;Clade IV)__AIT17841__SP-HsALB_NP(2-569) (opt5)
aggagaguccgcucagccagguugcagaagcggcuuagcguguguccuaaucuucucucugcguguagguaggccugugccgcaaacaagcuuaccaugaagugggugaccuucaucagccugcucuuucuguucuccucugccuacagcagcgccuccaaggagaucaaaucuuuccuguggacccagagccucagacgggaacuguccggcuacugcucuaacauuaagcugcaaguggucaaagacgcucaggcccugcuccacgggcuggauuuuagcgagguuuccaaugugcagcgccuuaugagaaaggaacggcgcgacgauaacgaccugaaaagacuccgggaucugaaucaggcggugaacaaucuggucgagcucaagucuacacaacaaaagagcauccugcgcgugggaacgcuuaccuccgacgaucugcucauucuggcugccgaccuugaaaaacuuaagagcaaaguuacaagaaccgagcggccccucucugccggcguguauauggggaaccuguccagccagcagcuggaucagcgcagagcucuccugaauaugaucggaaugucuggcuccaaccagggggcccggacaggacgcgacggcgucgugagaguuugggaugugaagaaugcugagcuucugaacaaucaguucggcaccaugccuagccucacacuggccugucuuaccaaacaggggcaagucgaccugaacgaugcggugcaggcccucacggaccugggacugauuuacaccgcuaaguauccgaauacaucugaccucgaucggcugacccagucccaucccauccuuaacaugaucgacacaaagaaaagcucccugaauauuucuggcuacaacuuuagccucggggccgcugugaaggccggagcgugcaugcuggauggcgggaacaugcuugaaaccaucaaagucuccccucaaacgauggacggcauucucaagagcauccugaaaguuaagaaagcccugggaauguucauuucugaugcucccggcgagcgcaauccuuaugaaaacauccuguacaagauuugucucuccggggacggauggcccuauaucgccagcagaacaucuaucaccggccgggcuugggagaauacagugguggaucuggagagcgacgggaagccucagaaagccggauccaacggcucuaauaagagccuucaguccgccggguuuaccgcuggacugaccuacagccagcucaugacacugaaagaugcgaugcugcaacuugacccgaacgccaagacguggauggauauugaaggcagacccgaggacccugucgaaaucgcucucuaccagcccucuuccggcugcuauauucacuucuuucgcgagccuaccgaccugaaacaguucaagcaggaugccaaguacagccaugggaucgacgugacagaucuguuugccgcucaacccggacucaccucugccguuauugacgcgcugccgcggaauauggugaucacaugucagggcuccgaugacaucagaaaacuuuucgaaagccaggggcgcaaggauauuaaacugaucgacauugcucucuccaagaccgauucucggaaauaugagaacgccgucugggaccaguacaaggaucugugccacaugcauacgggaaucgugguugagaagaaaaagagaggcgggaaagaagagauuacaccucacugugcccugauggacugcaucauguuugaugcugccgugagcggcggacuuaauaccuccguccuccgcgcugugcugccccgggacauggucuucagaaccucuacaccucgcgugguucugugaggacuagucccuguucccagagcccacuuuuuuuucuuuuuuugaaauaaaauagccugucuuucagaucuaaaaaaaaaaaaaaaaaaaaaaaaaaaaaaaaaaaaaaaaaaaaaaaaaaaaaaaaaaaaaaaaaaaaaaaaaaaaaaaaaaaaaaaaaaaaaaaaaaaa

SEQ ID NO: 20076 - RNA, 2066 nt, Artificial Sequence
  mRNA product Design b-4 (hSL-A64-N5) comprising derived and/or modified sequence from LASV(Josiah;Clade IV)__NP_694869__SP-HsALB_NP(2-569) (opt1)
aggagagucccgcagucggcguccagcggcucugcuuguucgugugugugucguugcaggccuuauucaagcuuaccaugaagugggugaccuucaucagccugcucuuccuguucuccagcgccuacuccagcgccuccaaggagaucaagagcuuccuguggacccagucccuccgccgggagcugagcggcuacugcuccaacaucaagcuccagguggucaaggacgcccaggcgcugcugcacgggcuggacuucagcgagguguccaacgugcagcgccucaugcggaaggagcgccgggacgacaacgaccugaagcgccugcgggaccucaaccaggccgucaacaaccugguggagcucaagagcacccagcagaaguccauccugcgcgugggcacccugaccagcgacgaccugcucauccuggccgccgaccuggagaagcucaaguccaaggucauccggaccgagcgcccccugagcgccgggguguacaugggcaaccuguccagccagcagcucgaccagcggcgcgcgcugcugaacaugaucgggauguccggcggcaaccagggggcccgggccggccgcgacggggugguccgggugugggacgugaagaacgccgagcuccugaacaaccaguucggcaccaugccgagccugacgcucgcgugccugaccaagcaggggcaggucgaccugaacgacgccgugcaggcccucaccgaccugggccugaucuacaccgccaaguaccccaacacguccgaccucgaccgccugacccagagccaccccauccugaacaugaucgacaccaagaaguccagccucaacaucagcggcuacaacuucucccugggggccgcggugaaggccggcgccugcaugcuggacgggggcaacaugcucgagaccaucaaggucagcccccagacgauggacggcauccugaaguccauccugaaggugaagaaggcccucgggauguucaucagcgacaccccgggcgagcggaaccccuacgagaacauccuguacaagaucugccuguccggggacggcuggcccuacaucgccagccgcaccuccaucaccgggcgggcgugggagaacacgguggucgaccucgagagcgacggcaagccccagaaggccgacuccaacaacagcuccaagagccugcaguccgccggcuucaccgccgggcugaccuacagccagcucaugacccugaaggacgccaugcugcagcuggacccgaacgcgaagacguggauggacaucgagggccgccccgaggaccccguggagaucgcccucuaccagcccuccagcgggugcuacauccacuucuuccgggagccgaccgaccugaagcaguucaagcaggacgccaaguacucccacggcaucgacgugaccgaccuguucgccacccagcccgggcucacgagcgccgucaucgacgcgcugccccgcaacauggugaucacgugccagggcuccgacgacauccgcaagcugcucgagagccagggccggaaggacaucaagcugaucgacaucgcccugagcaagaccgacucccgcaaguacgagaacgccgugugggaccaguacaaggaccucugccacaugcacaccggggucguggucgagaagaagaagcggggcgggaaggaggagaucaccccgcacugcgcccugauggacugcaucauguucgacgcggccgugagcggcgggcugaacaccuccgugcuccgcgccguccugccccgggacaugguguuccgcaccagcacgccccgggugguccugugaggacuaguaauaaggaaacuguaugaaugucugugggcaggaagugaagagauccuucuguaaagguuuuuggaauuaugucugcugaauaauaaacuuuuuugaaauaauaaaucugguagaaaaaugagaucucaaaggcucuuuucagagccaccaaaaaaaaaaaaaaaaaaaaaaaaaaaaaaaaaaaaaaaaaaaaaaaaaaaaaaaaaaaaaaaaagaauu

SEQ ID NO: 20077 - RNA, 2066 nt, Artificial Sequence
  mRNA product Design b-4 (hSL-A64-N5) comprising derived and/or modified sequence from LASV(LP;Clade I)__AAF86702__SP-HsALB_NP(2-569) (opt1)
aggagagucccgcagucggcguccagcggcucugcuuguucgugugugugucguugcaggccuuauucaagcuuaccaugaagugggugaccuucaucagccugcucuuccuguucuccagcgccuacuccagcaacuccaaggagaucaagagcuuccuguggacccagucccuccgccgggagcugagcggcuacugcuccaacaucaagcuccagguggucaaggacgcccaggcccugcugcacgggcuggacuucagcgagguguccaacgugcagcgccucaugcggaagcagaagcgcgacgacgcggaccugaagcggcugcgcgaccucaaccaggccgucaacaaccugguggagcucaagagcacccagcagaagaacgugcugcgggucggcacgcuguccagcgacgaccugaucacccucgccgccgaccuggagaagcugaaguccaaggugauccgcaccgagcggccccucagcuccgggguguacaugggcaaccugagcucccagcagcuggaccagcgccgggcccuccugagcaugaucgggauguccggcggcccgcaggggaaccgcaccggcggggacggcgucgugcgggugugggacgucaagaacgcggagcugcucaacaaccaguucgggacgaugcccagccugacccuggccugccucaccaagcagggccagguggaccugaacgacgccgugcaggcccugaccgaccucggccugaucuacacggcgaaguaccccaacuccagcgaccuggacaugcucacccagagccaccccauccuggggauggucgacaccaagaaguccagccugaacaucuccggcuacaacuucagccucggggccgccgugaaggccggcgccugcaugcuggacggcgggaacaugcuggagaccaucaagguguccccgcagacgauggacggcauccucaagagcauccugaaggucaagcgcucccuggggauguucaucagcgacacccccggcgagcggaaccccuacgagaacauccucuacaagaucugccuguccggggagggcuggcccuacaucgcgagccgcaccuccaucaccggccgggccugggagaacacgcugguggaccucgagagcgacaacaagccgcccaagcugaacuccgccgggagcaacaagucccugcaggccgccggccucaacgcggggcugaccuacagccagcugaugacccugaaggacugcaugcuccagcuggaccccuccagcaagaccuggaucgacaucgagggccgccccgaggacccgguggagaucgcccuguuccagcccuccagcgggugcuacauccacuucuuccgggagcccacggaccucaagcaguucaagcaggacgccaaguacagccacggcaucgacgucaccgaccuguucuccacccagcccggccugaccagcgccgugaucgaggcccucccgcgcaacauggugcugacgugccagggguccgacgacaucaagaagcugcucgagagccagggccggcgcgacaucaagcugaucgacaucucccugagcaaggcggacucccgcaaguucgagaacgccgucugggaccaguacaaggaccucugccacaugcacaccgggguggucguggagaagaagaagcggggcgggaaggaggagaucacgccccacugcgcccugcuggacugcaucauguucgacgccgccaccaccggcagccucaacaucaccacccugcgcgcggugcugccccgggacauggucuuccgcaccuccacgcccaagguggugcucugaggacuaguaauaaggaaacuguaugaaugucugugggcaggaagugaagagauccuucuguaaagguuuuuggaauuaugucugcugaauaauaaacuuuuuugaaauaauaaaucugguagaaaaaugagaucucaaaggcucuuuucagagccaccaaaaaaaaaaaaaaaaaaaaaaaaaaaaaaaaaaaaaaaaaaaaaaaaaaaaaaaaaaaaaaaaagaauu

SEQ ID NO: 20078 - RNA, 2066 nt, Artificial Sequence
  mRNA product Design b-4 (hSL-A64-N5) comprising derived and/or modified sequence from LASV(803213;Clade II)__AAF86704__SP-HsALB_NP(2-569) (opt1)
aggagagucccgcagucggcguccagcggcucugcuuguucgugugugugucguugcaggccuuauucaagcuuaccaugaagugggugaccuucaucagccugcucuuccuguucuccagcgccuacuccagcgccuccaaggaggugaaguccuuccuguggacccagagccuccgccgggagcugagcggcuacugcuccaacaucaagcugcaggucgugaaggacgcccaggcgcuccugcacgggcuggacuucagcgaggugaacaacguccagcgccucaugcggaagcagaagcgcgacgacggcgaccugaagcggcugcgcgaccucaaccaggccgugaacaaccugguggagcugaaguccacccagcagaaguccauccuccgggucgggacgcugaccagcgacgaccugcucacccuggccgccgaccuggagaagcucaagagcaaggugauccgcaccgagcggccccuguccagcggcguguacauggggaaccuguccacgcagcagcucgagcagcgccgggcccugcugaacaugaucggcauggucggcggggcgcagggcacccagccggggcgcgacggcguggugcgggucugggacgugaagaaccccgaccuccugaacaaccaguucgggaccaugcccagccugacccucgccugccugacgaagcagggccagguggaccugaacgacgccguccucgcccugaccgaccugggccucaucuacaccgcgaaguaccccaacuccagcgaccuggaccgccugucccagagccacccgauccucaacaugguggacaccaagaaguccagccugaacaucagcggguacaacuucucccugggcgccgccgugaaggccggggccugcaugcucgacggcggcaacaugcuggagacgaucaaggucacgccccagaccauggacgggauccucaagagcauccugaaggugaagcggucccugggcauguucgugagcgacacccccggggagcgcaaccccuacgagaacauccuguacaagaucugccucuccggcgacggguggccguacaucgcgagccggaccuccaucgucggccgcgccugggagaacaccaccguggaccuggagagcgacggcaagccccagaagguggggaccgccggcuccaacaagagccugcaguccgccggguuccccacgggccucaccuacagccagcugaugacccugaaggacuccaugaugcagcuggaccccagcgccaagaccuggaucgacaucgaggggcggccggaggaccccgucgagaucgcgcucuaccagcccauguccggcugcuacauccacuucuuccgcgagcccacggaccugaagcaguucaagcaggacgccaaguacagccacggcaucgacguggccgaccuguucccggcccagcccgggcucaccuccgccgucaucgaggcgcugccccggaacauggugcugaccugccagggcagcgacgacaucaagaagcuccuggacucccaggggcgccgcgacaucaagcugaucgacaucagccucagcaagguggacucccggaaguucgagaacgccgucugggaccagugcaaggaccugugccacaugcacaccggcgugguggucgagaagaagaagcgcgggggcaaggaggagaucacgccccacugcgcccugauggacugcaucauguucgacgccgccgugagcggcgggcucaacaucccggugcugcgggcgguccugccccgcgacaugguguuccggaccuccagccccaaggugguccucugaggacuaguaauaaggaaacuguaugaaugucugugggcaggaagugaagagauccuucuguaaagguuuuuggaauuaugucugcugaauaauaaacuuuuuugaaauaauaaaucugguagaaaaaugagaucucaaaggcucuuuucagagccaccaaaaaaaaaaaaaaaaaaaaaaaaaaaaaaaaaaaaaaaaaaaaaaaaaaaaaaaaaaaaaaaaagaauu

SEQ ID NO: 20079 - RNA, 2069 nt, Artificial Sequence
  mRNA product Design b-4 (hSL-A64-N5) comprising derived and/or modified sequence from LASV(GA391;Clade III)__CAA36646__SP-HsALB_NP(2-570) (opt1)
aggagagucccgcagucggcguccagcggcucugcuuguucgugugugugucguugcaggccuuauucaagcuuaccaugaagugggugaccuucaucagccugcucuuccuguucuccagcgccuacuccagcgccuccaaggaggugcgcagcuuccuguggacccagucccuccggcgcgagcugagcggcuacugcuccaacaucaagcugcaggucgugaaggacgcccaggcgcuccugcacgggcuggacuucagcgagguguccaacguccagcggcucaugcgcaagcagaagcgggacgacggcgaccugaagcgccugcgggaccucaaccaggccgugaacaaccugguggagcucaagagcacccagcagaaguccguccugcgcguggggacccugagcuccgacgaccugcucauccuggccgccgaccuggagaagcucaagagcaaggugacccggaccgagcgcccccuguccagcggcgucuacauggggaaccuguccagccagcagcucgaccagcggcgcgcccugcugaacaugaucggcaugaccggcguguccgggggcgggaagggcgcgagcgacgggaucgugcgggucugggacgugaagaacgccgagcuccugaacaaccaguucggcacgaugccgucccugacccucgccugccugaccaagcagggccagguggaccugaacgacgccguccaggcgcucaccgaccuggggcugaucuacacggccaaguaccccaacagcagcgaccucgaccgccugucccagagccaccccauccugaacaugaucgacaccaagaaguccagccucaacaucuccggcuacaacuucagccugggggccgccgugaaggccggcgcgugcaugcuggacggcgggaacaugcucgagaccaucaaggugagcccccagaccauggacggcauccucaaguccauccugaaggucaagaagucccuggggauguucgugagcgacacgccgggcgagcggaaccccuacgagaacauccuguacaagaucugccuguccggggacggcuggcccuacaucgccagccgcaccuccaucgugggccgggccugggagaacaccgucguggaccucgagcaggacaacaagccccagaagaucgggaacggcgggagcaacaagucccugcagagcgccggcuucgccgcggggcugaccuacucccagcucaugacgcugaaggacuucaagugcuucaaccugaucccgaacgccaagaccuggauggacaucgagggccgccccgaggaccccguggagaucgcccuguaccagcccagcuccggcugcuacguccacuucuuccgggagccgaccgaccucaagcaguucaagcaggacgccaaguacagccacgggaucgacgugaccgaccuguucgccgcgcagcccggccugacgagcgccgucaucgaggcccucccccgcaacauggugaucacgugccagggguccgaggacauccggaagcugcuggagagccagggccgccgcgacaucaagcucaucgacaucacccuguccaaggccgacagccggaaguucgagaacgccgugugggaccaguucaaggaccugugccacaugcacaccggggucgugguggagaagaagaagcgcggcggcaaggaggagaucacgccccacugcgcgcucauggacugcaucauguucgacgccgccgucuccgggggccuggacgccaaggugcugcgggugguccucccgcgcgacaugguguuccggaccagcacccccaaggugguccugugaggacuaguaauaaggaaacuguaugaaugucugugggcaggaagugaagagauccuucuguaaagguuuuuggaauuaugucugcugaauaauaaacuuuuuugaaauaauaaaucugguagaaaaaugagaucucaaaggcucuuuucagagccaccaaaaaaaaaaaaaaaaaaaaaaaaaaaaaaaaaaaaaaaaaaaaaaaaaaaaaaaaaaaaaaaaagaauu

SEQ ID NO: 20080 - RNA, 2066 nt, Artificial Sequence
  mRNA product Design b-4 (hSL-A64-N5) comprising derived and/or modified sequence from LASV(AV;Clade V)__CCA30315__SP-HsALB_NP(2-569) (opt1)
aggagagucccgcagucggcguccagcggcucugcuuguucgugugugugucguugcaggccuuauucaagcuuaccaugaagugggugaccuucaucagccugcucuuccuguucuccagcgccuacuccagcgccuccaaggaggugaaguccuuccuguggacccagagccuccgccgggagcugagcggcuacugcuccaacaucaagcugcaggucgugaaggacgcccaggcgcuccugcacgggcuggacuucagcgagguguccaacguccagcgccucaugcggaagcagcgccgggacgacagcgaccugaagcgccugcgggaccucaaccaggccgugaacaaccugguggagcugaaguccacccagcagaaguccguccuccgcgugggcacgcugagcagcgacgaccugcucacccuggccgccgaccuggagaagcucaaguccaaggugacccggaccgagcgcccccugagcuccggggucuacaugggcaaccugagcucccagcagcucgaccagcggcgcgcccugcugaaccucaucgggaugacgaacggcagccagggcucccaggcggggcgggacggcguggugcgcgucugggacgugaagaacgccgagcugcugaacaaccaguucgggaccaugccgagccucacccuggccugccugaccaagcagggccagguggaccucaacgacgucgugcaggcccugacggaccuggggcucaucuacaccgcgaaguaccccaacaccagcgaccuggaccggcugacccagucccaccccauccucaacaugaucgacacgaagaaguccagccugaacaucagcggcuacaacuucucccugggcgccgccgugaaggccggggccugcaugcucgacggcgggaacaugcuggagaccaucaaggucagcccccaguccauggacggcauccucaagagcauccugaaggugaagcgcgcgcugggcauguucguguccgacaccccgggggagcggaaccccuacgagaacauccuguacaagaucugccucagcggcgacggguggcccuacaucgccucccgcaccagcaucgucggccgggccugggagaacacggugguggaccuggagaccgacgggaagccccagaagaucggcuccggcaacagcaacaagucccugcagagcgccggguucuccgccggccucaccuacagccagcugaugacccugaaggacgcgaugcugcagcucgacccgaacgccaagacguggauggacaucgaggggcgccccgaggaccccgucgagguggcccuguaccagcccaucuccggcugcuacauccacuucuuccgggagccgaccgaccugaagcaguucaagcaggacgccaaguacagccacgggaucgacaucgccgaccucuucgcggcccagcccggccugaccagcgccgucaucgaggcccugccccgcaacauggugaucacgugccagggcuccgaggacaucaagaagcuccuggagagccaggggcgcaaggacaucaagcugaucgacaucgcccucuccaagaucgacagccggaaguucgagaacgcggugugggaccaguacaaggaccugugccacaugcacaccggcgucgugguggagaagaagaagcgcgggggcaaggaggagaucaccccgcacugcgcccugauggacugcaucauguucgacgccgccgucuccgggggccucaacacccuggugcugcgggcggugcucccccgcgacauggucuuccggaccagcacgccccgcguggugcugugaggacuaguaauaaggaaacuguaugaaugucugugggcaggaagugaagagauccuucuguaaagguuuuuggaauuaugucugcugaauaauaaacuuuuuugaaauaauaaaucugguagaaaaaugagaucucaaaggcucuuuucagagccaccaaaaaaaaaaaaaaaaaaaaaaaaaaaaaaaaaaaaaaaaaaaaaaaaaaaaaaaaaaaaaaaaagaauu

SEQ ID NO: 20081 - RNA, 2066 nt, Artificial Sequence
  mRNA product Design b-4 (hSL-A64-N5) comprising derived and/or modified sequence from LASV(Togo/2016/7082;Clade VI)__AMR44578__SP-HsALB_NP(2-569) (opt1)
aggagagucccgcagucggcguccagcggcucugcuuguucgugugugugucguugcaggccuuauucaagcuuaccaugaagugggugaccuucaucagccugcucuuccuguucuccagcgccuacuccagcaacuccaaggaggugaaguccuuccuguggacccagagccuccgccgggagcugagcggcuacugcuccaacaucaagcugcaggucgugaaggacgcccaggcccuccugcacgggcuggacuucagcgagguguccaacguccagcgccucaugcggaagcagaagcgcgacgacggcgaccugaagcggcugcgcgaccucaaccaggcggugaacaaccugguggagcucaagagcguccagcagaaguccauccugcggguggggacccugaccagcgacgaccugcucacccuggccgccgaccuggagaagcucaaguccaaggugacccgcaccgagcggccccugagcuccggcgucuacauggggaaccugagcucccagcagcucgaccagcgccgggcccugcugagcaugaucggcauguccggcgggaaccagaacagccagccgaagggcgacgggguggugcgcgucugggacgugaagaacgccgaccuccugaacaaccaguucggcacgaugcccucccugacccucgcgugccugaccaagcagggccagguggaccugaacgacgccguccaggcccucaccgaccuggggcugaucuacacggccaaguaccccaacagcagcgaccucgaccggcugucccagagccaccccauccugaacaugaucgacaccaagaaguccagccucaacaucuccggcuacaacuucagccugggggcggccaucaagaccggcgccugcaugcuggacgggggcaacaugcucgagaccaucaaggugacgccgcagaccauggacggcauccugaaguccauccugaaggugaagcgcagccucgggauguucaucuccgacacccccggcgagcggaaccccuacgagaacauccuguacaagaucugccugagcggggacggcuggcccuacaucgccucccgcaccgccaucaucgggcgggcgugggagaacacggucguggaccucgagagcgacuccaagccgcagaagaucggcagcaacggcuccaacaagagccugcaguccgccggguucgcccccggccugaccuacagccagcucaugacccugaaggacuccaugcugcagcuggaccccaacgccaagaccuggaucgacaucgaggggcgccccgaggacccgguggaggucgcccucuuccagcccaucagcggcugcuacauccacuucuuccgggagcccacggaccugaagcaguucaagcaggacgcgaaguacagccacgggaucgacgugaccgaccuguucgccgcccagcccggccucaccuccgccgugaucgaggcccugccgcgcaacaugguccugaccugccagggcagcgacgacaucaagaagcuccuggacucccaggggcggcgcgacaucaagcugaucgacgugagccucaacaagaucgacucccgcaaguucgagaacgcggucugggaccaguacaaggaccugugccacaugcacacgggcgugguggucgagaagaagaagaagggcgggaaggaggagaucacgccccacugcgcccugcucgacugcaucauguucgacgccgccgugagcgggggccugaacgccaccgugcugcgggcgguccucccccgcgacaugguguuccggaccuccagccccaaggugguccugugaggacuaguaauaaggaaacuguaugaaugucugugggcaggaagugaagagauccuucuguaaagguuuuuggaauuaugucugcugaauaauaaacuuuuuugaaauaauaaaucugguagaaaaaugagaucucaaaggcucuuuucagagccaccaaaaaaaaaaaaaaaaaaaaaaaaaaaaaaaaaaaaaaaaaaaaaaaaaaaaaaaaaaaaaaaaagaauu

SEQ ID NO: 20082 - RNA, 2066 nt, Artificial Sequence
  mRNA product Design b-4 (hSL-A64-N5) comprising derived and/or modified sequence from LASV(KAK-428;Clade n.d. (VII))__ANH09741__SP-HsALB_NP(2-569) (opt1)
aggagagucccgcagucggcguccagcggcucugcuuguucgugugugugucguugcaggccuuauucaagcuuaccaugaagugggugaccuucaucagccugcucuuccuguucuccagcgccuacuccagcaacuccaaggaggugaaguccuuccuguggacccagagccuccgccgggagcugagcggcuacugcaccaacaucaagcugcaggucgugaaggacgcccaggcccuccugcacgggcuggacuucuccgaggugagcaacguccagcgccucaugcggaagcagaagcgcgacgacaacgaccugaagcggcugcgcgaccucaaccaggcggugaacaaccugguggagcugaaguccguccagcagaaguccgugcucaaggugggcacgcugaacagcgacgaccugcucacccuggccgccgaccuggagaagcucaagagcaaggucgugcggaccgagcgcccccuguccagcgggguguacaugggcaaccuguccagccagcagcucgaccagcggcgcgcccugcugaacaugaucgggauggccggcggcucccaggggaaccagccgagccgggacggcgucgugcgcgugugggacgucaagaacgcggaccuccugaacaaccaguucgggaccaugcccucccugacgcucgccugccugaccaagcagggccagguggaccugaacgacgugguccucgcccugaccgaccuggggcucaucuacaccgccaaguaccccaacagcuccgaccuggaccggcugagccagaaccaccccgugcucaacaugaucgacgugaacaagagcucccugaacaucagcggcuacaacuucucccugggcgcggccgucaaggccggggccugcaugcucgacggcgggaacaugcuggagacgaucaagaucagcccgcagaccguggacggcauccugaaguccauccucaaggugaagcgcgcccugggcauguucgucagcgacacccccggggagcggaaccccuacgagaacauccuguacaaggugugccucuccggcaacggguggcccuacaucgcgagccgcaccuccaucgucggccgggccugggagaacacggugguggaccuggagagcaacaagaaccagccgaaggucgggaacaacggcuccaacaagaugcugcagagcuccggcuucgccaccgggcucaccuacagccagcugaugacccugcgcgacuccaugcugcagcucgaccccacggccaagaccuggaucgacaucgagggccggcccgaggaccccguggagcuggcccuguuccagccgagcuccgggugcuacauccacuucuuccgcgagcccaccgaccucaagcaguucaagcaggacgcgaaguacagccacggcaucgacgugaacgaccuguucuccgcccagcccgggcugaccagcgccguccucgaggcccugccccggaacauggugcugacgugccagggcagcgacgacauccgcaagcuccuggacucccaggaccgcaaggacaucaagcugaucgacaucagccucuccaaggccgacgcgcggaaguucgagaacgacgugugggaccaguucaaggaccugugccacaugcacaccggcaucgucguggagaagaagaagaagggcgggaagcaggagaugaccccgcacugcgcccugcucgacugcaucauguucgacgccgccgugagcgggggccugaacguccccacccugcgcgccgugcuccccacggacaugguguuccggaccaucaccaccaaggucgugcugugaggacuaguaauaaggaaacuguaugaaugucugugggcaggaagugaagagauccuucuguaaagguuuuuggaauuaugucugcugaauaauaaacuuuuuugaaauaauaaaucugguagaaaaaugagaucucaaaggcucuuuucagagccaccaaaaaaaaaaaaaaaaaaaaaaaaaaaaaaaaaaaaaaaaaaaaaaaaaaaaaaaaaaaaaaaaagaauu

SEQ ID NO: 20083 - RNA, 2066 nt, Artificial Sequence; identical to SEQ ID NO: 20077
  mRNA product Design b-4 (hSL-A64-N5) comprising derived and/or modified sequence from LASV(Pinneo-NIG-1969;Clade I)__AIT17837__SP-HsALB_NP(2-569) (opt1)

SEQ ID NO: 20084 - RNA, 2066 nt, Artificial Sequence
  mRNA product Design b-4 (hSL-A64-N5) comprising derived and/or modified sequence from LASV(ISTH0009-NIG-2011;Clade II)__AIT17405__SP-HsALB_NP(2-569) (opt1)
aggagagucccgcagucggcguccagcggcucugcuuguucgugugugugucguugcaggccuuauucaagcuuaccaugaagugggugaccuucaucagccugcucuuccuguucuccagcgccuacuccagcguguccaaggaggucaagagcuuccuguggacccagucccuccgccgggagcugagcggcuacugcuccaacaucaagcuccagguggugaaggacgcccaggcccugcugcacgggcuggacuucagcgaggucuccaacgugcagcgccucaugcggaagcagaagcgcgacgacagcgaccugaagcggcugcgcgaccucaaccaggcggugaacaaccuggucgagcugaaguccacccagcagaaguccauccuccgggugggcacccugaccagcgacgaccugcucacccuggccgccgaccuggagaagcucaagagcaaggugauccgcaccgagcggccccuguccagcggggucuacaugggcaaccuguccacgcagcagcucgagcagcgccgggcccugcugaacaugaucgggauggugggcggcgcccaggggacccagccgggccgcgacggggugguccgggugugggacgugaagaaccccgaccuccugaacaaccaguucggcaccaugcccagccugacccucgcgugccugacgaagcaggggcaggucgaccugaacgacgccgugcucgcccugaccgaccugggccucaucuacaccgccaaguaccccaacuccagcgaccuggaccgccugucccagagccacccgauccucaacaugguggacaucaagaaguccagccugaacaucagcggcuacaacuucucccugggggcggccgucaaggccggcgccugcaugcucgacgggggcaacaugcuggagaccaucaaggugacgccccagaccauggacggcauccucaagagcauccugaaggugaagcggucccuggggauguucgucagcgacacccccggcgagcgcaaccccuacgagaacauccuguacaagaucugccucuccggggacggcuggccguacaucgccagccggaccuccaucguggggcgcgcgugggagaacacgaccguggaccuggagagcgacggcaagccccagaaggucggcuccgccgggagcaacaagucccugcagagcgccggcuuccccaccgggcucaccuacucccagcugaugacgcugaaggacagcaugaugcagcuggaccccuccgccaagaccuggaucgacaucgagggccggccggaggaccccguggagaucgcccucuaccagcccaugagcgggugcuacauccacuucuuccgcgagcccaccgaccugaagcaguucaagcaggacgcgaaguacucccacggcaucgacgucgccgaccuguucccggcccagcccggccucaccagcgccgugaucgaggcccugccccggaacauggugcugacgugccaggggagcgacgacaucaagcgccuccuggacucccagggccgccgggacaucaagcugaucgacaucgcgcucagcaaggccgacucccgccgguucgagaacgccgucugggaccagugcaaggaccugugccacaugcacaccggggugguggucgagaagaagaagcgcggcgggaaggaggagaucacgccccacugcgcccugauggacugcaucauguacgacgccgcggugagcggcggccucaacaucccggugcugcgggccguccugccccgcgacaugguguuccggaccuccagccccaaggugguccucugaggacuaguaauaaggaaacuguaugaaugucugugggcaggaagugaagagauccuucuguaaagguuuuuggaauuaugucugcugaauaauaaacuuuuuugaaauaauaaaucugguagaaaaaugagaucucaaaggcucuuuucagagccaccaaaaaaaaaaaaaaaaaaaaaaaaaaaaaaaaaaaaaaaaaaaaaaaaaaaaaaaaaaaaaaaaagaauu

SEQ ID NO: 20085 - RNA, 2066 nt, Artificial Sequence
  mRNA product Design b-4 (hSL-A64-N5) comprising derived and/or modified sequence from LASV(ISTH2010-NIG-2012;Clade II)__AIT17483__SP-HsALB_NP(2-569) (opt1)
aggagagucccgcagucggcguccagcggcucugcuuguucgugugugugucguugcaggccuuauucaagcuuaccaugaagugggugaccuucaucagccugcucuuccuguucuccagcgccuacuccagcgccuccaaggaggugaaguccuuccuguggacccagagccuccgccgggagcugagcggcuacugcuccaacaucaagcugcaggucgugaaggacgcccaggcgcuccugcacgggcuggacuucagcgagguguccaacguccagcgccucaugcggaagcagaagcgcgacgacagcgaccugaagcggcugcgcgaccucaaccaggccgugaacaaccugguggagcugaaguccacccagcagaaguccauccuccgggucggcacgcugaccagcgacgaccugcucacccuggccgccgaccuggagaagcucaagagcaaggugauccgcaccgagcggccccuguccagcgggguguacaugggcaaccuguccacgcagcagcucgagcagcgccgggcccugcugaaccucaucgggauggucggcggcgcgcaggggacccagccgggccgcgacgggguggugcgggucugggacgugaagaaccccgaccugcugaacaaccaguucggcaccaugcccagccucacccuggccugccugacgaagcagggccagguggaccucaacgacgccguccuggcccugaccgaccucgggcugaucuacaccgcgaaguaccccaacuccagcgaccuggaccgccucucccagagccacccgauccugaacaugguggacaccaagaaguccagccugaacaucagcggcuucaacuucucccucggggccgccgugaaggccggcgccugcaugcuggacgggggcaacaugcuggagacgaucaaggucacgccccagaccauggacggcauccucaagagcauccugaaggugaagaagucccuggggauguucgugagcgacacccccggcgagcggaaccccuacgagaacauccucuacaagaucugccuguccggggacggcuggccguacaucgcgagccgcaccuccaucgucgggcgggccugggagaacaccaccguggaccuggagagcgacggcaagccccacaaggugggcaccgccggguccaacaagagccuccaguccgccggcuuccccacggggcugaccuacagccagcugaugacccugaaggacuccaugaugcagcucgaccccagcgccaagaccuggaucgacaucgagggccgcccggaggaccccgucgagaucgcgcuguaccagcccauguccgggugcuacauccacuucuuccgggagcccacggaccugaagcaguucaagcaggacgccaaguacagccacggcaucgacguggccgaccucuucccggcccagcccggccugaccuccgccgucaucgaggcgcugccccgcaacauggugcugaccugccaggggagcgacgacaucaagcggcuccuggacagccagggccgccgcgacaucaagcucaucgacaucgcccuguccaaggccgacagccggcgcuucgagaacgccgugugggaccagugcaaggaccugugccacaugcacaccggggucgugguggagaagaagaagcggggcgggaaggaggagaucacgccccacugcgcccucauggacugcaucauguacgacgcggccgucuccggcggccugaacaucccggugcugcgcgccgugcucccccgggacauggucuuccgcaccagcucccccaagguggugcugugaggacuaguaauaaggaaacuguaugaaugucugugggcaggaagugaagagauccuucuguaaagguuuuuggaauuaugucugcugaauaauaaacuuuuuugaaauaauaaaucugguagaaaaaugagaucucaaaggcucuuuucagagccaccaaaaaaaaaaaaaaaaaaaaaaaaaaaaaaaaaaaaaaaaaaaaaaaaaaaaaaaaaaaaaaaaagaauu

SEQ ID NO: 20086 - RNA, 2066 nt, Artificial Sequence
  mRNA product Design b-4 (hSL-A64-N5) comprising derived and/or modified sequence from LASV(Lassa virus/H.sapiens-wt/NGA/2015/ISTH_0543;Clade II)__AVO03640__SP-HsALB_NP(2-569) (opt1)
aggagagucccgcagucggcguccagcggcucugcuuguucgugugugugucguugcaggccuuauucaagcuuaccaugaagugggugaccuucaucagccugcucuuccuguucuccagcgccuacuccagcgccuccaaggaggugaaguccuuccuguggacccagagccuccgccgggagcugagcggcuacugcuccaacaucaagcugcaggucgugaaggacgcccaggcgcuccugcacgggcuggacuucagcgagguguccaacguccagcgccucaugcggaagcagaagcgcgacgacagcgaccugaagcggcugcgcgaccucaaccaggccgugaacaaccugguggagcugaaguccacccagcagaaguccauccuccgggucggcacgcugaccagcgacgaccugcucacccuggccgccgaccuggagaagcucaagagcaaggugauccgcaccgagcggccccuguccagcgggguguacaugggcaaccuguccacgcagcagcucgagcagcgccgggcccugcugaacaugaucgggauggucggcggcgcgcaggggacccagccgggccgcgacgggguggugcgggucugggacgugaagaaccccgaccuccugaacaaccaguucggcaccaugcccagccugacccucgccugccugacgaagcagggccagguggaccugaacgacgccguccucgcccugaccgaccuggggcucaucuacaccgcgaaguaccccaacuccagcgaccuggaccgccugucccagagccacccgauccucaacaugguggacaccaagaaguccagccugaacaucagcggcuacaacuucucccugggggccgccgugaaggccggcgccugcaugcucgacgggggcaacaugcuggagacgaucaaggucacgccccagaccauggacggcauccucaagagcauccugaaggugaagaagucccuggggauguucgugagcgacacccccggcgagcggaaccccuacgagaacauccuguacaagaucugccucuccggggacggcuggccguacaucgcgagccgcaccuccaucgucgggcgggccugggagaacaccaccguggaccuggagagcgacggcaagccccagaaggugggcuccgccgggagcaacaagucccugcagagcgccggcuuccccaccgggcucacguacucccagcugaugacccugaaggacagcaugaugcagcuggaccccuccgccaagaccuggaucgacaucgagggccgcccggaggaccccgucgagaucgcgcucuaccagcccaugagcgggugcuacauccacuucuuccgggagcccaccgaccugaagcaguucaagcaggacgccaaguacucccacggcaucgacguggccgaccuguucccggcccagcccggccucacgagcgccgucaucgaggcgcugccccgcaacauggugcugaccugccaggggagcgacgacaucaagcggcuccuggacucccagggccgcaaggacaucaagcugaucgacaucgcccucagcaaggccgacucccgccgguucgagaacgccgugugggaccagugcaaggaccugugccacaugcacaccggggucgugguggagaagaagaagcgcggcgggaaggaggagaucacgccccacugcgcccugauggacugcaucauguacgacgcggccgucagcggcggccucaacaucccggugcugcgggccgugcugccccgcgacauggucuuccggaccuccagccccaagguggugcucugaggacuaguaauaaggaaacuguaugaaugucugugggcaggaagugaagagauccuucuguaaagguuuuuggaauuaugucugcugaauaauaaacuuuuuugaaauaauaaaucugguagaaaaaugagaucucaaaggcucuuuucagagccaccaaaaaaaaaaaaaaaaaaaaaaaaaaaaaaaaaaaaaaaaaaaaaaaaaaaaaaaaaaaaaaaaagaauu

SEQ ID NO: 20087 - RNA, 2066 nt, Artificial Sequence
  mRNA product Design b-4 (hSL-A64-N5) comprising derived and/or modified sequence from LASV(Lassa virus/H.sapiens-wt/NGA/2016/ISTH_0009;Clade II)__AVO03572__SP-HsALB_NP(2-569) (opt1)
aggagagucccgcagucggcguccagcggcucugcuuguucgugugugugucguugcaggccuuauucaagcuuaccaugaagugggugaccuucaucagccugcucuuccuguucuccagcgccuacuccagcgccuccaaggaggugaaguccuuccuguggacccagagccuccgccgggagcugagcggcuacugcuccaacaucaagcugcaggucgugaaggacgcccaggcgcuccugcacgggcuggacuucagcgagguguccaacguccagcgccucaugcggaagcagaagcgcgacgacagcgaccugaagcggcugcgcgaccucaaccaggccgugaacaaccugguggagcugaaguccacccagcagaaguccauccuccgggucggcacgcugaccagcgacgaccugcucacccuggccgccgaccuggagaagcucaagagcaaggugauccgcaccgagcggccccuguccagcgggguguacaugggcaaccuguccacgcagcagcucgagcagcgccgggcccugcugaacaugaucgggauggucggcggcgcgcaggggacccagccgggccgcgacgggguggugcgggucugggacgugaagaaccccgaccuccugaacaaccaguucggcaccaugcccagccugacccucgccugccugacgaagcagggccagguggaccugaacgacgccguccucgcccugaccgaccuggggcucaucuacaccgcgaaguaccccaacuccagcgaccuggaccgccugucccagagccacccgauccucaacaugguggacaccaagaaguccagccugaacaucagcggcuacaacuucucccugggggccgccgugaaggccggcgccugcaugcucgacgggggcaacaugcuggagacgaucaaggucacgccccagaccauggacggcauccucaagagcauccugaaggugaagaagucccuggggauguucgugagcgacacccccggcgagcggaaccccuacgagaacauccuguacaagaucugccucuccggggacggcuggccguacaucgcgagccgcaccuccaucgucgggcgggccugggagaacaccaccguggaccuggagagcgacggcaagccccagaaggugggcuccgccgggagcaacaagucccugcagagcgccggcuuccccaccgggcucacguacucccagcugaugacccugaaggacagcaugaugcagcuggaccccuccgccaagaccuggaucgacaucgagggccgcccggaggaccccgucgagaucgcgcucuaccagcccaugagcgggugcuacauccacuucuuccgggagcccaccgaccugaagcaguucaagcaggacgccaaguacucccacggcaucgacguggccgaccuguucccggcccagcccggccucacgagcgccgucaucgaggcgcugccccgcaacauggugcugaccugccaggggagcgacgacaucaagcggcuccuggacucccagggccgccgcgacaucaagcugaucgacaucgcccucagcaaggccgacucccggcgcuucgagaacgccgugugggaccagugcaaggaccugugccacaugcacaccggggucgugguggagaagaagaagcggggcgggaaggaggagaucacgccccacugcgcccugauggacugcaucauguacgacgcggccgucagcggcggccucaacaucccggugcugcgcgccgugcugccccgggacauggucuuccgcaccuccagccccaagguggugcucugaggacuaguaauaaggaaacuguaugaaugucugugggcaggaagugaagagauccuucuguaaagguuuuuggaauuaugucugcugaauaauaaacuuuuuugaaauaauaaaucugguagaaaaaugagaucucaaaggcucuuuucagagccaccaaaaaaaaaaaaaaaaaaaaaaaaaaaaaaaaaaaaaaaaaaaaaaaaaaaaaaaaaaaaaaaaagaauu

SEQ ID NO: 20088 - RNA, 2066 nt, Artificial Sequence
  mRNA product Design b-4 (hSL-A64-N5) comprising derived and/or modified sequence from LASV(Lassa virus/H.sapiens-wt/NGA/2016/ISTH_0017;Clade II)__AVO03568__SP-HsALB_NP(2-569) (opt1)
aggagagucccgcagucggcguccagcggcucugcuuguucgugugugugucguugcaggccuuauucaagcuuaccaugaagugggugaccuucaucagccugcucuuccuguucuccagcgccuacuccagcgccuccaaggaggugaaguccuuccuguggacccagagccuccgccgggagcugagcggcuacugcuccagcaucaagcugcaggucgugaaggacgcccaggcgcuccugcacgggcuggacuucuccgaggugagcaacguccagcgccucaugcggaagcagaagcgcgacgacuccgaccugaagcggcugcgcgaccucaaccaggccgugaacaaccugguggagcucaagagcacccagcagaaguccauccugcgggucggcacgcugaccagcgacgaccugcucacccuggccgccgaccuggagaagcucaaguccaaggugauccgcaccgagcggccccugagcuccgggguguacaugggcaaccugagcacgcagcagcucgagcagcgccgggcccugcugaacaugaucgggauggcgggcggcgcccaggggacccagccgggccgcgacggggucgugcgggugugggacgucaagaaccccgaccuccugaacaaccaguucggcaccaugcccucccugacccucgccugccugacgaagcagggccagguggaccugaacgacgccgugcucgcgcugaccgaccuggggcucaucuacaccgccaaguaccccaacagcuccgaccuggaccgccugagccagagccacccgauccucaacauggucgacaccaagaaguccagccugaacaucuccggcuacaacuucagccugggggccgccgugaaggccggcgcgugcaugcucgacgggggcaacaugcuggagacgaucaaggugacgccccagaccauggacggcauccugaaguccauccucaaggucaagcggagccuggggauguucguguccgacgcccccggcgagcgcaaccccuacgagaacauccuguacaagaucugccucagcggggacggcuggccguacaucgccucccggaccagcaucguggggcgcgccugggagaacaccaccgucgaccuggaguccgacggcaagccccagaaggugggcgccaccgggagcaacaagucccugcagagcgcgggcuuccccaccgggcucacguacucccagcugaugacccugaaggacagcaugaugcagcuggaccccuccgccaagaccuggaucgacaucgagggccggccggaggaccccguggaggucgcccucuaccagcccgugagcgggugcuacauccacuucuuccgcgagcccaccgaccugaagcaguucaagcaggacgccaaguacucccacggcaucgacgucgccgaccuguucccggcgcagcccggccucacgagcgccgugaucgaggcccugccccggaacauggugcugaccugccaggggagcgacgacaucaagaagcuccuggacucccagggccgcaaggacaucaagcugaucgacaucgcccucagcaaggccgacucccgccgguucgagaacgcggucugggaccagugcaaggaccugugccacaugcacaccggggugguggucgagaagaagaagcgcggcgggaaggaggagaucacgccccacugcgcccugauggacugcaucauguacgacgccgccgugagcggcggccucaacaucccggugcugcgggcgguccugccccgcgacaugguguuccggaccuccagccccaaggugguccucugaggacuaguaauaaggaaacuguaugaaugucugugggcaggaagugaagagauccuucuguaaagguuuuuggaauuaugucugcugaauaauaaacuuuuuugaaauaauaaaucugguagaaaaaugagaucucaaaggcucuuuucagagccaccaaaaaaaaaaaaaaaaaaaaaaaaaaaaaaaaaaaaaaaaaaaaaaaaaaaaaaaaaaaaaaaaagaauu

SEQ ID NO: 20089 - RNA, 2066 nt, Artificial Sequence
  mRNA product Design b-4 (hSL-A64-N5) comprising derived and/or modified sequence from LASV(Lassa virus/H.sapiens-wt/NGA/2018/ISTH_0959;Clade II)__AVV65100__SP-HsALB_NP(2-569) (opt1)
aggagagucccgcagucggcguccagcggcucugcuuguucgugugugugucguugcaggccuuauucaagcuuaccaugaagugggugaccuucaucagccugcucuuccuguucuccagcgccuacuccagcgccuccaaggaggugaaguccuuccuguggacccagagccuccgccgggagcugagcggcuacugcuccaacaucaagcugcaggucgugaaggacgcccaggcgcuccugcacgggcuggacuucagcgagguguccaacguccagcgccucaugcggaagcagaagcgcgacgacagcgaccugaagcggcugcgcgaccucaaccaggccgugaacaaccugguggagcugaaguccacccagcagaaguccauccuccgggucggcacccugaccagcgacgaccugcucacccuggccgccgaccuggagaagcucaagagcaaggugauccgcaccgagcggccccuguccagcgggguguacaugggcaaccuguccacgcagcagcucgagcagcgccgggcccugcugaaccucaucgggauggucggcggcgcgcaggggacccagccgggccgcgacgggguggugcgggucugggacgugaagaaccccgaccugcugaacaaccaguucggcaccaugcccagccucacccuggccugccugacgaagcagggccagguggaccucaacgacgucgugcuggcccugaccgaccucgggcugaucuacaccgccaaguaccccaacuccagcgaccuggaccgccucucccagagccacccgauccugaacaugguggacaccaagaaguccagccugaacaucagcggcuucaacuucucccucggggcggccgucaaggccggcgccugcaugcuggacgggggcaacaugcuggagacgaucaaggugacgccccagaccauggacggcauccucaagagcauccugaaggugaagaagucccuggggauguucgucagcgacacccccggcgagcggaaccccuacgagaacauccucuacaagaucugccuguccggggacggcuggccguacaucgccagccgcaccuccaucguggggcgggcgugggagaacaccaccguggaccuggagagcgacggcaagccccacaaggucggcaccgccggguccaacaagagccuccaguccgccggcuuccccacggggcugaccuacagccagcugaugacccugaaggacuccaugaugcagcucgaccccagcgccaagaccuggaucgacaucgagggccgcccggaggaccccguggagaucgcccuguaccagcccauguccgggugcuacauccacuucuuccgggagcccacggaccugaagcaguucaagcaggacgcgaaguacagccacggcaucgacgucgccgaccucuucccggcccagcccggccugaccuccgccgugaucgaggcccugccccgcaacauggugcugaccugccaggggagcgacgacaucaagcggcuccuggacagccagggccgcaaggacaucaagcucaucgacaucgcgcuguccaagaccgacagccgccgguucgagaacgccgucugggaccagugcaaggaccugugccacaugcacacgggggugguggucgagaagaagaagcgcggcgggaaggaggagaucacgccccacugcgcccucauggacugcaucauguacgacgccgccguguccggcggccugaacaucccggugcugcgggcgguccucccccgcgacaugguguuccggaccagcucccccaaggugguccugugaggacuaguaauaaggaaacuguaugaaugucugugggcaggaagugaagagauccuucuguaaagguuuuuggaauuaugucugcugaauaauaaacuuuuuugaaauaauaaaucugguagaaaaaugagaucucaaaggcucuuuucagagccaccaaaaaaaaaaaaaaaaaaaaaaaaaaaaaaaaaaaaaaaaaaaaaaaaaaaaaaaaaaaaaaaaagaauu

SEQ ID NO: 20090 - RNA, 2066 nt, Artificial Sequence
  mRNA product Design b-4 (hSL-A64-N5) comprising derived and/or modified sequence from LASV(LASV003-NIG-2008;Clade II)__AIT17581__SP-HsALB_NP(2-569) (opt1)
aggagagucccgcagucggcguccagcggcucugcuuguucgugugugugucguugcaggccuuauucaagcuuaccaugaagugggugaccuucaucagccugcucuuccuguucuccagcgccuacuccagcgccuccaaggaggugaaguccuuccuguggacccagagccuccgccgggagcugagcggcuacugcuccagcaucaagcugcaggucgugaaggacgcccaggcgcuccugcacgggcuggacuucuccgaggugagcaacguccagcgccucaugcggaagcagaagcgcgacgacuccgaccugaagcggcugcgcgaccucaaccaggccgugaacaaccugguggagcucaagagcacccagcagaaguccguccugcgggugggcacccugaccagcgacgaccugcucacccuggccgccgaccuggagaagcucaaguccaaggugauccgcaccgagcggccccugagcuccggggucuacaugggcaaccugagcgcccagcagcucgagcagcgccggacgcugcugaacaugaucgggauggugggcggcgcgcaggggacccagccgggccgcgacggggugguccgggugugggacgugaagaaccccgaccuccugaacaaccaguucggcaccaugcccucccugacccucgccugccugacgaagcaggggcaggucgaccugaacgacguggugcucgcccugaccgaccugggccucaucuacaccgccaaguaccccaacagcuccgaccuggaccgccugagccagagccacccgauccucuccauggucgacaccaagaaguccagccugaacaucagcggcuacaacuucucccugggggcggccgugaaggccggcgccugcaugcucgacgggggcaacaugcuggagacgaucaaggugacgccccagaccauggacggcauccucaagagcauccugaaggucaagaagucccuggggauguucgugagcgacacccccggcgagcggaaccccuacgagaacauccuguacaagaucugccucuccggggacggcuggccguacaucgccagccgcaccuccaucguggggcgggcgugggagaacaccaccgucgaccuggagagcgacggcaagccccagaaggugggcaccgccggguccaacaagagccugcaguccgccggcuuccccacggggcucaccuacagccagcugaugacccugaaggacuccaugaugcagcuggaccccagcgccaagaccuggaucgacaucgagggccgcccggaggaccccgucgagaucgcccucuaccagcccauguccgggugcuacauccacuucuuccgggagcccacggaccugaagcaguucaagcaggacgcgaaguacagccacggcaucgacgugaccgaccuguucccggcccagcccggccucaccagcgccgugaucgaggcccugccccgcaacaugguccugaccugccagggguccgacgacaucaagcggcuccuggacagccagggccgccgcgacaucaagcugaucgacaucgcccucuccaaggcggacagccggcgcuucgagaacgccgugugggaccagugcaaggaccugugccacaugcacacggggguggucguggagaagaagaagcggggcgggaaggaggagaucacgccccacugcgcccugauggacugcaucauguacgacgccgccguguccggcggccucaacaucccgguccugcgcgcggugcugccccgggacaugguguuccgcaccagcucccccaaggucgugcucugaggacuaguaauaaggaaacuguaugaaugucugugggcaggaagugaagagauccuucuguaaagguuuuuggaauuaugucugcugaauaauaaacuuuuuugaaauaauaaaucugguagaaaaaugagaucucaaaggcucuuuucagagccaccaaaaaaaaaaaaaaaaaaaaaaaaaaaaaaaaaaaaaaaaaaaaaaaaaaaaaaaaaaaaaaaaagaauu

SEQ ID NO: 20091 - RNA, 2066 nt, Artificial Sequence
  mRNA product Design b-4 (hSL-A64-N5) comprising derived and/or modified sequence from LASV(LASV035-NIG-2009;Clade II)__AIT17589__SP-HsALB_NP(2-569) (opt1)
aggagagucccgcagucggcguccagcggcucugcuuguucgugugugugucguugcaggccuuauucaagcuuaccaugaagugggugaccuucaucagccugcucuuccuguucuccagcgccuacuccagcgccuccaaggaggugaaguccuuccuguggacccagagccuccgccgggagcugagcggcuacugcuccagcaucaagcugcaggucgugaaggacgcccaggcgcuccugcacgggcuggacuucuccgaggugagcaacguccagcgccucaugcggaagcagaagcgcgacgacuccgaccugaagcggcugcgcgaccucaaccaggccgugaacaaccugguggagcucaagagcacccagcagaaguccauccugcgggucggcacgcugaccagcgacgaccugcucacccuggccgccgaccuggagaagcucaaguccaaggugauccgcaccgagcggccccugagcuccgggguguacaugggcaaccugagcgcccagcagcucgagcagcgccgggcgcugcugaacaugaucgggauggucggcggcgcccaggggacgcagccgggccgcgacgggguggugcgggucugggacgugaagaaccccgaccuccugaacaaccaguucggcaccaugcccucccugacccucgccugccugaccaagcagggccagguggaccugaacgacgccguccucgcgcugacggaccuggggcucaucuacaccgccaaguaccccaacagcuccgaccuggaccgccugagccagagccacccgauccucaacaugguggacaccaagaaguccagccugaacaucuccggcuacaacuucagccugggggccgccgugaaggccggcgcgugcaugcucgacgggggcaacaugcuggagaccaucaaggucacgccccagaccauggacggcauccugaaguccauccucaaggugaagcggagccuggggauguucguguccgacacccccggcgagcgcaaccccuacgagaacauccuguacaagaucugccucagcggggacggcuggccguacaucgccucccggaccagcaucgucgggcgcgccugggagaacacgaccguggaccuggaguccgacggcaagccccagaaggugggcaccaccgggagcaacaagucccugcagagcgccggcuuccccacggggcucaccuacucccagcugaugacccugaaggacagcaugaugcagcuggaccccuccgccaagaccuggaucgacaucgagggccggccggaggaccccgucgagaucgcgcucuaccagcccaugagcgggugcuacauccacuucuuccgcgagcccacggaccugaagcaguucaagcaggacgccaaguacucccacggcaucgacguggccgaccuguucccggcccagcccggccucaccagcgccgucaucgaggcgcugccccggaacauggugcugaccugccaggggagcgacgacaucaagaagcuccuggacucccagggccgccgcgacaucaagcugaucgacaucgcccucagcaaggccgacucccggaaguucgagaacgccgugugggaccagugcaaggaccugugccacaugcacaccggggucgugguggagaagaagaagcgcggcgggaaggaggagaucacgccccacugcgcccugauggacugcaucauguacgacgcggccgucagcggcggccucaacaucccggugcugcgggccgugcugccccgcgacauggucuuccggaccuccagccccaagguggugcucugaggacuaguaauaaggaaacuguaugaaugucugugggcaggaagugaagagauccuucuguaaagguuuuuggaauuaugucugcugaauaauaaacuuuuuugaaauaauaaaucugguagaaaaaugagaucucaaaggcucuuuucagagccaccaaaaaaaaaaaaaaaaaaaaaaaaaaaaaaaaaaaaaaaaaaaaaaaaaaaaaaaaaaaaaaaaagaauu

SEQ ID NO: 20092 - RNA, 2066 nt, Artificial Sequence
  mRNA product Design b-4 (hSL-A64-N5) comprising derived and/or modified sequence from LASV(LASV1000-NIG-2009;Clade II)__AIT17783__SP-HsALB_NP(2-569) (opt1)
aggagagucccgcagucggcguccagcggcucugcuuguucgugugugugucguugcaggccuuauucaagcuuaccaugaagugggugaccuucaucagccugcucuuccuguucuccagcgccuacuccagcgccuccaaggaggugaaguccuuccuguggacccagagccuccgccgggagcugagcggcuacugcuccaacaucaagcugcaggucgugaaggacgcccaggcgcuccugcacgggcuggacuucagcgagguguccaacguccagcgccucaugcggaagcagaagcgcgacgacagcgaccugaagcggcugcgcgaccucaaccaggccgugaacaaccugguggagcugaaguccacccagcagaaguccauccuccgggucggcacgcugaccagcgacgaccugcucacccuggccgccgaccuggagaagcucaagagcaaggugauccgcaccgagcggccccuguccagcgggguguacaugggcaaccuguccacgcagcagcucgagcagcgccgggcccugcugaacaugaucgggauggucggcggcgcgcaggggacccagccgggccgcgacgggguggugcgggucugggacgugaagaaccccgaccuccugaacaaccaguucggcaccaugcccagccugacccucgccugccugacgaagcagggccagguggaccugaacgacgucgugcucgcccugaccgaccuggggcucaucuacaccgccaaguaccccaacuccagcgaccuggaccgccugucccagagccacccgauccucaacaugguggacaccaagaaguccagccugaacaucagcggcuacaacuucucccugggggcggccgucaaggccggcgccugcaugcucgacgggggcaacaugcuggagacgaucaaggugacgccccagaccauggacggcauccucaagagcauccugaaggugaagaagucccuggggauguucgucagcgacacccccggcgagcggaaccccuacgagaacauccuguacaagaucugccucuccggggacggcuggccguacaucgccagccgcaccuccaucguggggcgggcgugggagaacaccaccguggaccuggagagcgacggcaagccccagaaggucggcaccgccggguccaacaagagccugcaguccgccggcuuccccacggggcucaccuacagccagcugaugacccugaaggacuccaugaugcagcuggaccccagcgccaagaccuggaucgacaucgagggccgcccggaggaccccguggagaucgcccucuaccagcccgucuccgggugcuacauccacuucuuccgggagcccacggaccugaagcaguucaagcaggacgcgaaguacagccacggcaucgacguggccgaccuguucccggcccagcccggccucaccuccgccgugaucgaggcccugccccgcaacaugguccugaccugccaggggagcgacgacaucaagcggcuccuggacagccagggccgccgcgacaucaagcugaucgacaucgcgcucuccaaggccgacagccggcgcuucgagaacgccgugugggaccagugcaaggaccugugccacaugcacaccgggguggucguggagaagaagaagcggggcgggaaggaggagaucacgccccacugcgcccugauggacugcaucauguacgacgccgcgguguccggcggccucaacaucccgguccugcgcgccgugcugccccgggacaugguguuccgcaccagcucccccaaggucgugcucugaggacuaguaauaaggaaacuguaugaaugucugugggcaggaagugaagagauccuucuguaaagguuuuuggaauuaugucugcugaauaauaaacuuuuuugaaauaauaaaucugguagaaaaaugagaucucaaaggcucuuuucagagccaccaaaaaaaaaaaaaaaaaaaaaaaaaaaaaaaaaaaaaaaaaaaaaaaaaaaaaaaaaaaaaaaaagaauu

SEQ ID NO: 20093 - RNA, 2066 nt, Artificial Sequence
  mRNA product Design b-4 (hSL-A64-N5) comprising derived and/or modified sequence from LASV(LASV221-NIG-2010;Clade II)__AIT17625__SP-HsALB_NP(2-569) (opt1)
aggagagucccgcagucggcguccagcggcucugcuuguucgugugugugucguugcaggccuuauucaagcuuaccaugaagugggugaccuucaucagccugcucuuccuguucuccagcgccuacuccagcgccuccaaggaggugaaguccuuccuguggacccagagccuccgccgggagcugagcggcuacugcuccagcaucaagcugcaggucgugaaggacgcccaggcgcuccugcacgggcuggacuucuccgaggugagcaacguccagcgccucaugcggaagcagcgccgggacgacuccgaccugaagcgccugcgggaccucaaccaggccgugaacaaccugguggagcucaagagcacccagcagaaguccauccugcgcgucggcacgcugaccagcgacgaccugcucacccuggccgccgaccuggagaagcucaaguccaaggugauccggaccgagcgcccccugagcuccgggguguacaugggcaaccugagcacgcagcagcucgagcagcggcgcgcccugcugaacaugaucgggauggucggcggcgcgcaggggacccagccgggccgggacgggguggugcgcgucugggacgugaagaaccccgaccuccugaacaaccaguucggcaccaugcccucccugacccucgccugccugacgaagcagggccagguggaccugaacgacgccguccucgcccugaccgaccuggggcucaucuacaccgcgaaguaccccaacagcuccgaccuggaccggcugagccagagccacccgauccucaacaugguggacaccaagaaguccagccugaacaucuccggcuacaacuucagccugggggccgccgugaaggccggcgccugcaugcucgacgggggcaacaugcuggagacgaucaaggucacgccccagaccguggacggcauccugaaguccauccucaaggugaagcgcagccuggggauguucgucuccgacacccccggcgagcggaaccccuacgagaacauccuguacaagaucugccucagcggggacggcuggccguacaucgcgucccgcaccagcaucguggggcgggccugggagaacaccaccguggaccuggaguccgacggcaagccccagaaggucggcaccgccgggagcaacaagucccugcagagcgccggcuuccccacggggcucaccuacucccagcugaugacccugaaggacagcaugaugcagcuggaccccuccgccaagaccuggaucgacaucgagggccgcccggaggaccccguggagaucgcgcucuaccagcccaugagcgggugcuacauccacuucuuccgggagcccacggaccugaagcaguucaagcaggacgccaaguacucccacggcaucgacgucgccgaccuguucccggcccagcccggccucaccagcgccgugaucgaggcgcugccccgcaacauggugcugaccugccaggggagcgacgacaucaagcgccuccuggacucccagggccggcgcgacaucaagcugaucgacaucgcccucagcaaggccgacucccggaaguucgagaacgccgucugggaccagugcaaggaccugugccacaugcacaccggggugguggucgagaagaagaagcgcggcgggaaggaggagaucacgccccacugcgcccugauggacugcaucauguacgacgcggccgugagcggcggccucaacaucccggugcugcgggccguccugccccgcgacaugguguuccggaccuccagccccaaggugguccucugaggacuaguaauaaggaaacuguaugaaugucugugggcaggaagugaagagauccuucuguaaagguuuuuggaauuaugucugcugaauaauaaacuuuuuugaaauaauaaaucugguagaaaaaugagaucucaaaggcucuuuucagagccaccaaaaaaaaaaaaaaaaaaaaaaaaaaaaaaaaaaaaaaaaaaaaaaaaaaaaaaaaaaaaaaaaagaauu

SEQ ID NO: 20094 - RNA, 2066 nt, Artificial Sequence
  mRNA product Design b-4 (hSL-A64-N5) comprising derived and/or modified sequence from LASV(LASV237-NIG-2010;Clade II)__AIT17639__SP-HsALB_NP(2-569) (opt1)
aggagagucccgcagucggcguccagcggcucugcuuguucgugugugugucguugcaggccuuauucaagcuuaccaugaagugggugaccuucaucagccugcucuuccuguucuccagcgccuacuccagcgccuccaaggaggugaaguccuuccuguggacccagagccuccgccgggagcugagcggcuacugcuccaacaucaagcugcaggucgugaaggacgcccaggcgcuccugcacgggcuggacuucagcgagguguccaacguccagcgccucaugcggaagcagaagcgcgacgacagcgaccugaagcggcugcgcgaccucaaccaggccgugaacaaccugguggagcugaaguccacccagcagaaguccauccuccgggucggcacccugaccagcgacgaccugcucacccuggccgccgaccuggagaagcucaagagcaaggugauccgcaccgagcggccccuguccagcgggguguacaugggcaaccuguccacgcagcagcucgagcagcgccgggcccugcugaacaugaucgggauggucggcggcgcgcaggggacccagccgggccgcgacgggguggugcgggucugggacgugaagaaccccgaccuccugaacaaccaguucggcaccaugcccagccugacccucgccugccugacgaagcagggccagguggaccugaacgacgccguccucgcccugaccgaccuggggcucaucuacaccgcgaaguaccccaacuccagcgaccuggaccgccugucccagagccacccgauccucaacaugguggacaucaagaaguccagccugaacaucagcggcuacaacuucucccugggggccgccgugaaggccggcgccugcaugcucgacgggggcaacaugcuggagaccaucaaggucacgccccagaccauggacggcauccucaagagcauccugaaggugaagcggucccuggggauguucgugagcgacacccccggcgagcgcaaccccuacgagaacauccuguacaagaucugccucuccggggacggcuggccguacaucgcgagccggaccuccaucgucgggcgcgccugggagaacacgaccguggaccuggagagcgacggcaagccccagaaggugggcuccgccgggagcaacaagucccugcagagcgccggcuuccccaccgggcucaccuacucccagcugaugacgcugaaggacagcaugaugcagcuggaccccuccgccaagaccuggaucgacaucgagggccggccggaggaccccgucgagaucgcgcucuaccagcccaugagcgggugcuacauccacuucuuccgcgagcccaccgaccugaagcaguucaagcaggacgccaaguacucccacggcaucgacguggccgaccuguucccggcccagcccggccucaccagcgccgucaucgaggcgcugccccggaacauggugcugacgugccaggggagcgacgacaucaagcgccuccuggacucccagggccgccgggacaucaagcugaucgacaucgcccucagcaaggccgacucccgccgguucgagaacgccgugugggaccagugcaaggaccugugccacaugcacaccggggucgugguggagaagaagaagcgcggcgggaaggaggagaucacgccccacugcgcccugauggacugcaucauguacgacgcggccgucagcggcggccucaacaucccggugcugcgggccgugcugccccgcgacauggucuuccggaccuccagccccaagguggugcucugaggacuaguaauaaggaaacuguaugaaugucugugggcaggaagugaagagauccuucuguaaagguuuuuggaauuaugucugcugaauaauaaacuuuuuugaaauaauaaaucugguagaaaaaugagaucucaaaggcucuuuucagagccaccaaaaaaaaaaaaaaaaaaaaaaaaaaaaaaaaaaaaaaaaaaaaaaaaaaaaaaaaaaaaaaaaagaauu

SEQ ID NO: 20095 - RNA, 2066 nt, Artificial Sequence
  mRNA product Design b-4 (hSL-A64-N5) comprising derived and/or modified sequence from LASV(LASV253-NIG-2011;Clade II)__AIT17671__SP-HsALB_NP(2-569) (opt1)
aggagagucccgcagucggcguccagcggcucugcuuguucgugugugugucguugcaggccuuauucaagcuuaccaugaagugggugaccuucaucagccugcucuuccuguucuccagcgccuacuccagcgccuccaaggaggugaaguccuuccuguggacccagagccuccgccgggagcugagcggcuacugcuccagcaucaagcugcaggucgugaaggacgcccaggcgcuccugcacgggcuggacuucuccgaggugagcaacguccagcgccucaugcggaagcagaagcgcgacgacuccgaccugaagcggcugcgcgaccucaaccaggccgugaacaaccugguggagcucaagagcacccagcagaaguccguccugcgggugggcacccugaccagcgacgaccugcucacccuggccgccgaccuggagaagcucaaguccaaggugauccgcaccgagcggccccugagcuccggggucuacaugggcaaccugagcacgcagcagcucgagcagcgccgggcccugcugaacaugaucgggauggugggcggcgcgcaggggacccagccgggccgcgacggggugguccgggugugggacgugaagaaccccgaccuccugaacaaccaguucggcaccaugcccucccugacccucgccugccugacgaagcaggggcaggucgaccugaacgacguggugcucgcccugaccgaccugggccucaucuacaccgccaaguaccccaacagcuccgaccuggaccgccugagccagagccacccgauccucaacauggucgacaccaagaaguccagccugaacaucuccggcuacaacuucagccugggggcggccgugaaggccggcgccugcaugcucgacgggggcaacaugcuggagacgaucaaggugacgccccagaccauggacggcauccugaaguccauccucaaggucaagaagucccuggggauguucgugagcgacacccccggcgagcggaaccccuacgagaacauccuguacaagaucugccucagcggggacggcuggccguacaucgccucccgcaccagcaucguggggcgggcgugggagaacaccaccgucgaccuggaguccgacggcaagccccagaaggugggcaccgccgggagcaacaagucccugcagagcgccggcuuccccacggggcucaccuacucccagcugaugacccugaaggacagcaugaugcagcuggaccccuccgccaagaccuggaucgacaucgagggccgcccggaggaccccgucgagaucgcccucuaccagcccaugagcgggugcuacauccacuucuuccgggagcccacggaccugaagcaguucaagcaggacgcgaaguacucccacggcaucgacgugaccgaccuguucccggcccagcccggccucaccagcgccgugaucgaggcccugccccgcaacaugguccugaccugccaggggagcgacgacaucaagcggcuccuggacucccagggccgccgcgacaucaagcugaucgacaucgcccucagcaaggcggacucccggcgcuucgagaacgccgugugggaccagugcaaggaccugugccacaugcacacggggguggucguggagaagaagaagcggggcgggaaggaggagaucacgccccacugcgcccugauggacugcaucauguacgacgccgccgugagcggcggccucaacaucccgguccugcgcgcggugcugccccgggacaugguguuccgcaccuccagccccaaggucgugcucugaggacuaguaauaaggaaacuguaugaaugucugugggcaggaagugaagagauccuucuguaaagguuuuuggaauuaugucugcugaauaauaaacuuuuuugaaauaauaaaucugguagaaaaaugagaucucaaaggcucuuuucagagccaccaaaaaaaaaaaaaaaaaaaaaaaaaaaaaaaaaaaaaaaaaaaaaaaaaaaaaaaaaaaaaaaaagaauu

SEQ ID NO: 20096 - RNA, 2066 nt, Artificial Sequence
  mRNA product Design b-4 (hSL-A64-N5) comprising derived and/or modified sequence from LASV(LASV254-NIG-2011;Clade II)__AIT17675__SP-HsALB_NP(2-569) (opt1)
aggagagucccgcagucggcguccagcggcucugcuuguucgugugugugucguugcaggccuuauucaagcuuaccaugaagugggugaccuucaucagccugcucuuccuguucuccagcgccuacuccagcgccuccaaggaggugaaguccuuccuguggacccagagccuccgccgggagcugagcggcuacugcuccagcaucaagcugcaggucgugaaggacgcccaggcgcuccugcacgggcuggacuucuccgaggugagcaacguccagcgccucaugcggaagcagaagcgcgacgacuccgaccugaagcggcugcgcgaccucaaccaggccgugaacaaccugguggagcucaagagcacccagcagaaguccguccugcgggugggcacgcugaccagcgacgaccugcucacccuggccgccgaccuggagaagcucaaguccaaggugauccgcaccgagcggccccugagcuccggggucuacaugggcaaccugagcacgcagcagcucgagcagcgccgggcccugcugaacaugaucgggauggugggcggcgcgcaggggacccagccgggccgcgacggggugguccgggugugggacgugaagaaccccgaccuccugaacaaccaguucggcaccaugcccucccugacccucgccugccugacgaagcaggggcaggucgaccugaacgacgccgugcucgcccugaccgaccugggccucaucuacaccgcgaaguaccccaacagcuccgaccuggaccgccugagccagagccacccgauccucaacaugguggacaccaagaaguccagccugaacaucuccggcuacaacuucagccugggggccgccgucaaggccggcgccugcaugcucgacgggggcaacaugcuggagacgaucaaggugacgccccagaccauggacggcauccugaaguccauccucaaggugaagaagucccuggggauguucgucagcgacacccccggcgagcggaaccccuacgagaacauccuguacaagaucugccucagcggggacggcuggccguacaucgcgucccgcaccagcaucguggggcgggccugggagaacaccaucguggaccuggaguccgacggcaagccccagaaggucggcaccgccgggagcaacaagucccugcagagcgccggcuuccccaccgggcucacguacucccagcugaugacccugaaggacagcaugaugcagcuggaccccuccgccaagaccuggaucgacaucgagggccgcccggaggaccccguggagaucgcgcucuaccagcccaugagcgggugcuacauccacuucuuccgggagcccaccgaccugaagcaguucaagcaggacgccaaguacucccacggcaucgacgucgccgaccuguucccggcccagcccggccucacgagcgccgugaucgaggcgcugccccgcaacauggugcugaccugccaggggagcgacgacaucaagcggcuccuggacucccagggccgccgcgacaucaagcugaucgacaucgcccucagcaaggccgacucccggcgcuucgagaacgccgucugggaccagugcaaggaccugugccacaugcacaccggggugguggucgagaagaagaagcggggcgggaaggaggagaucacgccccacugcgcccugauggacugcaucauguacgacgcggccgugagcggcggccucaacaucccggugcugcgcgccguccugccccgggacaugguguuccgcaccuccagccccaaggugguccucugaggacuaguaauaaggaaacuguaugaaugucugugggcaggaagugaagagauccuucuguaaagguuuuuggaauuaugucugcugaauaauaaacuuuuuugaaauaauaaaucugguagaaaaaugagaucucaaaggcucuuuucagagccaccaaaaaaaaaaaaaaaaaaaaaaaaaaaaaaaaaaaaaaaaaaaaaaaaaaaaaaaaaaaaaaaaagaauu

SEQ ID NO: 20097 - RNA, 2066 nt, Artificial Sequence
  mRNA product Design b-4 (hSL-A64-N5) comprising derived and/or modified sequence from LASV(Nig08-04;Clade II)__ADU56611__SP-HsALB_NP(2-569) (opt1)
aggagagucccgcagucggcguccagcggcucugcuuguucgugugugugucguugcaggccuuauucaagcuuaccaugaagugggugaccuucaucagccugcucuuccuguucuccagcgccuacuccagcgccuccaaggaggugaaguccuuccuguggacccagagccuccgccgggagcugagcggcuacugcuccaacaucaagcugcaggucgugaaggacgcccaggcgcuccugcacgggcuggacuucagcgagguguccaacguccagcgccucaugcggaagcagaagcgcgacgacggcgaccugaagcggcugcgcgaccucaaccaggccgugaacaaccugguggagcucaagagcacccagcagaaguccguccugcggguggggacccugaccagcgacgaccugcucacccuggccgccgaccuggagaagcucaaguccaaggugauccgcaccgagcggccccugagcuccggcgucuacauggggaaccugagcacgcagcagcucgagcagcgcaaggcccugcuguccaugaucggcauggugggcggggcgcagggcacccagccggggcgggacggcgugguccgcgugugggacgugaagaaccccgaccuccugaacaaccaguucgggaccaugcccagccugacccucgccugccugacgaagcagggccaggucgaccugaacgacgccgugcucgcccugaccgaccugggccucaucuacaccgcgaaguaccccaacuccagcgaccuggaccggcugucccagagccacccgauccucaacaugguggacaccaagaaguccagccugaacaucagcggguacaacuucucccugggcgccgccgucaaggccggggccugcaugcucgacggcggcaacaugcuggagacgaucaaggugacgccccagaccauggacgggauccucaagagcauccugaaggugaagcgcucccugggcauguucgucagcgacacccccggggagcggaaccccuacgagaacauccuguacaagaucugccucuccggcgacggguggccguacaucgcgagccgcaccuccaucgugggccgggccugggagaacaccaccguggaccuggagagcgacggcaagccccagaaggucgggaccgccggcuccaacaagagccugcaguccgccggguuccccacgggccucaccuacagccagcugaugacccugaaggacuccaugaugcagcuggaccccagcgccaagaccuggaucgacaucgaggggcgcccggaggaccccguggagaucgcgcucuaccagcccauguccggcugcuacauccacuucuuccgggagcccacggaccugaagcaguucaagcaggacgccaaguacagccacggcaucgacgucaccgaccuguucuccgcccagccggggcucaccagcgccgugaucgaggcccugccccgcaacauggugcugaccugccagggcagcgacgacaucaagaagcuccuggacucccaggggcggcgcgacaucaagcugaucgacaucagccucaacaaggcggacucccgccgguucgagaacgccgucugggaccagugcaaggaccugugccacaugcacacgggcgugguggucgagaagaagaagcgcgggggcaaggaggagaucacgccccacugcgcccugauggacugcaucauguucgacgccgccgugagcggcgggcucaacauccccauccugcgggcggugcugccgcgcgacauggucuuccggaccuccagccccaagguggugcucugaggacuaguaauaaggaaacuguaugaaugucugugggcaggaagugaagagauccuucuguaaagguuuuuggaauuaugucugcugaauaauaaacuuuuuugaaauaauaaaucugguagaaaaaugagaucucaaaggcucuuuucagagccaccaaaaaaaaaaaaaaaaaaaaaaaaaaaaaaaaaaaaaaaaaaaaaaaaaaaaaaaaaaaaaaaaagaauu

SEQ ID NO: 20098 - RNA, 2069 nt, Artificial Sequence
  mRNA product Design b-4 (hSL-A64-N5) comprising derived and/or modified sequence from LASV(GA391;Clade III)__AAA46284__SP-HsALB_NP(2-570) (opt1)
aggagagucccgcagucggcguccagcggcucugcuuguucgugugugugucguugcaggccuuauucaagcuuaccaugaagugggugaccuucaucagccugcucuuccuguucuccagcgccuacuccagcgccuccaaggaggugcgcagcugccuguggacccagucccuccggcgcgagcugagcggcuacugcuccaacaucaagcugcaggucgugaaggacgcccaggcgcuccugcacgggcuggacuucagcgagguguccaacguccagcggcucaugcgcaagcagaagcgggacgacggcgaccugaagcgccugcgggaccucaaccaggccgugaacaaccugguggagcugaaguccacccagcagaaguccguccuccgcguggggacgcugagcuccgacgaccugcucauccuggccgccgaccuggagaagcucaagagcaaggugacccggaccgagcgcccccuguccagcggcgucuacauggggaaccuguccagccagcagcucgaccagcggcgcgcccugcugaacaugaucggcaugaccggcguguccgggggcgggaagggcgcgagcaacgggaucgugcgggucugggacgugaagaacgccgagcuccugaacaaccaguucggcacgaugccgucccugacccucgccugccugaccaagcagggccagguggaccugaacgacgccguccaggcgcucaccgaccuggggcugaucuacacggccaaguaccccaacagcagcgaccucgaccgccugucccagagccaccccauccugaacaugaucgacaccaagaaguccagccucaacaucuccggcuacaacuucagccugggggccgccgugaaggccggcgcgugcaugcuggacggcgggaacaugcucgagaccaucaaggugagcccccagaccauggacggcauccucaagagcauccugaaggucaagaagucccuggggauguucgugagcgacacgccgggcgagcggaaccccuacgagaacauccuguacaagaucugccuguccggggacggcuggagcuacaucgccucccgcaccagcaucgugggccgggccugggagaacaccgucguggaccucgagcaggacaacaagccccagaagaucgggaacggcggguccaacaagagccugcaguccgccggcuucgccgcggggcugaucuacagccagcucaugacccugaaggacuucaagugcuucaaccugauccccaacgccaagacguggauggacaucgagggccgcccggaggaccccguggagaucgcccuguaccagcccuccagcggcugcuacguccacuucuuccgggagcccaccgaccucaagcaguucaagcaggacgccaaguacagccacgggcgcgacgugaccgaccuguucgccgcgcagccgggccugaccuccgccgucaucgaggcccucccccggaacauggugaucacgugccaggggagcgaggacauccgcaagcugcuggagucccagggccgccgggacaucaagcucaucgacaucacccugagcaaggccgacucccgcaaguucgagaacgccgugugggaccaguucaaggaccugugccacaugcacaccggggucgugguggagaagaagaagcggggcggcaaggaggagaucacgccccacugcgcgcucauggacugcaucauguucgacgccgccgucagcgggggccuggacgccaaggugcugcgcgugguccucccccgggacaugguguuccgcaccuccaccccgaaggugguccugugaggacuaguaauaaggaaacuguaugaaugucugugggcaggaagugaagagauccuucuguaaagguuuuuggaauuaugucugcugaauaauaaacuuuuuugaaauaauaaaucugguagaaaaaugagaucucaaaggcucuuuucagagccaccaaaaaaaaaaaaaaaaaaaaaaaaaaaaaaaaaaaaaaaaaaaaaaaaaaaaaaaaaaaaaaaaagaauu

SEQ ID NO: 20099 - RNA, 2066 nt, Artificial Sequence
  mRNA product Design b-4 (hSL-A64-N5) comprising derived and/or modified sequence from LASV(Nig08-A19;Clade III)__ADU56619__SP-HsALB_NP(2-569) (opt1)
aggagagucccgcagucggcguccagcggcucugcuuguucgugugugugucguugcaggccuuauucaagcuuaccaugaagugggugaccuucaucagccugcucuuccuguucuccagcgccuacuccagcgccuccaaggaggugaaguccuuccuguggacccagucccuccgccgggagcugagcggcuacugcuccaacaucaagcugcaggucgugaaggacgcccaggcgcuccugcacgggcuggacuucagcgagguguccaacguccagcgccucaugcggaagcagaagcgcgacgacggcgaccugaagcggcugcgcgaccucaaccaggccgugaacaaccugguggagcucaagagcacccagcagaaguccguccugcggguggggacccugagcuccgacgaccugcucgugcuggccgccgaccuggagaagcucaagagcaaggucgugcgcaccgagcggccccuguccagcggcaucuacauggggaaccuguccagccagcagcucgaccagcgcaaggcccugcugaacaugaucggcaugaccggcgggaacggcgggcggaacaccacguccgacggcaucgugcgcgucugggacgugaagaacgcggagcuccugaacaaccaguucgggaccaugccgagccugacccucgccugccugaccaagcagggccagguggaccugaacgacgccguccaggcccucacggaccugggccugaucuacaccgcgaaguaccccaacuccagcgaccucgaccggcuggcccagagccaccccauccugaacaugaucgacaccaagaaguccagccucaacaucuccggguacaacuucagccugggcgccgccgugaaggccggggcgugcaugcuggacggcggcaacaugcucgagaccaucaaggugagcccccagacgauggacgggauccucaagagcauccugaaggucaagcgcucccugggcauguucaucagcgacaccccgggggagcggaaccccuacgagaacauccuguacaagaucugccuguccggcgacggguggcccuacaucgccagccgcaccuccaucgugggccgggccugggagaacaccguggucgaccucgagagcgacaacaagccccagaagacgggcaacgggggcuccaacaagagccugcaguccgccggguucgccgcgggccugaccuacagccagcucaugacccugaaggacuccaugcugcagcuggacccgaacgccaagaccuggauggacaucgaggggcgccccgaggaccccguggagaucgcccucuaccagcccagcuccggcugcuacauccacuucuuccgggagccgacggaccugaagcaguucaagcaggacgccaaguacagccacggcaucgacgugaccgaccuguucgccgcgcagcccgggcucaccagcgccgucaucgaggcccugccccgcaacauggugaucacgugccagggcuccgaggacauccggaagcugcucgagagccaggggcgccgcgacaucaagcugaucgacaucucccugagcaaggucgacucccggaaguucgagaacgccgugugggaccaguucaaggaccucugccacaugcacaccggcaucguggucgagaagaagaagcgcgggggcaaggaggagaucacgccccacugcgcccugauggacugcaucauguucgacgcggccgugagcggcgggguggacgccaagguccugcgggccgugcucccgcgcgacaugguguuccggaccuccacccccaaggucgugcugugaggacuaguaauaaggaaacuguaugaaugucugugggcaggaagugaagagauccuucuguaaagguuuuuggaauuaugucugcugaauaauaaacuuuuuugaaauaauaaaucugguagaaaaaugagaucucaaaggcucuuuucagagccaccaaaaaaaaaaaaaaaaaaaaaaaaaaaaaaaaaaaaaaaaaaaaaaaaaaaaaaaaaaaaaaaaagaauu

SEQ ID NO: 20100 - RNA, 2066 nt, Artificial Sequence
  mRNA product Design b-4 (hSL-A64-N5) comprising derived and/or modified sequence from LASV(G1180-SLE-2010;Clade IV)__AIT17169__SP-HsALB_NP(2-569) (opt1)
aggagagucccgcagucggcguccagcggcucugcuuguucgugugugugucguugcaggccuuauucaagcuuaccaugaagugggugaccuucaucagccugcucuuccuguucuccagcgccuacuccagcgccuccaaggagaucaagagcuuccuguggacccagucccuccgccgggagcugagcggcuacugcuccaacaucaagcuccagguggucaaggacgcccaggcgcugcugcacgggcuggacuucagcgagguguccaacgugcagcgccucaugcggaaggagcgccgggacgacaacgaccugaagcgccugcgggaccucaaccaggccgucaacaaccugguggagcucaagagcacccagcagaaguccauccugcgcgugggcacccugaccagcgacgaccugcucauccuggccgccgaccuggagaagcucaaguccaaggucauccggaccgagcgcccccugagcgccgggguguacaugggcaaccuguccagccagcagcucgaccagcggcgcgcgcugcuguccaugaucgggaugagcuccggcaaccagcgggcccaggccggccgcgacggggugguccgggugugggacgugaagaacgucgagcuccugaacaaccaguucggcaccaugccgagccugacgcucgccugccugaccaagcagggccagguggaccugaacgacgcggugcaggcccucaccgaccuggggcugaucuacaccgccaaguaccccaacacguccgaccucgaccgccugacccagagccaccccauccugaacaugaucgacaccaagaaguccagccucaacaucagcggguacaacuucucccugggcgccgccgucaaggcgggcgccugcaugcuggacgggggcaacaugcucgagaccaucaaggugagcccccagacgauggacgggauccugaaguccauccugaaggugaagaaggcccucggcauguucaucagcgacaccccgggcgagcggaaccccuacgagaacauccuguacaagaucugccuguccggggacggcuggcccuacaucgccagccgcaccuccaucaccgggcgggccugggagaacacggucguggaccucgagagcgacggcaagccccagaaggcgggguccaacaacagcaacaagucccugcagagcgugggcuucaccgccggccugaccuacucccagcucaugacccugaaggacgccaugcugcagcuggacccgaacgccaagacguggauggacaucgaggggcgccccgaggaccccgucgagaucgcccucuaccagcccagcuccggcugcuacauccacuucuuccgggagccgaccgaccugaagcaguucaagcaggacgcgaaguacagccacgggaucgacgugaccgaccuguucgccgcccagcccggccucaccuccgccgugaucgacgcccugccccgcaacauggucaucacgugccaggggagcgacgacauccgcaagcugcucgagagccagggccggaaggacaucaagcugaucgacaucgcgcuguccaagaccgacagccgcaaguacgagaacgccgugugggaccaguacaaggaccucugccacaugcacaccggcgucgugguggagaagaagaagcgcgggggcaaggaggagaucacgccccacugcgcccugauggacugcaucauguucgacgccgcggucuccgggggccugaacaccagcgugcuccgggccgugcugccgcgggacauggucuuccgcaccuccacgccccggguggugcugugaggacuaguaauaaggaaacuguaugaaugucugugggcaggaagugaagagauccuucuguaaagguuuuuggaauuaugucugcugaauaauaaacuuuuuugaaauaauaaaucugguagaaaaaugagaucucaaaggcucuuuucagagccaccaaaaaaaaaaaaaaaaaaaaaaaaaaaaaaaaaaaaaaaaaaaaaaaaaaaaaaaaaaaaaaaaagaauu

SEQ ID NO: 20101 - RNA, 2066 nt, Artificial Sequence
  mRNA product Design b-4 (hSL-A64-N5) comprising derived and/or modified sequence from LASV(G1442-SLE-2011;Clade IV)__AIT17181__SP-HsALB_NP(2-569) (opt1)
aggagagucccgcagucggcguccagcggcucugcuuguucgugugugugucguugcaggccuuauucaagcuuaccaugaagugggugaccuucaucagccugcucuuccuguucuccagcgccuacuccagcgccuccaaggaggugaaguccuuccuguggacccagagccuccgccgggagcugagcggcuacugcuccaacaucaagcugcaggucgugaaggacgcccaggcgcuccugcacgggcuggacuucagcgagguguccaacguccagcgccucaugcggaagcagcgccgggacgacaacgaccugaagcgccugcgggaccucaaccaggccgugaacaaccugguggagcucaagagcacccagcagaaguccguccugcgcgugggcacccugaccagcgacgaccugcucgugcuggccgccgaccuggagaagcucaaguccaaggucauccggaccgagcgcccccugagcgccgggguguacaugggcaaccuguccagccagcagcucgaccagcggcgcgcgcugcugaacaugaucgggauguccggcggcauccaggggacccggacgggccgcgacggggugguccgggugugggacgugaagaacgccgaccuccugaacaaccaguucggcaccaugccgagccugacccucgccugccugaccaagcaggggcaggucgaccugaacgacguggugcaggcccucacggaccugggccugaucuacaccgcgaaguaccccaacgccuccgaccucgaccgccugacccagagccaccccauccugaacaugaucgacaccaagaaguccagccucaacaucagcggcuacaacuucucccugggggccgccgucaaggccggcgcgugcaugcuggacgggggcaacaugcucgagacgaucaaggugagcccccagaccauggacggcauccugaaguccauccugaaggugaagaagacccucgggauguucaucagcgacaccccgggcgagcggaaccccuacgagaacauccuguacaagaucugccuguccggggacggcuggcccuacaucgccagccgcacguccaucaccgggcgggccugggagaacaccgucguggaccucgagagcgacggcaagccccagaaggccggcuccaacaacagcaacaagucccugcagagcgccggguucgcggccggccugaccuacucccagcucaugacgcugaaggacgccaugcugcagcuggacccgaacgccaagaccuggauggacaucgaggggcgccccgaggaccccguggagaucgcccucuaccagcccagcuccggcugcuacauccacuucuuccgggagccgaccgaccugaagcaguucaagcaggacgcgaaguacagccacgggaucgacgucaccgaccuguucgccgcccagcccggccucacguccgccgugaucgaggcccugccccgcaacauggucaucacgugccagggcagcgacgacaucaagaagcugcucgagucccaggggcgcaaggacaucaagcugaucgacaucgcgcugagcaagaccgacagccggaaguacgagaacgccgugugggaccaguacaaggaccucugccacaugcacaccggcguggucguggagaagaagaagcgcgggggcaaggaggagaucaccccgcacugcgcccugauggacugcaucauguucgacgccgcgguguccgggggccugaacacccucguccugcgggccgugcugccccgcgacaugguguuccggaccagcacgccccgcgucgugcucugaggacuaguaauaaggaaacuguaugaaugucugugggcaggaagugaagagauccuucuguaaagguuuuuggaauuaugucugcugaauaauaaacuuuuuugaaauaauaaaucugguagaaaaaugagaucucaaaggcucuuuucagagccaccaaaaaaaaaaaaaaaaaaaaaaaaaaaaaaaaaaaaaaaaaaaaaaaaaaaaaaaaaaaaaaaaagaauu

SEQ ID NO: 20102 - RNA, 2066 nt, Artificial Sequence
  mRNA product Design b-4 (hSL-A64-N5) comprising derived and/or modified sequence from LASV(G3010-SLE-2013;Clade IV)__AIT17345__SP-HsALB_NP(2-569) (opt1)
aggagagucccgcagucggcguccagcggcucugcuuguucgugugugugucguugcaggccuuauucaagcuuaccaugaagugggugaccuucaucagccugcucuuccuguucuccagcgccuacuccagcgccuccaaggagaucaagagcuuccuguggacccagucccuccgccgggagcugagcggcuacugcuccaacaucaagcuccagguggucaaggacgcccaggcgcugcugcacgggcuggacuucagcgagguguccaacgugcagcgccucaugcggaaggagcgccgggacgacaacgaccugaagcgccugcgggaccucaaccaggccgucaacaaccugguggagcucaagagcacccagcagaaguccauccugcgcgugggcacccugaccagcgacgaccugcucauccuggccgccgaccuggagaagcucaaguccaaggucacccggaccgagcgcccccugagcgccgggguguacaugggcaaccuguccagccagcagcucgaccagcggcgcgcgcugcuguccaugaucgggaugagcuccggcgugcagggcgcccgggccgggcgcgacggcgucgugcgggugugggacgucaagaacgccgagcuccugaacaaccaguucgggacgaugccgagccugacccucgcgugccugaccaagcagggccagguggaccugaacgacgugguccaggcccucaccgaccuggggcugaucuacacggccaaguaccccaacaccuccgaccucgaccgccugacccagagccaccccauccugaacaugaucgacaccaagaaguccagccucaacaucagcggcuacaacuucucccugggcgccgccgugaaggcgggggccugcaugcuggacggcgggaacaugcucgagacgaucaaggugagcccccagaccauggacggcauccugaaguccauccugaaggucaagaaggcccucggcauguucaucagcgagaccccgggggagcggaaccccuacgagaacauccuguacaagaucugccuguccggcgacggguggcccuacaucgccagccgcaccuccaucacgggccgggccugggagaacaccgugguggaccucgagagcgacgggaagccccagaaggcgggcuccaacaacagcaacaagucccugcagagcgccggcuucaccgccgggcugaccuacucccagcucaugacgcugaaggacgccaugcugcagcuggacccgaacgccaagaccuggauggacaucgagggccgccccgaggaccccgucgagguggcgcucuaccagcccagcuccgggugcuacauccacuucuuccgggagccgaccgaccugaagcaguucaagcaggacgccaaguacagccacggcaucgacgugaccgaccuguucgccgcccagcccgggcucacguccgccgucaucgacgcgcugccccgcaacauggugaucacgugccagggcagcgacgacaucaagaagcugcucgagagccagggccgcaaggacaucaagcugaucgacaucgcccuguccaagaccgacagccggaaguacgagaacgccgucugggaccaguacaaggaccucugccacaugcacaccggggugguggucgagaagaagaagcgcggcgggaaggaggagaucaccccgcacugcgcccugauggacugcaucauguucgacgcggccguguccggcgggcugaacaccagcgugcuccgggccguccugccccgcgacaugguguuccggaccuccacgccccgcgugguccugugaggacuaguaauaaggaaacuguaugaaugucugugggcaggaagugaagagauccuucuguaaagguuuuuggaauuaugucugcugaauaauaaacuuuuuugaaauaauaaaucugguagaaaaaugagaucucaaaggcucuuuucagagccaccaaaaaaaaaaaaaaaaaaaaaaaaaaaaaaaaaaaaaaaaaaaaaaaaaaaaaaaaaaaaaaaaagaauu

SEQ ID NO: 20103 - RNA, 2066 nt, Artificial Sequence
  mRNA product Design b-4 (hSL-A64-N5) comprising derived and/or modified sequence from LASV(G502-SLE-2009;Clade IV)__AIT17127__SP-HsALB_NP(2-569) (opt1)
aggagagucccgcagucggcguccagcggcucugcuuguucgugugugugucguugcaggccuuauucaagcuuaccaugaagugggugaccuucaucagccugcucuuccuguucuccagcgccuacuccagcgccuccaaggagaucaagagcuuccuguggacccagucccuccgccgggagcugagcggcuacugcuccaacaucaagcuccagguggucaaggacgcccaggcgcugcugcacgggcuggacuucagcgagguguccaacgugcagcgccucaugcggaaggagcgccgggacgacaacgaccugaagcgccugcgggaccucaaccaggccgucaacaaccugguggagcucaagagcacccagcagaaguccauccugcgcgugggcacccugaccagcgacgaccugcucauccuggccgccgaccuggagaagcucaaguccaaggucauccggaccgagcgcccccugagcgccgggguguacaugggcaaccuguccagccagcagcucgaccagcggcgcgcgcugcuguccaugaucgggaugagcggcggcaaccagggggugcgggccggcaaggacggggucgugcgcgugugggacgucaagaacgccgagcuccugaacaaccaguucggcaccaugccgucccugacgcucgccugccugaccaagcagggccagguggaccugaacgacgcggugcaggcccucaccgaccuggggcugaucuacaccgccaaguaccccaacacgagcgaccucgaccggcugacccagucccaccccauccugaacaugaucgacaccaagaaguccagccucaacaucuccggcuacaacuucagccugggggccgccgucaaggcgggcgccugcaugcuggacgggggcaacaugcucgagaccaucaaggugagcccccagacgauggacggcauccucaagagcauccugaaggugaagaaggcccuggggauguucaucuccgacaccccgggcgagcgcaaccccuacgagaacauccuguacaagaucugccugagcggggacggcuggcccuacaucgccucccggaccagcaucaccgggcgcgccugggagaacacggucguggaccucgaguccgacggcaagccccagaaggcgggcagcaacaacuccaacaagagccugcaguccgccggguucaccgccggccugaccuacagccagcucaugacccugaaggacgccaugcugcagcuggacccgaacacgaagaccuggauggacaucgaggggcggcccgaggaccccguggagaucgcccucuaccagcccuccagcggcugcuacauccacuucuuccgcgagccgaccgaccugaagcaguucaagcaggacgcgaaguacucccacgggaucgacgucaccgaccuguucgccgcccagcccggccucacgagcgccgugaucgacgcccugccccggaacauggugaucacgugccagggcuccgacgacauccgcaagcugcucgagagccaggggcgcaaggacaucaagcugaucgacaucgcgcugaacaagaccgacagccggaaguacgagaacgccgucugggaccaguacaaggaccucugccacaugcacaccggcguggucguggagaagaagaagcgcgggggcaaggaggagaucaccccgcacugcgcccugauggacugcaucauguucgacgccgcgguguccgggggccugaacaccagcguccuccgggccgugcugccccgcgacaugguguuccggaccuccacgccccgcgucgugcugugaggacuaguaauaaggaaacuguaugaaugucugugggcaggaagugaagagauccuucuguaaagguuuuuggaauuaugucugcugaauaauaaacuuuuuugaaauaauaaaucugguagaaaaaugagaucucaaaggcucuuuucagagccaccaaaaaaaaaaaaaaaaaaaaaaaaaaaaaaaaaaaaaaaaaaaaaaaaaaaaaaaaaaaaaaaaagaauu

SEQ ID NO: 20104 - RNA, 2066 nt, Artificial Sequence
  mRNA product Design b-4 (hSL-A64-N5) comprising derived and/or modified sequence from LASV(G733-SLE-2010;Clade IV)__AIT17155__SP-HsALB_NP(2-569) (opt1)
aggagagucccgcagucggcguccagcggcucugcuuguucgugugugugucguugcaggccuuauucaagcuuaccaugaagugggugaccuucaucagccugcucuuccuguucuccagcgccuacuccagcgccuccaaggagaucaagagcuuccuguggacccagucccuccgccgggagcugagcggcuacugcuccaacaucaagcuccagguggucaaggacgcccaggcgcugcugcacgggcuggacuucagcgagguguccaacgugcagcgccucaugcggaaggagcgccgggacgacaacgaccugaagcgccugcgggaccucaaccaggccgucaacaaccugguggagcucaagagcacccagcagaaguccgugcugcgcgucggcacccugaccagcgacgagcugcucgugcuggccgccgaccuggagaagcucaaguccaaggugauccggaccgagcgcccccugagcgccggggucuacaugggcaaccuguccagccagcagcucgaccagcggcgcgcgcugcuguccaugaucgggaugagcggcggcaaccagggggcccggaccggccgcgacgggguggugcgggucugggacgugaagaacgccgagcuccugaacaaccaguucggcaccaugccgucccugacccucgccugccugaccaagcagggccagguggaccugaacgacgcgguccaggcccucaccgaccuggggcugaucuacacggccaaguaccccaacaccagcgaccucgaccgccugacccagucccaccccauccugaacaugaucgacaccaagaaguccagccucaacaucuccggcuacaacuucagccugggggccgccgugaaggcgggcgccugcaugcuggacgggggcaacaugcucgagacgaucaaggugagcccccagaccauggacggcauccucaagagcauccugaaggucaagaaggcccuggggauguucaucuccgacaccccgggcgagcggaaccccuacgagaacauccuguacaagaucugccugagcggggacggcuggcccuacaucgccucccgcaccagcaucacggggcgggccugggagaacaccgugguggaccucgaguccgacggcaagccccagaaggcgggcagcaacaacuccaacaagagccugcaguccgccggguucaccgccggccugaccuacagccagcucaugacgcugaaggacgccaugcugcagcuggacccgaacgccaagaccuggauggacaucgaggggcgccccgaggaccccgucgagaucgcgcucuaccagcccuccagcggcugcuacauccacuucuuccgggagccgaccgaccugaagcaguucaagcaggacgccaaguacucccacgggaucgacgugaccgaccuguucgccgcccagcccggccucacgagcgccgugaucgacgcgcugccccgcaacauggucaucacgugccagggcuccgacgacauccgcaagcugcucgagagccaggggcggaaggacaucaagcugaucgacaucgcccugagcaagaucgacucccgcaaguacgagaacgccgugugggaccaguacaaggaccucugccacaugcacaccggcgucgugguggagaagaagaagcgcgggggcaaggaggagaucacgccccacugcgcccugauggacugcaucauguucgacgcggccgucagcgggggccugaacucccucgugcugcgggccgugcugccgcgggacauggucuuccgcaccagcacgccccggguggugcucugaggacuaguaauaaggaaacuguaugaaugucugugggcaggaagugaagagauccuucuguaaagguuuuuggaauuaugucugcugaauaauaaacuuuuuugaaauaauaaaucugguagaaaaaugagaucucaaaggcucuuuucagagccaccaaaaaaaaaaaaaaaaaaaaaaaaaaaaaaaaaaaaaaaaaaaaaaaaaaaaaaaaaaaaaaaaagaauu

SEQ ID NO: 20105 - RNA, 2066 nt, Artificial Sequence
  mRNA product Design b-4 (hSL-A64-N5) comprising derived and/or modified sequence from MOPV/LASV reassortant(IGS-1;Clade IV)__AFY05578__SP-HsALB_NP(2-569) (opt1)
aggagagucccgcagucggcguccagcggcucugcuuguucgugugugugucguugcaggccuuauucaagcuuaccaugaagugggugaccuucaucagccugcucuuccuguucuccagcgccuacuccagcgccuccaaggagaucaagagcuuccuguggacccagucccuccgccgggagcugagcggcuacugcuccaacaucaagcuccagguggucaaggacgcccaggcgcugcugcacgggcuggacuucagcgagguguccaacgugcagcgccucaugcggaaggagcgccgggacgacaacgaccugaagcgccugcgggaccucaaccaggccgucaacaaccugguggagcucaagagcacccagcagaaguccauccugcgcgugggcacccugaccagcgacgaccugcucauccuggccgccgaccuggagaagcuccgguccaaggucauccgcaccgagcggccccugagcgccgggguguacaugggcaaccuguccagccagcagcucgaccagcgccgggcgcugcugaacaugaucgggauguccggcggcaaccagggggcccgcgccggccgggacggggugguccgcgugugggacgugaagaacgccgagcuccugagcaaccaguucggcaccaugccgucccugacgcucgcgugccugaccaagcaggggcaggucgaccugaacgacgccgugcaggcccucaccgaccugggccugaucuacaccgccaaguaccccaacacgagcgaccucgaccggcugacccagucccaccccauccugaacaugaucgacaccaagaaguccagccucaacaucuccggcuacaacuucagccugggggccgcggugaaggccggcgccugcaugcuggacgggggcaacaugcucgagaccaucaaggucagcccccagacgauggacggcauccucaagagcauccugaaggugaagaaggcccuggggauguucaucuccgacaccccgggcgagcgcaaccccuacgagaacauccuguacaagaucugccugagcggggacggcuggcccuacaucgccucccggaccagcaucaccgggcgcgcgugggagaacacgguggucgaccucgaguccgacggcaagccccagaaggccgacagcaacaacuccagcaagucccugcagagcgccggcuucaccgccgggcugaccuacucccagcucaugacccugaaggacgccaugcugcagcuggacccgaacgcgaagacguggauggacaucgagggccggcccgaggaccccguggagaucgcccucuaccagcccagcuccgggugcuacauccacuucuuccgcgagccgaccgaccugaagcaguucaagcaggacgccaaguacagccacggcaucgacgugaccgaccuguucgccacccagcccgggcucacguccgccgucaucgacgcgcugccccgcaacauggugaucacgugccagggcagcgacgacauccggaagcugcucgagagccagggccgcaaggacaucaagcugaucgacaucgaccuguccaagaccgacagccggaaguacgagaacgccgugugggaccaguacaaggaccucugccacaugcacaccggggucguggucgagaagaagaagcgcggcgggaaggaggagaucaccccgcacugcgcccugauggacugcaucauguucgacgccgcgguguccggcgggcugaacaccagcgugcuccgggccguccugccccgcgacaugguguuccggaccuccacgccccgcgugguccugugaggacuaguaauaaggaaacuguaugaaugucugugggcaggaagugaagagauccuucuguaaagguuuuuggaauuaugucugcugaauaauaaacuuuuuugaaauaauaaaucugguagaaaaaugagaucucaaaggcucuuuucagagccaccaaaaaaaaaaaaaaaaaaaaaaaaaaaaaaaaaaaaaaaaaaaaaaaaaaaaaaaaaaaaaaaaagaauu

SEQ ID NO: 20106 - RNA, 2066 nt, Artificial Sequence
  mRNA product Design b-4 (hSL-A64-N5) comprising derived and/or modified sequence from LASV(LM765-SLE-2012;Clade IV)__AIT17815__SP-HsALB_NP(2-569) (opt1)
aggagagucccgcagucggcguccagcggcucugcuuguucgugugugugucguugcaggccuuauucaagcuuaccaugaagugggugaccuucaucagccugcucuuccuguucuccagcgccuacuccagcgccuccaaggagaucaagagcuuccuguggacccagucccuccgccgggagcugagcggcuacugcuccaacaucaagcuccagguggucaaggacgcccaggcgcugcugcacgggcuggacuucagcgagguguccaacgugcagcgccucaugcggaaggagcgccgggacgacaacgaccugaagcgccugcgggaccucaaccaggccgucaacaaccugguggagcucaagagcacccagcagaaguccauccugcgcgugggcacccugaccagcgacgaccugcucauccuggccgccgaccuggagaagcucaaguccaaggucacccggaccgagcgcccccugagcgccgggguguacaugggcaaccuguccagccagcagcucgaccagcggcgcgcgcugcuggacaugaucgggauguccggcagcaaccagggcgcccgggccgggcgcgacggcgugguccgggugugggacgugaagaacgccgagcuccugaacaaccaguucgggacgaugccgucccugacccucgcgugccugaccaagcagggccaggucgaccugaacgacgccgugcaggcccucaccgaccuggggcugaucuacacggccaaguaccccaacaccagcgaccucgaccgccugacccagucccaccccauccugaacaugaucgacaccaagaaguccagccucaacaucuccggcuacaacuucagccugggcgccgcggugaaggccggggccugcaugcuggacggcgggaacaugcucgagacgaucaaggucagcccccagaccauggacggcauccucaagagcauccugaaggugaagaaggcccugggcauguucaucuccgacgccccgggggagcggaaccccuacgagaacauccuguacaagaucugccugagcggcgacggguggcccuacaucgcgucccgcaccagcaucaccggccgggccugggagaacacgguggucgaccucgaguccgacgggaagccccagaaggccggcagcaacggcuccaacaagagccugcaguccgccggguucaccgccggccugaccuacagccagcucaugacccugaaggacgcgaugcugcagcuggacccgaacgccaagacguggauggacaucgaggggcgccccgaggaccccguggagaucgcccucuaccagcccuccagcggcugcuacauccacuucuuccgggagccgaccgaccugaagcaguucaagcaggacgccaaguacucccacgggaucgacgugaccgaccuguucgccgcgcagcccggccucaccagcgccgucaucgacgcccugccccgcaacauggugaucacgugccagggcuccgacgacauccgcaagcuguucgagagccaggggcggaaggacaucaagcucaucgacaucgcccugagcaagaccgacucccgcaaguacgagaacgcggugugggaccaguacaaggaccugugccacaugcacaccggcaucgucguggagaagaagaagcgcgggggcaaggaggagaucacgccccacugcgcccucauggacugcaucauguucgacgccgccgucagcgggggccugaacaccuccgugcugcgggccgugcucccgcgggacauggucuuccgcaccagcacgccccggguggugcugugaggacuaguaauaaggaaacuguaugaaugucugugggcaggaagugaagagauccuucuguaaagguuuuuggaauuaugucugcugaauaauaaacuuuuuugaaauaauaaaucugguagaaaaaugagaucucaaaggcucuuuucagagccaccaaaaaaaaaaaaaaaaaaaaaaaaaaaaaaaaaaaaaaaaaaaaaaaaaaaaaaaaaaaaaaaaagaauu

SEQ ID NO: 20107 - RNA, 2066 nt, Artificial Sequence
  mRNA product Design b-4 (hSL-A64-N5) comprising derived and/or modified sequence from LASV(LM776-SLE-2012;Clade IV)__AIT17825__SP-HsALB_NP(2-569) (opt1)
aggagagucccgcagucggcguccagcggcucugcuuguucgugugugugucguugcaggccuuauucaagcuuaccaugaagugggugaccuucaucagccugcucuuccuguucuccagcgccuacuccagcgccuccaaggagaucaagagcuuccuguggacccagucccuccgccgggagcugagcuccuacugcagcaacaucaagcuccagguggucaaggacgcccaggcgcugcugcacggccuggacuucuccgaggugagcaacgugcagcgccucaugcggaaggagcgccgggacgacaacgaccugaagcgccugcgggaccucaaccaggccgucaacaaccugguggagcugaaguccacccagcagaaguccauccuccgcguggggacccugaccuccgacgaccugcucauccuggccgccgaccuggagaagcucaagagcaaggucacccggaccgagcgcccccuguccgccggcguguacauggggaaccugagcucccagcagcucgaccagcggcgcgcgcugcugagcaugaucggcauguccgggagcaaccagggcgcccgggccggccgcgacggggugguccgggugugggacgugaagaacgccgagcuccugaacaaccaguucggcacgaugccgucccugacccucgcgugccugaccaagcaggggcaggucgaccugaacgacgccgugcaggcccucaccgaccugggccugaucuacacggccaaguaccccaacaccagcgaccucgaccgccugacccagagccaccccauccugaacaugaucgacaccaagaaguccagccucaacaucuccggguacaacuucagccugggcgccgcggugaaggccggcgccugcaugcuggacgggggcaacaugcucgagacgaucaaggucagcccccagaccauggacgggauccucaagagcauccugaaggugaagaaggcccugggcauguucaucuccgacaccccgggcgagcggaaccccuacgagaacauccuguacaagaucugccugagcggggacggcuggcccuacaucgccucccgcaccagcaucacggggcgggcgugggagaacaccguggucgaccucgaguccgacggcaagccccagaaggccgggagcaacaacuccaacaagagccugcaguccgccggcuucaccgccggccugaccuacagccagcucaugacgcugaaggacgccaugcugcagcuggacccgaacgcgaagaccuggauggacaucgaggggcgccccgaggaccccguggagguggcccucuaccagcccuccagcggcugcuacauccacuucuuccgggagccgaccgaccugaagcaguucaagcaggacgccaaguacucccacgggaucgacgucaccgaccuguucgccgcccagcccggccucacgagcgcggugaucgacgcccugccccgcaacauggugaucacgugccaggggagcgacgacauccgcaagcugcucgagucccagggccggaaggacaucaagcugaucgacaucgcccugagcaagaccgacucccgcaaguacgagaacgccgucugggaccaguacaaggaccucugccacaugcacaccggcguggucguggagaagaagaagcgcgggggcaaggaggagaucaccccgcacugcgcgcugauggacugcaucauguucgacgccgccgugagcgggggccugaacaccuccguccuccgggccgugcugccccgggacaugguguuccgcaccagcacgccccgggucgugcugugaggacuaguaauaaggaaacuguaugaaugucugugggcaggaagugaagagauccuucuguaaagguuuuuggaauuaugucugcugaauaauaaacuuuuuugaaauaauaaaucugguagaaaaaugagaucucaaaggcucuuuucagagccaccaaaaaaaaaaaaaaaaaaaaaaaaaaaaaaaaaaaaaaaaaaaaaaaaaaaaaaaaaaaaaaaaagaauu

SEQ ID NO: 20108 - RNA, 2066 nt, Artificial Sequence
  mRNA product Design b-4 (hSL-A64-N5) comprising derived and/or modified sequence from LASV(Mad39;Clade IV)__ANH09723__SP-HsALB_NP(2-569) (opt1)
aggagagucccgcagucggcguccagcggcucugcuuguucgugugugugucguugcaggccuuauucaagcuuaccaugaagugggugaccuucaucagccugcucuuccuguucuccagcgccuacuccagcgccuccaaggagaucaagagcuuccuguggacccagucccuccgccgggagcugagcggcuacugcuccaacaucaagcuccagguggucaaggacgcccaggcgcugcugcacgggcuggacuucagcgagguguccaacgugcagcgccucaugcggaagcagcgccgggacgacaacgaccugaagcgccugcgggaccucaaccaggccgucaacaaccugguggagcugaaguccacccagcagaaguccgugcuccgcgucggcacgcugaccagcgacgaccugcucacccuggccgccgaccuggagaagcucaaguccaaggugacccggacggagcgcccccugaccgccgggguguacaugggcaaccugagcucccagcagcucgaccagcggcgcgcgcugcugaacaugaucgggaugagcggcggcaaccagggggcccggaccggccgcgacggggucgugcgggugugggacgucaagaacgccgagcuccugaacaaccaguucggcaccaugccgucccugacgcucgccugccugaccaagcagggccagguggaccugaacgacgugguccaggcgcucaccgaccuggggcugaucuacaccgccaaguaccccaacacgagcgaccucgaccgccugacccagucccaccccauccugaacaugaucgacaccaacaagagcucccucaacaucagcggcuacaacuucagccugggggccgccgugaaggccggcgcgugcaugcuggacgggggcaacaugcucgagaccaucaaggugagcccccagacgauggacggcauccucaagagcauccugaaggucaagaagucccuggggauguucaucagcgacaccccgggcgagcggaaccccuacgagaacauccuguacaagaucugccuguccggggacggcuggcccuacaucgccagccgcaccuccaucaccgggcgggccugggagaacacggugguggaccucgagagcggcggcaagccccagaaggccggguccaacaacagcaacaagucccugcagagcgccggcuucgcggccgggcugaccuacucccagcucaugacccugaaggacgccaugcugcagcuggacccgaacgccaagaccuggauggacaucgagggccgccccgaggaccccgucgagaucgcccucuaccagcccaucagcgggugcuacauccacuucuuccgggagccgacggaccugaagcaguucaagcaggacgcgaaguacucccacggcaucgacgugaccgaccuguucgccgcccagcccggccucaccagcgccgugaucgaggcccugccccgcaacauggucaucacgugccagggguccgacgacauccgcaagcuguucgagagccagggccggaaggacaucaagcucaucgacaucgcgcuguccaagaccgacagccgcaaguacgagaacgccgugugggaccaguacaaggaccugugccacaugcacaccggggucgugguggagaagaagaagaagggcgggaaggaggagaucacgccccacugcgcccucauggacugcaucauguucgacgccgcggucagcggcggccugaacacccuggugcuccgggccgugcugccgcgcgacauggucuuccggaccuccacccccaagguggugcugugaggacuaguaauaaggaaacuguaugaaugucugugggcaggaagugaagagauccuucuguaaagguuuuuggaauuaugucugcugaauaauaaacuuuuuugaaauaauaaaucugguagaaaaaugagaucucaaaggcucuuuucagagccaccaaaaaaaaaaaaaaaaaaaaaaaaaaaaaaaaaaaaaaaaaaaaaaaaaaaaaaaaaaaaaaaaagaauu

SEQ ID NO: 20109 - RNA, 2066 nt, Artificial Sequence
  mRNA product Design b-4 (hSL-A64-N5) comprising derived and/or modified sequence from LASV(Z0947-SLE-2011;Clade IV)__AIT17841__SP-HsALB_NP(2-569) (opt1)
aggagagucccgcagucggcguccagcggcucugcuuguucgugugugugucguugcaggccuuauucaagcuuaccaugaagugggugaccuucaucagccugcucuuccuguucuccagcgccuacuccagcgccuccaaggagaucaagagcuuccuguggacccagucccuccgccgggagcugagcggcuacugcuccaacaucaagcuccagguggucaaggacgcccaggcgcugcugcacgggcuggacuucagcgagguguccaacgugcagcgccucaugcggaaggagcgccgggacgacaacgaccugaagcgccugcgggaccucaaccaggccgucaacaaccugguggagcucaagagcacccagcagaaguccauccugcgcgugggcacccugaccagcgacgaccugcucauccuggccgccgaccuggagaagcucaaguccaaggucacccggaccgagcgcccccugagcgccgggguguacaugggcaaccuguccagccagcagcucgaccagcggcgcgcgcugcugaacaugaucgggauguccggcagcaaccagggcgcccggacggggcgcgacggcgugguccgggugugggacgugaagaacgccgagcuccugaacaaccaguucgggaccaugccgucccugacccucgccugccugaccaagcagggccaggucgaccugaacgacgcggugcaggcccucacggaccuggggcugaucuacaccgccaaguaccccaacaccagcgaccucgaccgccugacccagucccaccccauccugaacaugaucgacacgaagaaguccagccucaacaucuccggcuacaacuucagccugggcgccgccgugaaggcgggggccugcaugcuggacggcgggaacaugcucgagaccaucaaggucagcccccagaccauggacggcauccucaagagcauccugaaggugaagaaggcccugggcauguucaucuccgacgccccgggggagcggaaccccuacgagaacauccuguacaagaucugccugagcggcgacggguggcccuacaucgccucccgcaccagcaucacgggccgggcgugggagaacaccguggucgaccucgaguccgacgggaagccccagaaggccggcagcaacggcuccaacaagagccugcaguccgccggguucaccgccggccugaccuacagccagcucaugacgcugaaggacgccaugcugcagcuggacccgaacgcgaagaccuggauggacaucgaggggcgccccgaggaccccguggagaucgcccucuaccagcccuccagcggcugcuacauccacuucuuccgggagccgaccgaccugaagcaguucaagcaggacgccaaguacucccacgggaucgacgugaccgaccuguucgccgcccagcccggccucacgagcgcggucaucgacgcccugccccgcaacauggugaucacgugccagggcuccgacgacauccgcaagcuguucgagagccaggggcggaaggacaucaagcucaucgacaucgcccugagcaagaccgacucccgcaaguacgagaacgccgugugggaccaguacaaggaccugugccacaugcacaccggcaucgucguggagaagaagaagcgcgggggcaaggaggagaucaccccgcacugcgcgcucauggacugcaucauguucgacgccgccgucagcgggggccugaacaccuccgugcugcgggccgugcucccccgggacauggucuuccgcaccagcacgccccggguggugcugugaggacuaguaauaaggaaacuguaugaaugucugugggcaggaagugaagagauccuucuguaaagguuuuuggaauuaugucugcugaauaauaaacuuuuuugaaauaauaaaucugguagaaaaaugagaucucaaaggcucuuuucagagccaccaaaaaaaaaaaaaaaaaaaaaaaaaaaaaaaaaaaaaaaaaaaaaaaaaaaaaaaaaaaaaaaaagaauu

SEQ ID NO: 20110 - RNA, 2066 nt, Artificial Sequence
  mRNA product Design b-4 (hSL-A64-N5) comprising derived and/or modified sequence from LASV(Josiah;Clade IV)__NP_694869__SP-HsALB_NP(2-569) (opt4)
aggagagucccgcagucggcguccagcggcucugcuuguucgugugugugucguugcaggccuuauucaagcuuaccaugaagugggugaccuucaucagccugcuguuccuguucagcagcgccuacagcagcgccagcaaggagaucaagagcuuccuguggacccagagccugagaagagagcugagcggcuacugcagcaacaucaagcugcagguggugaaggacgcccaggcccugcugcacggccuggacuucagcgaggugagcaacgugcagagacugaugagaaaggagagaagagacgacaacgaccugaagagacugagagaccugaaccaggccgugaacaaccugguggagcugaagagcacccagcagaagagcauccugagagugggcacccugaccagcgacgaccugcugauccuggccgccgaccuggagaagcugaagagcaaggugaucagaaccgagagaccccugagcgccggcguguacaugggcaaccugagcagccagcagcuggaccagagaagagcccugcugaacaugaucggcaugagcggcggcaaccagggcgccagagccggcagagacggcguggugagagugugggacgugaagaacgccgagcugcugaacaaccaguucggcaccaugcccagccugacccuggccugccugaccaagcagggccagguggaccugaacgacgccgugcaggcccugaccgaccugggccugaucuacaccgccaaguaccccaacaccagcgaccuggacagacugacccagagccaccccauccugaacaugaucgacaccaagaagagcagccugaacaucagcggcuacaacuucagccugggcgccgccgugaaggccggcgccugcaugcuggacggcggcaacaugcuggagaccaucaaggugagcccccagaccauggacggcauccugaagagcauccugaaggugaagaaggcccugggcauguucaucagcgacacccccggcgagagaaaccccuacgagaacauccuguacaagaucugccugagcggcgacggcuggcccuacaucgccagcagaaccagcaucaccggcagagccugggagaacaccgugguggaccuggagagcgacggcaagccccagaaggccgacagcaacaacagcagcaagagccugcagagcgccggcuucaccgccggccugaccuacagccagcugaugacccugaaggacgccaugcugcagcuggaccccaacgccaagaccuggauggacaucgagggcagacccgaggaccccguggagaucgcccuguaccagcccagcagcggcugcuacauccacuucuucagagagcccaccgaccugaagcaguucaagcaggacgccaaguacagccacggcaucgacgugaccgaccuguucgccacccagcccggccugaccagcgccgugaucgacgcccugcccagaaacauggugaucaccugccagggcagcgacgacaucagaaagcugcuggagagccagggcagaaaggacaucaagcugaucgacaucgcccugagcaagaccgacagcagaaaguacgagaacgccgugugggaccaguacaaggaccugugccacaugcacaccggcguggugguggagaagaagaagagaggcggcaaggaggagaucaccccccacugcgcccugauggacugcaucauguucgacgccgccgugagcggcggccugaacaccagcgugcugagagccgugcugcccagagacaugguguucagaaccagcacccccagaguggugcugugaggacuaguaauaaggaaacuguaugaaugucugugggcaggaagugaagagauccuucuguaaagguuuuuggaauuaugucugcugaauaauaaacuuuuuugaaauaauaaaucugguagaaaaaugagaucucaaaggcucuuuucagagccaccaaaaaaaaaaaaaaaaaaaaaaaaaaaaaaaaaaaaaaaaaaaaaaaaaaaaaaaaaaaaaaaaagaauu

SEQ ID NO: 20111 - RNA, 2066 nt, Artificial Sequence
  mRNA product Design b-4 (hSL-A64-N5) comprising derived and/or modified sequence from LASV(LP;Clade I)__AAF86702__SP-HsALB_NP(2-569) (opt4)
aggagagucccgcagucggcguccagcggcucugcuuguucgugugugugucguugcaggccuuauucaagcuuaccaugaagugggugaccuucaucagccugcuguuccuguucagcagcgccuacagcagcaacagcaaggagaucaagagcuuccuguggacccagagccugagaagagagcugagcggcuacugcagcaacaucaagcugcagguggugaaggacgcccaggcccugcugcacggccuggacuucagcgaggugagcaacgugcagagacugaugagaaagcagaagagagacgacgccgaccugaagagacugagagaccugaaccaggccgugaacaaccugguggagcugaagagcacccagcagaagaacgugcugagagugggcacccugagcagcgacgaccugaucacccuggccgccgaccuggagaagcugaagagcaaggugaucagaaccgagagaccccugagcagcggcguguacaugggcaaccugagcagccagcagcuggaccagagaagagcccugcugagcaugaucggcaugagcggcggcccccagggcaacagaaccggcggcgacggcguggugagagugugggacgugaagaacgccgagcugcugaacaaccaguucggcaccaugcccagccugacccuggccugccugaccaagcagggccagguggaccugaacgacgccgugcaggcccugaccgaccugggccugaucuacaccgccaaguaccccaacagcagcgaccuggacaugcugacccagagccaccccauccugggcaugguggacaccaagaagagcagccugaacaucagcggcuacaacuucagccugggcgccgccgugaaggccggcgccugcaugcuggacggcggcaacaugcuggagaccaucaaggugagcccccagaccauggacggcauccugaagagcauccugaaggugaagagaagccugggcauguucaucagcgacacccccggcgagagaaaccccuacgagaacauccuguacaagaucugccugagcggcgagggcuggcccuacaucgccagcagaaccagcaucaccggcagagccugggagaacacccugguggaccuggagagcgacaacaagccccccaagcugaacagcgccggcagcaacaagagccugcaggccgccggccugaacgccggccugaccuacagccagcugaugacccugaaggacugcaugcugcagcuggaccccagcagcaagaccuggaucgacaucgagggcagacccgaggaccccguggagaucgcccuguuccagcccagcagcggcugcuacauccacuucuucagagagcccaccgaccugaagcaguucaagcaggacgccaaguacagccacggcaucgacgugaccgaccuguucagcacccagcccggccugaccagcgccgugaucgaggcccugcccagaaacauggugcugaccugccagggcagcgacgacaucaagaagcugcuggagagccagggcagaagagacaucaagcugaucgacaucagccugagcaaggccgacagcagaaaguucgagaacgccgugugggaccaguacaaggaccugugccacaugcacaccggcguggugguggagaagaagaagagaggcggcaaggaggagaucaccccccacugcgcccugcuggacugcaucauguucgacgccgccaccaccggcagccugaacaucaccacccugagagccgugcugcccagagacaugguguucagaaccagcacccccaagguggugcugugaggacuaguaauaaggaaacuguaugaaugucugugggcaggaagugaagagauccuucuguaaagguuuuuggaauuaugucugcugaauaauaaacuuuuuugaaauaauaaaucugguagaaaaaugagaucucaaaggcucuuuucagagccaccaaaaaaaaaaaaaaaaaaaaaaaaaaaaaaaaaaaaaaaaaaaaaaaaaaaaaaaaaaaaaaaaagaauu

SEQ ID NO: 20112 - RNA, 2066 nt, Artificial Sequence
  mRNA product Design b-4 (hSL-A64-N5) comprising derived and/or modified sequence from LASV(803213;Clade II)__AAF86704__SP-HsALB_NP(2-569) (opt4)
aggagagucccgcagucggcguccagcggcucugcuuguucgugugugugucguugcaggccuuauucaagcuuaccaugaagugggugaccuucaucagccugcuguuccuguucagcagcgccuacagcagcgccagcaaggaggugaagagcuuccuguggacccagagccugagaagagagcugagcggcuacugcagcaacaucaagcugcagguggugaaggacgcccaggcccugcugcacggccuggacuucagcgaggugaacaacgugcagagacugaugagaaagcagaagagagacgacggcgaccugaagagacugagagaccugaaccaggccgugaacaaccugguggagcugaagagcacccagcagaagagcauccugagagugggcacccugaccagcgacgaccugcugacccuggccgccgaccuggagaagcugaagagcaaggugaucagaaccgagagaccccugagcagcggcguguacaugggcaaccugagcacccagcagcuggagcagagaagagcccugcugaacaugaucggcauggugggcggcgcccagggcacccagcccggcagagacggcguggugagagugugggacgugaagaaccccgaccugcugaacaaccaguucggcaccaugcccagccugacccuggccugccugaccaagcagggccagguggaccugaacgacgccgugcuggcccugaccgaccugggccugaucuacaccgccaaguaccccaacagcagcgaccuggacagacugagccagagccaccccauccugaacaugguggacaccaagaagagcagccugaacaucagcggcuacaacuucagccugggcgccgccgugaaggccggcgccugcaugcuggacggcggcaacaugcuggagaccaucaaggugaccccccagaccauggacggcauccugaagagcauccugaaggugaagagaagccugggcauguucgugagcgacacccccggcgagagaaaccccuacgagaacauccuguacaagaucugccugagcggcgacggcuggcccuacaucgccagcagaaccagcaucgugggcagagccugggagaacaccaccguggaccuggagagcgacggcaagccccagaaggugggcaccgccggcagcaacaagagccugcagagcgccggcuuccccaccggccugaccuacagccagcugaugacccugaaggacagcaugaugcagcuggaccccagcgccaagaccuggaucgacaucgagggcagacccgaggaccccguggagaucgcccuguaccagcccaugagcggcugcuacauccacuucuucagagagcccaccgaccugaagcaguucaagcaggacgccaaguacagccacggcaucgacguggccgaccuguuccccgcccagcccggccugaccagcgccgugaucgaggcccugcccagaaacauggugcugaccugccagggcagcgacgacaucaagaagcugcuggacagccagggcagaagagacaucaagcugaucgacaucagccugagcaagguggacagcagaaaguucgagaacgccgugugggaccagugcaaggaccugugccacaugcacaccggcguggugguggagaagaagaagagaggcggcaaggaggagaucaccccccacugcgcccugauggacugcaucauguucgacgccgccgugagcggcggccugaacauccccgugcugagagccgugcugcccagagacaugguguucagaaccagcagccccaagguggugcugugaggacuaguaauaaggaaacuguaugaaugucugugggcaggaagugaagagauccuucuguaaagguuuuuggaauuaugucugcugaauaauaaacuuuuuugaaauaauaaaucugguagaaaaaugagaucucaaaggcucuuuucagagccaccaaaaaaaaaaaaaaaaaaaaaaaaaaaaaaaaaaaaaaaaaaaaaaaaaaaaaaaaaaaaaaaaagaauu

SEQ ID NO: 20113 - RNA, 2069 nt, Artificial Sequence
  mRNA product Design b-4 (hSL-A64-N5) comprising derived and/or modified sequence from LASV(GA391;Clade III)__CAA36646__SP-HsALB_NP(2-570) (opt4)
aggagagucccgcagucggcguccagcggcucugcuuguucgugugugugucguugcaggccuuauucaagcuuaccaugaagugggugaccuucaucagccugcuguuccuguucagcagcgccuacagcagcgccagcaaggaggugagaagcuuccuguggacccagagccugagaagagagcugagcggcuacugcagcaacaucaagcugcagguggugaaggacgcccaggcccugcugcacggccuggacuucagcgaggugagcaacgugcagagacugaugagaaagcagaagagagacgacggcgaccugaagagacugagagaccugaaccaggccgugaacaaccugguggagcugaagagcacccagcagaagagcgugcugagagugggcacccugagcagcgacgaccugcugauccuggccgccgaccuggagaagcugaagagcaaggugaccagaaccgagagaccccugagcagcggcguguacaugggcaaccugagcagccagcagcuggaccagagaagagcccugcugaacaugaucggcaugaccggcgugagcggcggcggcaagggcgccagcgacggcaucgugagagugugggacgugaagaacgccgagcugcugaacaaccaguucggcaccaugcccagccugacccuggccugccugaccaagcagggccagguggaccugaacgacgccgugcaggcccugaccgaccugggccugaucuacaccgccaaguaccccaacagcagcgaccuggacagacugagccagagccaccccauccugaacaugaucgacaccaagaagagcagccugaacaucagcggcuacaacuucagccugggcgccgccgugaaggccggcgccugcaugcuggacggcggcaacaugcuggagaccaucaaggugagcccccagaccauggacggcauccugaagagcauccugaaggugaagaagagccugggcauguucgugagcgacacccccggcgagagaaaccccuacgagaacauccuguacaagaucugccugagcggcgacggcuggcccuacaucgccagcagaaccagcaucgugggcagagccugggagaacaccgugguggaccuggagcaggacaacaagccccagaagaucggcaacggcggcagcaacaagagccugcagagcgccggcuucgccgccggccugaccuacagccagcugaugacccugaaggacuucaagugcuucaaccugauccccaacgccaagaccuggauggacaucgagggcagacccgaggaccccguggagaucgcccuguaccagcccagcagcggcugcuacgugcacuucuucagagagcccaccgaccugaagcaguucaagcaggacgccaaguacagccacggcaucgacgugaccgaccuguucgccgcccagcccggccugaccagcgccgugaucgaggcccugcccagaaacauggugaucaccugccagggcagcgaggacaucagaaagcugcuggagagccagggcagaagagacaucaagcugaucgacaucacccugagcaaggccgacagcagaaaguucgagaacgccgugugggaccaguucaaggaccugugccacaugcacaccggcguggugguggagaagaagaagagaggcggcaaggaggagaucaccccccacugcgcccugauggacugcaucauguucgacgccgccgugagcggcggccuggacgccaaggugcugagaguggugcugcccagagacaugguguucagaaccagcacccccaagguggugcugugaggacuaguaauaaggaaacuguaugaaugucugugggcaggaagugaagagauccuucuguaaagguuuuuggaauuaugucugcugaauaauaaacuuuuuugaaauaauaaaucugguagaaaaaugagaucucaaaggcucuuuucagagccaccaaaaaaaaaaaaaaaaaaaaaaaaaaaaaaaaaaaaaaaaaaaaaaaaaaaaaaaaaaaaaaaaagaauu

SEQ ID NO: 20114 - RNA, 2066 nt, Artificial Sequence
  mRNA product Design b-4 (hSL-A64-N5) comprising derived and/or modified sequence from LASV(AV;Clade V)__CCA30315__SP-HsALB_NP(2-569) (opt4)
aggagagucccgcagucggcguccagcggcucugcuuguucgugugugugucguugcaggccuuauucaagcuuaccaugaagugggugaccuucaucagccugcuguuccuguucagcagcgccuacagcagcgccagcaaggaggugaagagcuuccuguggacccagagccugagaagagagcugagcggcuacugcagcaacaucaagcugcagguggugaaggacgcccaggcccugcugcacggccuggacuucagcgaggugagcaacgugcagagacugaugagaaagcagagaagagacgacagcgaccugaagagacugagagaccugaaccaggccgugaacaaccugguggagcugaagagcacccagcagaagagcgugcugagagugggcacccugagcagcgacgaccugcugacccuggccgccgaccuggagaagcugaagagcaaggugaccagaaccgagagaccccugagcagcggcguguacaugggcaaccugagcagccagcagcuggaccagagaagagcccugcugaaccugaucggcaugaccaacggcagccagggcagccaggccggcagagacggcguggugagagugugggacgugaagaacgccgagcugcugaacaaccaguucggcaccaugcccagccugacccuggccugccugaccaagcagggccagguggaccugaacgacguggugcaggcccugaccgaccugggccugaucuacaccgccaaguaccccaacaccagcgaccuggacagacugacccagagccaccccauccugaacaugaucgacaccaagaagagcagccugaacaucagcggcuacaacuucagccugggcgccgccgugaaggccggcgccugcaugcuggacggcggcaacaugcuggagaccaucaaggugagcccccagagcauggacggcauccugaagagcauccugaaggugaagagagcccugggcauguucgugagcgacacccccggcgagagaaaccccuacgagaacauccuguacaagaucugccugagcggcgacggcuggcccuacaucgccagcagaaccagcaucgugggcagagccugggagaacaccgugguggaccuggagaccgacggcaagccccagaagaucggcagcggcaacagcaacaagagccugcagagcgccggcuucagcgccggccugaccuacagccagcugaugacccugaaggacgccaugcugcagcuggaccccaacgccaagaccuggauggacaucgagggcagacccgaggaccccguggagguggcccuguaccagcccaucagcggcugcuacauccacuucuucagagagcccaccgaccugaagcaguucaagcaggacgccaaguacagccacggcaucgacaucgccgaccuguucgccgcccagcccggccugaccagcgccgugaucgaggcccugcccagaaacauggugaucaccugccagggcagcgaggacaucaagaagcugcuggagagccagggcagaaaggacaucaagcugaucgacaucgcccugagcaagaucgacagcagaaaguucgagaacgccgugugggaccaguacaaggaccugugccacaugcacaccggcguggugguggagaagaagaagagaggcggcaaggaggagaucaccccccacugcgcccugauggacugcaucauguucgacgccgccgugagcggcggccugaacacccuggugcugagagccgugcugcccagagacaugguguucagaaccagcacccccagaguggugcugugaggacuaguaauaaggaaacuguaugaaugucugugggcaggaagugaagagauccuucuguaaagguuuuuggaauuaugucugcugaauaauaaacuuuuuugaaauaauaaaucugguagaaaaaugagaucucaaaggcucuuuucagagccaccaaaaaaaaaaaaaaaaaaaaaaaaaaaaaaaaaaaaaaaaaaaaaaaaaaaaaaaaaaaaaaaaagaauu

SEQ ID NO: 20115 - RNA, 2066 nt, Artificial Sequence
  mRNA product Design b-4 (hSL-A64-N5) comprising derived and/or modified sequence from LASV(Togo/2016/7082;Clade VI)__AMR44578__SP-HsALB_NP(2-569) (opt4)
aggagagucccgcagucggcguccagcggcucugcuuguucgugugugugucguugcaggccuuauucaagcuuaccaugaagugggugaccuucaucagccugcuguuccuguucagcagcgccuacagcagcaacagcaaggaggugaagagcuuccuguggacccagagccugagaagagagcugagcggcuacugcagcaacaucaagcugcagguggugaaggacgcccaggcccugcugcacggccuggacuucagcgaggugagcaacgugcagagacugaugagaaagcagaagagagacgacggcgaccugaagagacugagagaccugaaccaggccgugaacaaccugguggagcugaagagcgugcagcagaagagcauccugagagugggcacccugaccagcgacgaccugcugacccuggccgccgaccuggagaagcugaagagcaaggugaccagaaccgagagaccccugagcagcggcguguacaugggcaaccugagcagccagcagcuggaccagagaagagcccugcugagcaugaucggcaugagcggcggcaaccagaacagccagcccaagggcgacggcguggugagagugugggacgugaagaacgccgaccugcugaacaaccaguucggcaccaugcccagccugacccuggccugccugaccaagcagggccagguggaccugaacgacgccgugcaggcccugaccgaccugggccugaucuacaccgccaaguaccccaacagcagcgaccuggacagacugagccagagccaccccauccugaacaugaucgacaccaagaagagcagccugaacaucagcggcuacaacuucagccugggcgccgccaucaagaccggcgccugcaugcuggacggcggcaacaugcuggagaccaucaaggugaccccccagaccauggacggcauccugaagagcauccugaaggugaagagaagccugggcauguucaucagcgacacccccggcgagagaaaccccuacgagaacauccuguacaagaucugccugagcggcgacggcuggcccuacaucgccagcagaaccgccaucaucggcagagccugggagaacaccgugguggaccuggagagcgacagcaagccccagaagaucggcagcaacggcagcaacaagagccugcagagcgccggcuucgcccccggccugaccuacagccagcugaugacccugaaggacagcaugcugcagcuggaccccaacgccaagaccuggaucgacaucgagggcagacccgaggaccccguggagguggcccuguuccagcccaucagcggcugcuacauccacuucuucagagagcccaccgaccugaagcaguucaagcaggacgccaaguacagccacggcaucgacgugaccgaccuguucgccgcccagcccggccugaccagcgccgugaucgaggcccugcccagaaacauggugcugaccugccagggcagcgacgacaucaagaagcugcuggacagccagggcagaagagacaucaagcugaucgacgugagccugaacaagaucgacagcagaaaguucgagaacgccgugugggaccaguacaaggaccugugccacaugcacaccggcguggugguggagaagaagaagaagggcggcaaggaggagaucaccccccacugcgcccugcuggacugcaucauguucgacgccgccgugagcggcggccugaacgccaccgugcugagagccgugcugcccagagacaugguguucagaaccagcagccccaagguggugcugugaggacuaguaauaaggaaacuguaugaaugucugugggcaggaagugaagagauccuucuguaaagguuuuuggaauuaugucugcugaauaauaaacuuuuuugaaauaauaaaucugguagaaaaaugagaucucaaaggcucuuuucagagccaccaaaaaaaaaaaaaaaaaaaaaaaaaaaaaaaaaaaaaaaaaaaaaaaaaaaaaaaaaaaaaaaaagaauu

SEQ ID NO: 20116 - RNA, 2066 nt, Artificial Sequence
  mRNA product Design b-4 (hSL-A64-N5) comprising derived and/or modified sequence from LASV(KAK-428;Clade n.d. (VII))__ANH09741__SP-HsALB_NP(2-569) (opt4)
aggagagucccgcagucggcguccagcggcucugcuuguucgugugugugucguugcaggccuuauucaagcuuaccaugaagugggugaccuucaucagccugcuguuccuguucagcagcgccuacagcagcaacagcaaggaggugaagagcuuccuguggacccagagccugagaagagagcugagcggcuacugcaccaacaucaagcugcagguggugaaggacgcccaggcccugcugcacggccuggacuucagcgaggugagcaacgugcagagacugaugagaaagcagaagagagacgacaacgaccugaagagacugagagaccugaaccaggccgugaacaaccugguggagcugaagagcgugcagcagaagagcgugcugaaggugggcacccugaacagcgacgaccugcugacccuggccgccgaccuggagaagcugaagagcaagguggugagaaccgagagaccccugagcagcggcguguacaugggcaaccugagcagccagcagcuggaccagagaagagcccugcugaacaugaucggcauggccggcggcagccagggcaaccagcccagcagagacggcguggugagagugugggacgugaagaacgccgaccugcugaacaaccaguucggcaccaugcccagccugacccuggccugccugaccaagcagggccagguggaccugaacgacguggugcuggcccugaccgaccugggccugaucuacaccgccaaguaccccaacagcagcgaccuggacagacugagccagaaccaccccgugcugaacaugaucgacgugaacaagagcagccugaacaucagcggcuacaacuucagccugggcgccgccgugaaggccggcgccugcaugcuggacggcggcaacaugcuggagaccaucaagaucagcccccagaccguggacggcauccugaagagcauccugaaggugaagagagcccugggcauguucgugagcgacacccccggcgagagaaaccccuacgagaacauccuguacaaggugugccugagcggcaacggcuggcccuacaucgccagcagaaccagcaucgugggcagagccugggagaacaccgugguggaccuggagagcaacaagaaccagcccaaggugggcaacaacggcagcaacaagaugcugcagagcagcggcuucgccaccggccugaccuacagccagcugaugacccugagagacagcaugcugcagcuggaccccaccgccaagaccuggaucgacaucgagggcagacccgaggaccccguggagcuggcccuguuccagcccagcagcggcugcuacauccacuucuucagagagcccaccgaccugaagcaguucaagcaggacgccaaguacagccacggcaucgacgugaacgaccuguucagcgcccagcccggccugaccagcgccgugcuggaggcccugcccagaaacauggugcugaccugccagggcagcgacgacaucagaaagcugcuggacagccaggacagaaaggacaucaagcugaucgacaucagccugagcaaggccgacgccagaaaguucgagaacgacgugugggaccaguucaaggaccugugccacaugcacaccggcaucgugguggagaagaagaagaagggcggcaagcaggagaugaccccccacugcgcccugcuggacugcaucauguucgacgccgccgugagcggcggccugaacgugcccacccugagagccgugcugcccaccgacaugguguucagaaccaucaccaccaagguggugcugugaggacuaguaauaaggaaacuguaugaaugucugugggcaggaagugaagagauccuucuguaaagguuuuuggaauuaugucugcugaauaauaaacuuuuuugaaauaauaaaucugguagaaaaaugagaucucaaaggcucuuuucagagccaccaaaaaaaaaaaaaaaaaaaaaaaaaaaaaaaaaaaaaaaaaaaaaaaaaaaaaaaaaaaaaaaaagaauu

SEQ ID NO: 20117 - RNA, 2066 nt, Artificial Sequence; identical to SEQ ID NO: 20111
  mRNA product Design b-4 (hSL-A64-N5) comprising derived and/or modified sequence from LASV(Pinneo-NIG-1969;Clade I)__AIT17837__SP-HsALB_NP(2-569) (opt4)

SEQ ID NO: 20118 - RNA, 2066 nt, Artificial Sequence
  mRNA product Design b-4 (hSL-A64-N5) comprising derived and/or modified sequence from LASV(ISTH0009-NIG-2011;Clade II)__AIT17405__SP-HsALB_NP(2-569) (opt4)
aggagagucccgcagucggcguccagcggcucugcuuguucgugugugugucguugcaggccuuauucaagcuuaccaugaagugggugaccuucaucagccugcuguuccuguucagcagcgccuacagcagcgugagcaaggaggugaagagcuuccuguggacccagagccugagaagagagcugagcggcuacugcagcaacaucaagcugcagguggugaaggacgcccaggcccugcugcacggccuggacuucagcgaggugagcaacgugcagagacugaugagaaagcagaagagagacgacagcgaccugaagagacugagagaccugaaccaggccgugaacaaccugguggagcugaagagcacccagcagaagagcauccugagagugggcacccugaccagcgacgaccugcugacccuggccgccgaccuggagaagcugaagagcaaggugaucagaaccgagagaccccugagcagcggcguguacaugggcaaccugagcacccagcagcuggagcagagaagagcccugcugaacaugaucggcauggugggcggcgcccagggcacccagcccggcagagacggcguggugagagugugggacgugaagaaccccgaccugcugaacaaccaguucggcaccaugcccagccugacccuggccugccugaccaagcagggccagguggaccugaacgacgccgugcuggcccugaccgaccugggccugaucuacaccgccaaguaccccaacagcagcgaccuggacagacugagccagagccaccccauccugaacaugguggacaucaagaagagcagccugaacaucagcggcuacaacuucagccugggcgccgccgugaaggccggcgccugcaugcuggacggcggcaacaugcuggagaccaucaaggugaccccccagaccauggacggcauccugaagagcauccugaaggugaagagaagccugggcauguucgugagcgacacccccggcgagagaaaccccuacgagaacauccuguacaagaucugccugagcggcgacggcuggcccuacaucgccagcagaaccagcaucgugggcagagccugggagaacaccaccguggaccuggagagcgacggcaagccccagaaggugggcagcgccggcagcaacaagagccugcagagcgccggcuuccccaccggccugaccuacagccagcugaugacccugaaggacagcaugaugcagcuggaccccagcgccaagaccuggaucgacaucgagggcagacccgaggaccccguggagaucgcccuguaccagcccaugagcggcugcuacauccacuucuucagagagcccaccgaccugaagcaguucaagcaggacgccaaguacagccacggcaucgacguggccgaccuguuccccgcccagcccggccugaccagcgccgugaucgaggcccugcccagaaacauggugcugaccugccagggcagcgacgacaucaagagacugcuggacagccagggcagaagagacaucaagcugaucgacaucgcccugagcaaggccgacagcagaagauucgagaacgccgugugggaccagugcaaggaccugugccacaugcacaccggcguggugguggagaagaagaagagaggcggcaaggaggagaucaccccccacugcgcccugauggacugcaucauguacgacgccgccgugagcggcggccugaacauccccgugcugagagccgugcugcccagagacaugguguucagaaccagcagccccaagguggugcugugaggacuaguaauaaggaaacuguaugaaugucugugggcaggaagugaagagauccuucuguaaagguuuuuggaauuaugucugcugaauaauaaacuuuuuugaaauaauaaaucugguagaaaaaugagaucucaaaggcucuuuucagagccaccaaaaaaaaaaaaaaaaaaaaaaaaaaaaaaaaaaaaaaaaaaaaaaaaaaaaaaaaaaaaaaaaagaauu

SEQ ID NO: 20119 - RNA, 2066 nt, Artificial Sequence
  mRNA product Design b-4 (hSL-A64-N5) comprising derived and/or modified sequence from LASV(ISTH2010-NIG-2012;Clade II)__AIT17483__SP-HsALB_NP(2-569) (opt4)
aggagagucccgcagucggcguccagcggcucugcuuguucgugugugugucguugcaggccuuauucaagcuuaccaugaagugggugaccuucaucagccugcuguuccuguucagcagcgccuacagcagcgccagcaaggaggugaagagcuuccuguggacccagagccugagaagagagcugagcggcuacugcagcaacaucaagcugcagguggugaaggacgcccaggcccugcugcacggccuggacuucagcgaggugagcaacgugcagagacugaugagaaagcagaagagagacgacagcgaccugaagagacugagagaccugaaccaggccgugaacaaccugguggagcugaagagcacccagcagaagagcauccugagagugggcacccugaccagcgacgaccugcugacccuggccgccgaccuggagaagcugaagagcaaggugaucagaaccgagagaccccugagcagcggcguguacaugggcaaccugagcacccagcagcuggagcagagaagagcccugcugaaccugaucggcauggugggcggcgcccagggcacccagcccggcagagacggcguggugagagugugggacgugaagaaccccgaccugcugaacaaccaguucggcaccaugcccagccugacccuggccugccugaccaagcagggccagguggaccugaacgacgccgugcuggcccugaccgaccugggccugaucuacaccgccaaguaccccaacagcagcgaccuggacagacugagccagagccaccccauccugaacaugguggacaccaagaagagcagccugaacaucagcggcuucaacuucagccugggcgccgccgugaaggccggcgccugcaugcuggacggcggcaacaugcuggagaccaucaaggugaccccccagaccauggacggcauccugaagagcauccugaaggugaagaagagccugggcauguucgugagcgacacccccggcgagagaaaccccuacgagaacauccuguacaagaucugccugagcggcgacggcuggcccuacaucgccagcagaaccagcaucgugggcagagccugggagaacaccaccguggaccuggagagcgacggcaagccccacaaggugggcaccgccggcagcaacaagagccugcagagcgccggcuuccccaccggccugaccuacagccagcugaugacccugaaggacagcaugaugcagcuggaccccagcgccaagaccuggaucgacaucgagggcagacccgaggaccccguggagaucgcccuguaccagcccaugagcggcugcuacauccacuucuucagagagcccaccgaccugaagcaguucaagcaggacgccaaguacagccacggcaucgacguggccgaccuguuccccgcccagcccggccugaccagcgccgugaucgaggcccugcccagaaacauggugcugaccugccagggcagcgacgacaucaagagacugcuggacagccagggcagaagagacaucaagcugaucgacaucgcccugagcaaggccgacagcagaagauucgagaacgccgugugggaccagugcaaggaccugugccacaugcacaccggcguggugguggagaagaagaagagaggcggcaaggaggagaucaccccccacugcgcccugauggacugcaucauguacgacgccgccgugagcggcggccugaacauccccgugcugagagccgugcugcccagagacaugguguucagaaccagcagccccaagguggugcugugaggacuaguaauaaggaaacuguaugaaugucugugggcaggaagugaagagauccuucuguaaagguuuuuggaauuaugucugcugaauaauaaacuuuuuugaaauaauaaaucugguagaaaaaugagaucucaaaggcucuuuucagagccaccaaaaaaaaaaaaaaaaaaaaaaaaaaaaaaaaaaaaaaaaaaaaaaaaaaaaaaaaaaaaaaaaagaauu

SEQ ID NO: 20120 - RNA, 2066 nt, Artificial Sequence
  mRNA product Design b-4 (hSL-A64-N5) comprising derived and/or modified sequence from LASV(Lassa virus/H.sapiens-wt/NGA/2015/ISTH_0543;Clade II)__AVO03640__SP-HsALB_NP(2-569) (opt4)
aggagagucccgcagucggcguccagcggcucugcuuguucgugugugugucguugcaggccuuauucaagcuuaccaugaagugggugaccuucaucagccugcuguuccuguucagcagcgccuacagcagcgccagcaaggaggugaagagcuuccuguggacccagagccugagaagagagcugagcggcuacugcagcaacaucaagcugcagguggugaaggacgcccaggcccugcugcacggccuggacuucagcgaggugagcaacgugcagagacugaugagaaagcagaagagagacgacagcgaccugaagagacugagagaccugaaccaggccgugaacaaccugguggagcugaagagcacccagcagaagagcauccugagagugggcacccugaccagcgacgaccugcugacccuggccgccgaccuggagaagcugaagagcaaggugaucagaaccgagagaccccugagcagcggcguguacaugggcaaccugagcacccagcagcuggagcagagaagagcccugcugaacaugaucggcauggugggcggcgcccagggcacccagcccggcagagacggcguggugagagugugggacgugaagaaccccgaccugcugaacaaccaguucggcaccaugcccagccugacccuggccugccugaccaagcagggccagguggaccugaacgacgccgugcuggcccugaccgaccugggccugaucuacaccgccaaguaccccaacagcagcgaccuggacagacugagccagagccaccccauccugaacaugguggacaccaagaagagcagccugaacaucagcggcuacaacuucagccugggcgccgccgugaaggccggcgccugcaugcuggacggcggcaacaugcuggagaccaucaaggugaccccccagaccauggacggcauccugaagagcauccugaaggugaagaagagccugggcauguucgugagcgacacccccggcgagagaaaccccuacgagaacauccuguacaagaucugccugagcggcgacggcuggcccuacaucgccagcagaaccagcaucgugggcagagccugggagaacaccaccguggaccuggagagcgacggcaagccccagaaggugggcagcgccggcagcaacaagagccugcagagcgccggcuuccccaccggccugaccuacagccagcugaugacccugaaggacagcaugaugcagcuggaccccagcgccaagaccuggaucgacaucgagggcagacccgaggaccccguggagaucgcccuguaccagcccaugagcggcugcuacauccacuucuucagagagcccaccgaccugaagcaguucaagcaggacgccaaguacagccacggcaucgacguggccgaccuguuccccgcccagcccggccugaccagcgccgugaucgaggcccugcccagaaacauggugcugaccugccagggcagcgacgacaucaagagacugcuggacagccagggcagaaaggacaucaagcugaucgacaucgcccugagcaaggccgacagcagaagauucgagaacgccgugugggaccagugcaaggaccugugccacaugcacaccggcguggugguggagaagaagaagagaggcggcaaggaggagaucaccccccacugcgcccugauggacugcaucauguacgacgccgccgugagcggcggccugaacauccccgugcugagagccgugcugcccagagacaugguguucagaaccagcagccccaagguggugcugugaggacuaguaauaaggaaacuguaugaaugucugugggcaggaagugaagagauccuucuguaaagguuuuuggaauuaugucugcugaauaauaaacuuuuuugaaauaauaaaucugguagaaaaaugagaucucaaaggcucuuuucagagccaccaaaaaaaaaaaaaaaaaaaaaaaaaaaaaaaaaaaaaaaaaaaaaaaaaaaaaaaaaaaaaaaaagaauu

SEQ ID NO: 20121 - RNA, 2066 nt, Artificial Sequence
  mRNA product Design b-4 (hSL-A64-N5) comprising derived and/or modified sequence from LASV(Lassa virus/H.sapiens-wt/NGA/2016/ISTH_0009;Clade II)__AVO03572__SP-HsALB_NP(2-569) (opt4)
aggagagucccgcagucggcguccagcggcucugcuuguucgugugugugucguugcaggccuuauucaagcuuaccaugaagugggugaccuucaucagccugcuguuccuguucagcagcgccuacagcagcgccagcaaggaggugaagagcuuccuguggacccagagccugagaagagagcugagcggcuacugcagcaacaucaagcugcagguggugaaggacgcccaggcccugcugcacggccuggacuucagcgaggugagcaacgugcagagacugaugagaaagcagaagagagacgacagcgaccugaagagacugagagaccugaaccaggccgugaacaaccugguggagcugaagagcacccagcagaagagcauccugagagugggcacccugaccagcgacgaccugcugacccuggccgccgaccuggagaagcugaagagcaaggugaucagaaccgagagaccccugagcagcggcguguacaugggcaaccugagcacccagcagcuggagcagagaagagcccugcugaacaugaucggcauggugggcggcgcccagggcacccagcccggcagagacggcguggugagagugugggacgugaagaaccccgaccugcugaacaaccaguucggcaccaugcccagccugacccuggccugccugaccaagcagggccagguggaccugaacgacgccgugcuggcccugaccgaccugggccugaucuacaccgccaaguaccccaacagcagcgaccuggacagacugagccagagccaccccauccugaacaugguggacaccaagaagagcagccugaacaucagcggcuacaacuucagccugggcgccgccgugaaggccggcgccugcaugcuggacggcggcaacaugcuggagaccaucaaggugaccccccagaccauggacggcauccugaagagcauccugaaggugaagaagagccugggcauguucgugagcgacacccccggcgagagaaaccccuacgagaacauccuguacaagaucugccugagcggcgacggcuggcccuacaucgccagcagaaccagcaucgugggcagagccugggagaacaccaccguggaccuggagagcgacggcaagccccagaaggugggcagcgccggcagcaacaagagccugcagagcgccggcuuccccaccggccugaccuacagccagcugaugacccugaaggacagcaugaugcagcuggaccccagcgccaagaccuggaucgacaucgagggcagacccgaggaccccguggagaucgcccuguaccagcccaugagcggcugcuacauccacuucuucagagagcccaccgaccugaagcaguucaagcaggacgccaaguacagccacggcaucgacguggccgaccuguuccccgcccagcccggccugaccagcgccgugaucgaggcccugcccagaaacauggugcugaccugccagggcagcgacgacaucaagagacugcuggacagccagggcagaagagacaucaagcugaucgacaucgcccugagcaaggccgacagcagaagauucgagaacgccgugugggaccagugcaaggaccugugccacaugcacaccggcguggugguggagaagaagaagagaggcggcaaggaggagaucaccccccacugcgcccugauggacugcaucauguacgacgccgccgugagcggcggccugaacauccccgugcugagagccgugcugcccagagacaugguguucagaaccagcagccccaagguggugcugugaggacuaguaauaaggaaacuguaugaaugucugugggcaggaagugaagagauccuucuguaaagguuuuuggaauuaugucugcugaauaauaaacuuuuuugaaauaauaaaucugguagaaaaaugagaucucaaaggcucuuuucagagccaccaaaaaaaaaaaaaaaaaaaaaaaaaaaaaaaaaaaaaaaaaaaaaaaaaaaaaaaaaaaaaaaaagaauu

SEQ ID NO: 20122 - RNA, 2066 nt, Artificial Sequence
  mRNA product Design b-4 (hSL-A64-N5) comprising derived and/or modified sequence from LASV(Lassa virus/H.sapiens-wt/NGA/2016/ISTH_0017;Clade II)__AVO03568__SP-HsALB_NP(2-569) (opt4)
aggagagucccgcagucggcguccagcggcucugcuuguucgugugugugucguugcaggccuuauucaagcuuaccaugaagugggugaccuucaucagccugcuguuccuguucagcagcgccuacagcagcgccagcaaggaggugaagagcuuccuguggacccagagccugagaagagagcugagcggcuacugcagcagcaucaagcugcagguggugaaggacgcccaggcccugcugcacggccuggacuucagcgaggugagcaacgugcagagacugaugagaaagcagaagagagacgacagcgaccugaagagacugagagaccugaaccaggccgugaacaaccugguggagcugaagagcacccagcagaagagcauccugagagugggcacccugaccagcgacgaccugcugacccuggccgccgaccuggagaagcugaagagcaaggugaucagaaccgagagaccccugagcagcggcguguacaugggcaaccugagcacccagcagcuggagcagagaagagcccugcugaacaugaucggcauggccggcggcgcccagggcacccagcccggcagagacggcguggugagagugugggacgugaagaaccccgaccugcugaacaaccaguucggcaccaugcccagccugacccuggccugccugaccaagcagggccagguggaccugaacgacgccgugcuggcccugaccgaccugggccugaucuacaccgccaaguaccccaacagcagcgaccuggacagacugagccagagccaccccauccugaacaugguggacaccaagaagagcagccugaacaucagcggcuacaacuucagccugggcgccgccgugaaggccggcgccugcaugcuggacggcggcaacaugcuggagaccaucaaggugaccccccagaccauggacggcauccugaagagcauccugaaggugaagagaagccugggcauguucgugagcgacgcccccggcgagagaaaccccuacgagaacauccuguacaagaucugccugagcggcgacggcuggcccuacaucgccagcagaaccagcaucgugggcagagccugggagaacaccaccguggaccuggagagcgacggcaagccccagaaggugggcgccaccggcagcaacaagagccugcagagcgccggcuuccccaccggccugaccuacagccagcugaugacccugaaggacagcaugaugcagcuggaccccagcgccaagaccuggaucgacaucgagggcagacccgaggaccccguggagguggcccuguaccagcccgugagcggcugcuacauccacuucuucagagagcccaccgaccugaagcaguucaagcaggacgccaaguacagccacggcaucgacguggccgaccuguuccccgcccagcccggccugaccagcgccgugaucgaggcccugcccagaaacauggugcugaccugccagggcagcgacgacaucaagaagcugcuggacagccagggcagaaaggacaucaagcugaucgacaucgcccugagcaaggccgacagcagaagauucgagaacgccgugugggaccagugcaaggaccugugccacaugcacaccggcguggugguggagaagaagaagagaggcggcaaggaggagaucaccccccacugcgcccugauggacugcaucauguacgacgccgccgugagcggcggccugaacauccccgugcugagagccgugcugcccagagacaugguguucagaaccagcagccccaagguggugcugugaggacuaguaauaaggaaacuguaugaaugucugugggcaggaagugaagagauccuucuguaaagguuuuuggaauuaugucugcugaauaauaaacuuuuuugaaauaauaaaucugguagaaaaaugagaucucaaaggcucuuuucagagccaccaaaaaaaaaaaaaaaaaaaaaaaaaaaaaaaaaaaaaaaaaaaaaaaaaaaaaaaaaaaaaaaaagaauu

SEQ ID NO: 20123 - RNA, 2066 nt, Artificial Sequence
  mRNA product Design b-4 (hSL-A64-N5) comprising derived and/or modified sequence from LASV(Lassa virus/H.sapiens-wt/NGA/2018/ISTH_0959;Clade II)__AVV65100__SP-HsALB_NP(2-569) (opt4)
aggagagucccgcagucggcguccagcggcucugcuuguucgugugugugucguugcaggccuuauucaagcuuaccaugaagugggugaccuucaucagccugcuguuccuguucagcagcgccuacagcagcgccagcaaggaggugaagagcuuccuguggacccagagccugagaagagagcugagcggcuacugcagcaacaucaagcugcagguggugaaggacgcccaggcccugcugcacggccuggacuucagcgaggugagcaacgugcagagacugaugagaaagcagaagagagacgacagcgaccugaagagacugagagaccugaaccaggccgugaacaaccugguggagcugaagagcacccagcagaagagcauccugagagugggcacccugaccagcgacgaccugcugacccuggccgccgaccuggagaagcugaagagcaaggugaucagaaccgagagaccccugagcagcggcguguacaugggcaaccugagcacccagcagcuggagcagagaagagcccugcugaaccugaucggcauggugggcggcgcccagggcacccagcccggcagagacggcguggugagagugugggacgugaagaaccccgaccugcugaacaaccaguucggcaccaugcccagccugacccuggccugccugaccaagcagggccagguggaccugaacgacguggugcuggcccugaccgaccugggccugaucuacaccgccaaguaccccaacagcagcgaccuggacagacugagccagagccaccccauccugaacaugguggacaccaagaagagcagccugaacaucagcggcuucaacuucagccugggcgccgccgugaaggccggcgccugcaugcuggacggcggcaacaugcuggagaccaucaaggugaccccccagaccauggacggcauccugaagagcauccugaaggugaagaagagccugggcauguucgugagcgacacccccggcgagagaaaccccuacgagaacauccuguacaagaucugccugagcggcgacggcuggcccuacaucgccagcagaaccagcaucgugggcagagccugggagaacaccaccguggaccuggagagcgacggcaagccccacaaggugggcaccgccggcagcaacaagagccugcagagcgccggcuuccccaccggccugaccuacagccagcugaugacccugaaggacagcaugaugcagcuggaccccagcgccaagaccuggaucgacaucgagggcagacccgaggaccccguggagaucgcccuguaccagcccaugagcggcugcuacauccacuucuucagagagcccaccgaccugaagcaguucaagcaggacgccaaguacagccacggcaucgacguggccgaccuguuccccgcccagcccggccugaccagcgccgugaucgaggcccugcccagaaacauggugcugaccugccagggcagcgacgacaucaagagacugcuggacagccagggcagaaaggacaucaagcugaucgacaucgcccugagcaagaccgacagcagaagauucgagaacgccgugugggaccagugcaaggaccugugccacaugcacaccggcguggugguggagaagaagaagagaggcggcaaggaggagaucaccccccacugcgcccugauggacugcaucauguacgacgccgccgugagcggcggccugaacauccccgugcugagagccgugcugcccagagacaugguguucagaaccagcagccccaagguggugcugugaggacuaguaauaaggaaacuguaugaaugucugugggcaggaagugaagagauccuucuguaaagguuuuuggaauuaugucugcugaauaauaaacuuuuuugaaauaauaaaucugguagaaaaaugagaucucaaaggcucuuuucagagccaccaaaaaaaaaaaaaaaaaaaaaaaaaaaaaaaaaaaaaaaaaaaaaaaaaaaaaaaaaaaaaaaaagaauu

SEQ ID NO: 20124 - RNA, 2066 nt, Artificial Sequence
  mRNA product Design b-4 (hSL-A64-N5) comprising derived and/or modified sequence from LASV(LASV003-NIG-2008;Clade II)__AIT17581__SP-HsALB_NP(2-569) (opt4)
aggagagucccgcagucggcguccagcggcucugcuuguucgugugugugucguugcaggccuuauucaagcuuaccaugaagugggugaccuucaucagccugcuguuccuguucagcagcgccuacagcagcgccagcaaggaggugaagagcuuccuguggacccagagccugagaagagagcugagcggcuacugcagcagcaucaagcugcagguggugaaggacgcccaggcccugcugcacggccuggacuucagcgaggugagcaacgugcagagacugaugagaaagcagaagagagacgacagcgaccugaagagacugagagaccugaaccaggccgugaacaaccugguggagcugaagagcacccagcagaagagcgugcugagagugggcacccugaccagcgacgaccugcugacccuggccgccgaccuggagaagcugaagagcaaggugaucagaaccgagagaccccugagcagcggcguguacaugggcaaccugagcgcccagcagcuggagcagagaagaacccugcugaacaugaucggcauggugggcggcgcccagggcacccagcccggcagagacggcguggugagagugugggacgugaagaaccccgaccugcugaacaaccaguucggcaccaugcccagccugacccuggccugccugaccaagcagggccagguggaccugaacgacguggugcuggcccugaccgaccugggccugaucuacaccgccaaguaccccaacagcagcgaccuggacagacugagccagagccaccccauccugagcaugguggacaccaagaagagcagccugaacaucagcggcuacaacuucagccugggcgccgccgugaaggccggcgccugcaugcuggacggcggcaacaugcuggagaccaucaaggugaccccccagaccauggacggcauccugaagagcauccugaaggugaagaagagccugggcauguucgugagcgacacccccggcgagagaaaccccuacgagaacauccuguacaagaucugccugagcggcgacggcuggcccuacaucgccagcagaaccagcaucgugggcagagccugggagaacaccaccguggaccuggagagcgacggcaagccccagaaggugggcaccgccggcagcaacaagagccugcagagcgccggcuuccccaccggccugaccuacagccagcugaugacccugaaggacagcaugaugcagcuggaccccagcgccaagaccuggaucgacaucgagggcagacccgaggaccccguggagaucgcccuguaccagcccaugagcggcugcuacauccacuucuucagagagcccaccgaccugaagcaguucaagcaggacgccaaguacagccacggcaucgacgugaccgaccuguuccccgcccagcccggccugaccagcgccgugaucgaggcccugcccagaaacauggugcugaccugccagggcagcgacgacaucaagagacugcuggacagccagggcagaagagacaucaagcugaucgacaucgcccugagcaaggccgacagcagaagauucgagaacgccgugugggaccagugcaaggaccugugccacaugcacaccggcguggugguggagaagaagaagagaggcggcaaggaggagaucaccccccacugcgcccugauggacugcaucauguacgacgccgccgugagcggcggccugaacauccccgugcugagagccgugcugcccagagacaugguguucagaaccagcagccccaagguggugcugugaggacuaguaauaaggaaacuguaugaaugucugugggcaggaagugaagagauccuucuguaaagguuuuuggaauuaugucugcugaauaauaaacuuuuuugaaauaauaaaucugguagaaaaaugagaucucaaaggcucuuuucagagccaccaaaaaaaaaaaaaaaaaaaaaaaaaaaaaaaaaaaaaaaaaaaaaaaaaaaaaaaaaaaaaaaaagaauu

SEQ ID NO: 20125 - RNA, 2066 nt, Artificial Sequence
  mRNA product Design b-4 (hSL-A64-N5) comprising derived and/or modified sequence from LASV(LASV035-NIG-2009;Clade II)__AIT17589__SP-HsALB_NP(2-569) (opt4)
aggagagucccgcagucggcguccagcggcucugcuuguucgugugugugucguugcaggccuuauucaagcuuaccaugaagugggugaccuucaucagccugcuguuccuguucagcagcgccuacagcagcgccagcaaggaggugaagagcuuccuguggacccagagccugagaagagagcugagcggcuacugcagcagcaucaagcugcagguggugaaggacgcccaggcccugcugcacggccuggacuucagcgaggugagcaacgugcagagacugaugagaaagcagaagagagacgacagcgaccugaagagacugagagaccugaaccaggccgugaacaaccugguggagcugaagagcacccagcagaagagcauccugagagugggcacccugaccagcgacgaccugcugacccuggccgccgaccuggagaagcugaagagcaaggugaucagaaccgagagaccccugagcagcggcguguacaugggcaaccugagcgcccagcagcuggagcagagaagagcccugcugaacaugaucggcauggugggcggcgcccagggcacccagcccggcagagacggcguggugagagugugggacgugaagaaccccgaccugcugaacaaccaguucggcaccaugcccagccugacccuggccugccugaccaagcagggccagguggaccugaacgacgccgugcuggcccugaccgaccugggccugaucuacaccgccaaguaccccaacagcagcgaccuggacagacugagccagagccaccccauccugaacaugguggacaccaagaagagcagccugaacaucagcggcuacaacuucagccugggcgccgccgugaaggccggcgccugcaugcuggacggcggcaacaugcuggagaccaucaaggugaccccccagaccauggacggcauccugaagagcauccugaaggugaagagaagccugggcauguucgugagcgacacccccggcgagagaaaccccuacgagaacauccuguacaagaucugccugagcggcgacggcuggcccuacaucgccagcagaaccagcaucgugggcagagccugggagaacaccaccguggaccuggagagcgacggcaagccccagaaggugggcaccaccggcagcaacaagagccugcagagcgccggcuuccccaccggccugaccuacagccagcugaugacccugaaggacagcaugaugcagcuggaccccagcgccaagaccuggaucgacaucgagggcagacccgaggaccccguggagaucgcccuguaccagcccaugagcggcugcuacauccacuucuucagagagcccaccgaccugaagcaguucaagcaggacgccaaguacagccacggcaucgacguggccgaccuguuccccgcccagcccggccugaccagcgccgugaucgaggcccugcccagaaacauggugcugaccugccagggcagcgacgacaucaagaagcugcuggacagccagggcagaagagacaucaagcugaucgacaucgcccugagcaaggccgacagcagaaaguucgagaacgccgugugggaccagugcaaggaccugugccacaugcacaccggcguggugguggagaagaagaagagaggcggcaaggaggagaucaccccccacugcgcccugauggacugcaucauguacgacgccgccgugagcggcggccugaacauccccgugcugagagccgugcugcccagagacaugguguucagaaccagcagccccaagguggugcugugaggacuaguaauaaggaaacuguaugaaugucugugggcaggaagugaagagauccuucuguaaagguuuuuggaauuaugucugcugaauaauaaacuuuuuugaaauaauaaaucugguagaaaaaugagaucucaaaggcucuuuucagagccaccaaaaaaaaaaaaaaaaaaaaaaaaaaaaaaaaaaaaaaaaaaaaaaaaaaaaaaaaaaaaaaaaagaauu

SEQ ID NO: 20126 - RNA, 2066 nt, Artificial Sequence
  mRNA product Design b-4 (hSL-A64-N5) comprising derived and/or modified sequence from LASV(LASV1000-NIG-2009;Clade II)__AIT17783__SP-HsALB_NP(2-569) (opt4)
aggagagucccgcagucggcguccagcggcucugcuuguucgugugugugucguugcaggccuuauucaagcuuaccaugaagugggugaccuucaucagccugcuguuccuguucagcagcgccuacagcagcgccagcaaggaggugaagagcuuccuguggacccagagccugagaagagagcugagcggcuacugcagcaacaucaagcugcagguggugaaggacgcccaggcccugcugcacggccuggacuucagcgaggugagcaacgugcagagacugaugagaaagcagaagagagacgacagcgaccugaagagacugagagaccugaaccaggccgugaacaaccugguggagcugaagagcacccagcagaagagcauccugagagugggcacccugaccagcgacgaccugcugacccuggccgccgaccuggagaagcugaagagcaaggugaucagaaccgagagaccccugagcagcggcguguacaugggcaaccugagcacccagcagcuggagcagagaagagcccugcugaacaugaucggcauggugggcggcgcccagggcacccagcccggcagagacggcguggugagagugugggacgugaagaaccccgaccugcugaacaaccaguucggcaccaugcccagccugacccuggccugccugaccaagcagggccagguggaccugaacgacguggugcuggcccugaccgaccugggccugaucuacaccgccaaguaccccaacagcagcgaccuggacagacugagccagagccaccccauccugaacaugguggacaccaagaagagcagccugaacaucagcggcuacaacuucagccugggcgccgccgugaaggccggcgccugcaugcuggacggcggcaacaugcuggagaccaucaaggugaccccccagaccauggacggcauccugaagagcauccugaaggugaagaagagccugggcauguucgugagcgacacccccggcgagagaaaccccuacgagaacauccuguacaagaucugccugagcggcgacggcuggcccuacaucgccagcagaaccagcaucgugggcagagccugggagaacaccaccguggaccuggagagcgacggcaagccccagaaggugggcaccgccggcagcaacaagagccugcagagcgccggcuuccccaccggccugaccuacagccagcugaugacccugaaggacagcaugaugcagcuggaccccagcgccaagaccuggaucgacaucgagggcagacccgaggaccccguggagaucgcccuguaccagcccgugagcggcugcuacauccacuucuucagagagcccaccgaccugaagcaguucaagcaggacgccaaguacagccacggcaucgacguggccgaccuguuccccgcccagcccggccugaccagcgccgugaucgaggcccugcccagaaacauggugcugaccugccagggcagcgacgacaucaagagacugcuggacagccagggcagaagagacaucaagcugaucgacaucgcccugagcaaggccgacagcagaagauucgagaacgccgugugggaccagugcaaggaccugugccacaugcacaccggcguggugguggagaagaagaagagaggcggcaaggaggagaucaccccccacugcgcccugauggacugcaucauguacgacgccgccgugagcggcggccugaacauccccgugcugagagccgugcugcccagagacaugguguucagaaccagcagccccaagguggugcugugaggacuaguaauaaggaaacuguaugaaugucugugggcaggaagugaagagauccuucuguaaagguuuuuggaauuaugucugcugaauaauaaacuuuuuugaaauaauaaaucugguagaaaaaugagaucucaaaggcucuuuucagagccaccaaaaaaaaaaaaaaaaaaaaaaaaaaaaaaaaaaaaaaaaaaaaaaaaaaaaaaaaaaaaaaaaagaauu

SEQ ID NO: 20127 - RNA, 2066 nt, Artificial Sequence
  mRNA product Design b-4 (hSL-A64-N5) comprising derived and/or modified sequence from LASV(LASV221-NIG-2010;Clade II)__AIT17625__SP-HsALB_NP(2-569) (opt4)
aggagagucccgcagucggcguccagcggcucugcuuguucgugugugugucguugcaggccuuauucaagcuuaccaugaagugggugaccuucaucagccugcuguuccuguucagcagcgccuacagcagcgccagcaaggaggugaagagcuuccuguggacccagagccugagaagagagcugagcggcuacugcagcagcaucaagcugcagguggugaaggacgcccaggcccugcugcacggccuggacuucagcgaggugagcaacgugcagagacugaugagaaagcagagaagagacgacagcgaccugaagagacugagagaccugaaccaggccgugaacaaccugguggagcugaagagcacccagcagaagagcauccugagagugggcacccugaccagcgacgaccugcugacccuggccgccgaccuggagaagcugaagagcaaggugaucagaaccgagagaccccugagcagcggcguguacaugggcaaccugagcacccagcagcuggagcagagaagagcccugcugaacaugaucggcauggugggcggcgcccagggcacccagcccggcagagacggcguggugagagugugggacgugaagaaccccgaccugcugaacaaccaguucggcaccaugcccagccugacccuggccugccugaccaagcagggccagguggaccugaacgacgccgugcuggcccugaccgaccugggccugaucuacaccgccaaguaccccaacagcagcgaccuggacagacugagccagagccaccccauccugaacaugguggacaccaagaagagcagccugaacaucagcggcuacaacuucagccugggcgccgccgugaaggccggcgccugcaugcuggacggcggcaacaugcuggagaccaucaaggugaccccccagaccguggacggcauccugaagagcauccugaaggugaagagaagccugggcauguucgugagcgacacccccggcgagagaaaccccuacgagaacauccuguacaagaucugccugagcggcgacggcuggcccuacaucgccagcagaaccagcaucgugggcagagccugggagaacaccaccguggaccuggagagcgacggcaagccccagaaggugggcaccgccggcagcaacaagagccugcagagcgccggcuuccccaccggccugaccuacagccagcugaugacccugaaggacagcaugaugcagcuggaccccagcgccaagaccuggaucgacaucgagggcagacccgaggaccccguggagaucgcccuguaccagcccaugagcggcugcuacauccacuucuucagagagcccaccgaccugaagcaguucaagcaggacgccaaguacagccacggcaucgacguggccgaccuguuccccgcccagcccggccugaccagcgccgugaucgaggcccugcccagaaacauggugcugaccugccagggcagcgacgacaucaagagacugcuggacagccagggcagaagagacaucaagcugaucgacaucgcccugagcaaggccgacagcagaaaguucgagaacgccgugugggaccagugcaaggaccugugccacaugcacaccggcguggugguggagaagaagaagagaggcggcaaggaggagaucaccccccacugcgcccugauggacugcaucauguacgacgccgccgugagcggcggccugaacauccccgugcugagagccgugcugcccagagacaugguguucagaaccagcagccccaagguggugcugugaggacuaguaauaaggaaacuguaugaaugucugugggcaggaagugaagagauccuucuguaaagguuuuuggaauuaugucugcugaauaauaaacuuuuuugaaauaauaaaucugguagaaaaaugagaucucaaaggcucuuuucagagccaccaaaaaaaaaaaaaaaaaaaaaaaaaaaaaaaaaaaaaaaaaaaaaaaaaaaaaaaaaaaaaaaaagaauu

SEQ ID NO: 20128 - RNA, 2066 nt, Artificial Sequence
  mRNA product Design b-4 (hSL-A64-N5) comprising derived and/or modified sequence from LASV(LASV237-NIG-2010;Clade II)__AIT17639__SP-HsALB_NP(2-569) (opt4)
aggagagucccgcagucggcguccagcggcucugcuuguucgugugugugucguugcaggccuuauucaagcuuaccaugaagugggugaccuucaucagccugcuguuccuguucagcagcgccuacagcagcgccagcaaggaggugaagagcuuccuguggacccagagccugagaagagagcugagcggcuacugcagcaacaucaagcugcagguggugaaggacgcccaggcccugcugcacggccuggacuucagcgaggugagcaacgugcagagacugaugagaaagcagaagagagacgacagcgaccugaagagacugagagaccugaaccaggccgugaacaaccugguggagcugaagagcacccagcagaagagcauccugagagugggcacccugaccagcgacgaccugcugacccuggccgccgaccuggagaagcugaagagcaaggugaucagaaccgagagaccccugagcagcggcguguacaugggcaaccugagcacccagcagcuggagcagagaagagcccugcugaacaugaucggcauggugggcggcgcccagggcacccagcccggcagagacggcguggugagagugugggacgugaagaaccccgaccugcugaacaaccaguucggcaccaugcccagccugacccuggccugccugaccaagcagggccagguggaccugaacgacgccgugcuggcccugaccgaccugggccugaucuacaccgccaaguaccccaacagcagcgaccuggacagacugagccagagccaccccauccugaacaugguggacaucaagaagagcagccugaacaucagcggcuacaacuucagccugggcgccgccgugaaggccggcgccugcaugcuggacggcggcaacaugcuggagaccaucaaggugaccccccagaccauggacggcauccugaagagcauccugaaggugaagagaagccugggcauguucgugagcgacacccccggcgagagaaaccccuacgagaacauccuguacaagaucugccugagcggcgacggcuggcccuacaucgccagcagaaccagcaucgugggcagagccugggagaacaccaccguggaccuggagagcgacggcaagccccagaaggugggcagcgccggcagcaacaagagccugcagagcgccggcuuccccaccggccugaccuacagccagcugaugacccugaaggacagcaugaugcagcuggaccccagcgccaagaccuggaucgacaucgagggcagacccgaggaccccguggagaucgcccuguaccagcccaugagcggcugcuacauccacuucuucagagagcccaccgaccugaagcaguucaagcaggacgccaaguacagccacggcaucgacguggccgaccuguuccccgcccagcccggccugaccagcgccgugaucgaggcccugcccagaaacauggugcugaccugccagggcagcgacgacaucaagagacugcuggacagccagggcagaagagacaucaagcugaucgacaucgcccugagcaaggccgacagcagaagauucgagaacgccgugugggaccagugcaaggaccugugccacaugcacaccggcguggugguggagaagaagaagagaggcggcaaggaggagaucaccccccacugcgcccugauggacugcaucauguacgacgccgccgugagcggcggccugaacauccccgugcugagagccgugcugcccagagacaugguguucagaaccagcagccccaagguggugcugugaggacuaguaauaaggaaacuguaugaaugucugugggcaggaagugaagagauccuucuguaaagguuuuuggaauuaugucugcugaauaauaaacuuuuuugaaauaauaaaucugguagaaaaaugagaucucaaaggcucuuuucagagccaccaaaaaaaaaaaaaaaaaaaaaaaaaaaaaaaaaaaaaaaaaaaaaaaaaaaaaaaaaaaaaaaaagaauu

SEQ ID NO: 20129 - RNA, 2066 nt, Artificial Sequence
  mRNA product Design b-4 (hSL-A64-N5) comprising derived and/or modified sequence from LASV(LASV253-NIG-2011;Clade II)__AIT17671__SP-HsALB_NP(2-569) (opt4)
aggagagucccgcagucggcguccagcggcucugcuuguucgugugugugucguugcaggccuuauucaagcuuaccaugaagugggugaccuucaucagccugcuguuccuguucagcagcgccuacagcagcgccagcaaggaggugaagagcuuccuguggacccagagccugagaagagagcugagcggcuacugcagcagcaucaagcugcagguggugaaggacgcccaggcccugcugcacggccuggacuucagcgaggugagcaacgugcagagacugaugagaaagcagaagagagacgacagcgaccugaagagacugagagaccugaaccaggccgugaacaaccugguggagcugaagagcacccagcagaagagcgugcugagagugggcacccugaccagcgacgaccugcugacccuggccgccgaccuggagaagcugaagagcaaggugaucagaaccgagagaccccugagcagcggcguguacaugggcaaccugagcacccagcagcuggagcagagaagagcccugcugaacaugaucggcauggugggcggcgcccagggcacccagcccggcagagacggcguggugagagugugggacgugaagaaccccgaccugcugaacaaccaguucggcaccaugcccagccugacccuggccugccugaccaagcagggccagguggaccugaacgacguggugcuggcccugaccgaccugggccugaucuacaccgccaaguaccccaacagcagcgaccuggacagacugagccagagccaccccauccugaacaugguggacaccaagaagagcagccugaacaucagcggcuacaacuucagccugggcgccgccgugaaggccggcgccugcaugcuggacggcggcaacaugcuggagaccaucaaggugaccccccagaccauggacggcauccugaagagcauccugaaggugaagaagagccugggcauguucgugagcgacacccccggcgagagaaaccccuacgagaacauccuguacaagaucugccugagcggcgacggcuggcccuacaucgccagcagaaccagcaucgugggcagagccugggagaacaccaccguggaccuggagagcgacggcaagccccagaaggugggcaccgccggcagcaacaagagccugcagagcgccggcuuccccaccggccugaccuacagccagcugaugacccugaaggacagcaugaugcagcuggaccccagcgccaagaccuggaucgacaucgagggcagacccgaggaccccguggagaucgcccuguaccagcccaugagcggcugcuacauccacuucuucagagagcccaccgaccugaagcaguucaagcaggacgccaaguacagccacggcaucgacgugaccgaccuguuccccgcccagcccggccugaccagcgccgugaucgaggcccugcccagaaacauggugcugaccugccagggcagcgacgacaucaagagacugcuggacagccagggcagaagagacaucaagcugaucgacaucgcccugagcaaggccgacagcagaagauucgagaacgccgugugggaccagugcaaggaccugugccacaugcacaccggcguggugguggagaagaagaagagaggcggcaaggaggagaucaccccccacugcgcccugauggacugcaucauguacgacgccgccgugagcggcggccugaacauccccgugcugagagccgugcugcccagagacaugguguucagaaccagcagccccaagguggugcugugaggacuaguaauaaggaaacuguaugaaugucugugggcaggaagugaagagauccuucuguaaagguuuuuggaauuaugucugcugaauaauaaacuuuuuugaaauaauaaaucugguagaaaaaugagaucucaaaggcucuuuucagagccaccaaaaaaaaaaaaaaaaaaaaaaaaaaaaaaaaaaaaaaaaaaaaaaaaaaaaaaaaaaaaaaaaagaauu

SEQ ID NO: 20130 - RNA, 2066 nt, Artificial Sequence
  mRNA product Design b-4 (hSL-A64-N5) comprising derived and/or modified sequence from LASV(LASV254-NIG-2011;Clade II)__AIT17675__SP-HsALB_NP(2-569) (opt4)
aggagagucccgcagucggcguccagcggcucugcuuguucgugugugugucguugcaggccuuauucaagcuuaccaugaagugggugaccuucaucagccugcuguuccuguucagcagcgccuacagcagcgccagcaaggaggugaagagcuuccuguggacccagagccugagaagagagcugagcggcuacugcagcagcaucaagcugcagguggugaaggacgcccaggcccugcugcacggccuggacuucagcgaggugagcaacgugcagagacugaugagaaagcagaagagagacgacagcgaccugaagagacugagagaccugaaccaggccgugaacaaccugguggagcugaagagcacccagcagaagagcgugcugagagugggcacccugaccagcgacgaccugcugacccuggccgccgaccuggagaagcugaagagcaaggugaucagaaccgagagaccccugagcagcggcguguacaugggcaaccugagcacccagcagcuggagcagagaagagcccugcugaacaugaucggcauggugggcggcgcccagggcacccagcccggcagagacggcguggugagagugugggacgugaagaaccccgaccugcugaacaaccaguucggcaccaugcccagccugacccuggccugccugaccaagcagggccagguggaccugaacgacgccgugcuggcccugaccgaccugggccugaucuacaccgccaaguaccccaacagcagcgaccuggacagacugagccagagccaccccauccugaacaugguggacaccaagaagagcagccugaacaucagcggcuacaacuucagccugggcgccgccgugaaggccggcgccugcaugcuggacggcggcaacaugcuggagaccaucaaggugaccccccagaccauggacggcauccugaagagcauccugaaggugaagaagagccugggcauguucgugagcgacacccccggcgagagaaaccccuacgagaacauccuguacaagaucugccugagcggcgacggcuggcccuacaucgccagcagaaccagcaucgugggcagagccugggagaacaccaucguggaccuggagagcgacggcaagccccagaaggugggcaccgccggcagcaacaagagccugcagagcgccggcuuccccaccggccugaccuacagccagcugaugacccugaaggacagcaugaugcagcuggaccccagcgccaagaccuggaucgacaucgagggcagacccgaggaccccguggagaucgcccuguaccagcccaugagcggcugcuacauccacuucuucagagagcccaccgaccugaagcaguucaagcaggacgccaaguacagccacggcaucgacguggccgaccuguuccccgcccagcccggccugaccagcgccgugaucgaggcccugcccagaaacauggugcugaccugccagggcagcgacgacaucaagagacugcuggacagccagggcagaagagacaucaagcugaucgacaucgcccugagcaaggccgacagcagaagauucgagaacgccgugugggaccagugcaaggaccugugccacaugcacaccggcguggugguggagaagaagaagagaggcggcaaggaggagaucaccccccacugcgcccugauggacugcaucauguacgacgccgccgugagcggcggccugaacauccccgugcugagagccgugcugcccagagacaugguguucagaaccagcagccccaagguggugcugugaggacuaguaauaaggaaacuguaugaaugucugugggcaggaagugaagagauccuucuguaaagguuuuuggaauuaugucugcugaauaauaaacuuuuuugaaauaauaaaucugguagaaaaaugagaucucaaaggcucuuuucagagccaccaaaaaaaaaaaaaaaaaaaaaaaaaaaaaaaaaaaaaaaaaaaaaaaaaaaaaaaaaaaaaaaaagaauu

SEQ ID NO: 20131 - RNA, 2066 nt, Artificial Sequence
  mRNA product Design b-4 (hSL-A64-N5) comprising derived and/or modified sequence from LASV(Nig08-04;Clade II)__ADU56611__SP-HsALB_NP(2-569) (opt4)
aggagagucccgcagucggcguccagcggcucugcuuguucgugugugugucguugcaggccuuauucaagcuuaccaugaagugggugaccuucaucagccugcuguuccuguucagcagcgccuacagcagcgccagcaaggaggugaagagcuuccuguggacccagagccugagaagagagcugagcggcuacugcagcaacaucaagcugcagguggugaaggacgcccaggcccugcugcacggccuggacuucagcgaggugagcaacgugcagagacugaugagaaagcagaagagagacgacggcgaccugaagagacugagagaccugaaccaggccgugaacaaccugguggagcugaagagcacccagcagaagagcgugcugagagugggcacccugaccagcgacgaccugcugacccuggccgccgaccuggagaagcugaagagcaaggugaucagaaccgagagaccccugagcagcggcguguacaugggcaaccugagcacccagcagcuggagcagagaaaggcccugcugagcaugaucggcauggugggcggcgcccagggcacccagcccggcagagacggcguggugagagugugggacgugaagaaccccgaccugcugaacaaccaguucggcaccaugcccagccugacccuggccugccugaccaagcagggccagguggaccugaacgacgccgugcuggcccugaccgaccugggccugaucuacaccgccaaguaccccaacagcagcgaccuggacagacugagccagagccaccccauccugaacaugguggacaccaagaagagcagccugaacaucagcggcuacaacuucagccugggcgccgccgugaaggccggcgccugcaugcuggacggcggcaacaugcuggagaccaucaaggugaccccccagaccauggacggcauccugaagagcauccugaaggugaagagaagccugggcauguucgugagcgacacccccggcgagagaaaccccuacgagaacauccuguacaagaucugccugagcggcgacggcuggcccuacaucgccagcagaaccagcaucgugggcagagccugggagaacaccaccguggaccuggagagcgacggcaagccccagaaggugggcaccgccggcagcaacaagagccugcagagcgccggcuuccccaccggccugaccuacagccagcugaugacccugaaggacagcaugaugcagcuggaccccagcgccaagaccuggaucgacaucgagggcagacccgaggaccccguggagaucgcccuguaccagcccaugagcggcugcuacauccacuucuucagagagcccaccgaccugaagcaguucaagcaggacgccaaguacagccacggcaucgacgugaccgaccuguucagcgcccagcccggccugaccagcgccgugaucgaggcccugcccagaaacauggugcugaccugccagggcagcgacgacaucaagaagcugcuggacagccagggcagaagagacaucaagcugaucgacaucagccugaacaaggccgacagcagaagauucgagaacgccgugugggaccagugcaaggaccugugccacaugcacaccggcguggugguggagaagaagaagagaggcggcaaggaggagaucaccccccacugcgcccugauggacugcaucauguucgacgccgccgugagcggcggccugaacauccccauccugagagccgugcugcccagagacaugguguucagaaccagcagccccaagguggugcugugaggacuaguaauaaggaaacuguaugaaugucugugggcaggaagugaagagauccuucuguaaagguuuuuggaauuaugucugcugaauaauaaacuuuuuugaaauaauaaaucugguagaaaaaugagaucucaaaggcucuuuucagagccaccaaaaaaaaaaaaaaaaaaaaaaaaaaaaaaaaaaaaaaaaaaaaaaaaaaaaaaaaaaaaaaaaagaauu

SEQ ID NO: 20132 - RNA, 2069 nt, Artificial Sequence
  mRNA product Design b-4 (hSL-A64-N5) comprising derived and/or modified sequence from LASV(GA391;Clade III)__AAA46284__SP-HsALB_NP(2-570) (opt4)
aggagagucccgcagucggcguccagcggcucugcuuguucgugugugugucguugcaggccuuauucaagcuuaccaugaagugggugaccuucaucagccugcuguuccuguucagcagcgccuacagcagcgccagcaaggaggugagaagcugccuguggacccagagccugagaagagagcugagcggcuacugcagcaacaucaagcugcagguggugaaggacgcccaggcccugcugcacggccuggacuucagcgaggugagcaacgugcagagacugaugagaaagcagaagagagacgacggcgaccugaagagacugagagaccugaaccaggccgugaacaaccugguggagcugaagagcacccagcagaagagcgugcugagagugggcacccugagcagcgacgaccugcugauccuggccgccgaccuggagaagcugaagagcaaggugaccagaaccgagagaccccugagcagcggcguguacaugggcaaccugagcagccagcagcuggaccagagaagagcccugcugaacaugaucggcaugaccggcgugagcggcggcggcaagggcgccagcaacggcaucgugagagugugggacgugaagaacgccgagcugcugaacaaccaguucggcaccaugcccagccugacccuggccugccugaccaagcagggccagguggaccugaacgacgccgugcaggcccugaccgaccugggccugaucuacaccgccaaguaccccaacagcagcgaccuggacagacugagccagagccaccccauccugaacaugaucgacaccaagaagagcagccugaacaucagcggcuacaacuucagccugggcgccgccgugaaggccggcgccugcaugcuggacggcggcaacaugcuggagaccaucaaggugagcccccagaccauggacggcauccugaagagcauccugaaggugaagaagagccugggcauguucgugagcgacacccccggcgagagaaaccccuacgagaacauccuguacaagaucugccugagcggcgacggcuggagcuacaucgccagcagaaccagcaucgugggcagagccugggagaacaccgugguggaccuggagcaggacaacaagccccagaagaucggcaacggcggcagcaacaagagccugcagagcgccggcuucgccgccggccugaucuacagccagcugaugacccugaaggacuucaagugcuucaaccugauccccaacgccaagaccuggauggacaucgagggcagacccgaggaccccguggagaucgcccuguaccagcccagcagcggcugcuacgugcacuucuucagagagcccaccgaccugaagcaguucaagcaggacgccaaguacagccacggcagagacgugaccgaccuguucgccgcccagcccggccugaccagcgccgugaucgaggcccugcccagaaacauggugaucaccugccagggcagcgaggacaucagaaagcugcuggagagccagggcagaagagacaucaagcugaucgacaucacccugagcaaggccgacagcagaaaguucgagaacgccgugugggaccaguucaaggaccugugccacaugcacaccggcguggugguggagaagaagaagagaggcggcaaggaggagaucaccccccacugcgcccugauggacugcaucauguucgacgccgccgugagcggcggccuggacgccaaggugcugagaguggugcugcccagagacaugguguucagaaccagcacccccaagguggugcugugaggacuaguaauaaggaaacuguaugaaugucugugggcaggaagugaagagauccuucuguaaagguuuuuggaauuaugucugcugaauaauaaacuuuuuugaaauaauaaaucugguagaaaaaugagaucucaaaggcucuuuucagagccaccaaaaaaaaaaaaaaaaaaaaaaaaaaaaaaaaaaaaaaaaaaaaaaaaaaaaaaaaaaaaaaaaagaauu

SEQ ID NO: 20133 - RNA, 2066 nt, Artificial Sequence
  mRNA product Design b-4 (hSL-A64-N5) comprising derived and/or modified sequence from LASV(Nig08-A19;Clade III)__ADU56619__SP-HsALB_NP(2-569) (opt4)
aggagagucccgcagucggcguccagcggcucugcuuguucgugugugugucguugcaggccuuauucaagcuuaccaugaagugggugaccuucaucagccugcuguuccuguucagcagcgccuacagcagcgccagcaaggaggugaagagcuuccuguggacccagagccugagaagagagcugagcggcuacugcagcaacaucaagcugcagguggugaaggacgcccaggcccugcugcacggccuggacuucagcgaggugagcaacgugcagagacugaugagaaagcagaagagagacgacggcgaccugaagagacugagagaccugaaccaggccgugaacaaccugguggagcugaagagcacccagcagaagagcgugcugagagugggcacccugagcagcgacgaccugcuggugcuggccgccgaccuggagaagcugaagagcaagguggugagaaccgagagaccccugagcagcggcaucuacaugggcaaccugagcagccagcagcuggaccagagaaaggcccugcugaacaugaucggcaugaccggcggcaacggcggcagaaacaccaccagcgacggcaucgugagagugugggacgugaagaacgccgagcugcugaacaaccaguucggcaccaugcccagccugacccuggccugccugaccaagcagggccagguggaccugaacgacgccgugcaggcccugaccgaccugggccugaucuacaccgccaaguaccccaacagcagcgaccuggacagacuggcccagagccaccccauccugaacaugaucgacaccaagaagagcagccugaacaucagcggcuacaacuucagccugggcgccgccgugaaggccggcgccugcaugcuggacggcggcaacaugcuggagaccaucaaggugagcccccagaccauggacggcauccugaagagcauccugaaggugaagagaagccugggcauguucaucagcgacacccccggcgagagaaaccccuacgagaacauccuguacaagaucugccugagcggcgacggcuggcccuacaucgccagcagaaccagcaucgugggcagagccugggagaacaccgugguggaccuggagagcgacaacaagccccagaagaccggcaacggcggcagcaacaagagccugcagagcgccggcuucgccgccggccugaccuacagccagcugaugacccugaaggacagcaugcugcagcuggaccccaacgccaagaccuggauggacaucgagggcagacccgaggaccccguggagaucgcccuguaccagcccagcagcggcugcuacauccacuucuucagagagcccaccgaccugaagcaguucaagcaggacgccaaguacagccacggcaucgacgugaccgaccuguucgccgcccagcccggccugaccagcgccgugaucgaggcccugcccagaaacauggugaucaccugccagggcagcgaggacaucagaaagcugcuggagagccagggcagaagagacaucaagcugaucgacaucagccugagcaagguggacagcagaaaguucgagaacgccgugugggaccaguucaaggaccugugccacaugcacaccggcaucgugguggagaagaagaagagaggcggcaaggaggagaucaccccccacugcgcccugauggacugcaucauguucgacgccgccgugagcggcggcguggacgccaaggugcugagagccgugcugcccagagacaugguguucagaaccagcacccccaagguggugcugugaggacuaguaauaaggaaacuguaugaaugucugugggcaggaagugaagagauccuucuguaaagguuuuuggaauuaugucugcugaauaauaaacuuuuuugaaauaauaaaucugguagaaaaaugagaucucaaaggcucuuuucagagccaccaaaaaaaaaaaaaaaaaaaaaaaaaaaaaaaaaaaaaaaaaaaaaaaaaaaaaaaaaaaaaaaaagaauu

SEQ ID NO: 20134 - RNA, 2066 nt, Artificial Sequence
  mRNA product Design b-4 (hSL-A64-N5) comprising derived and/or modified sequence from LASV(G1180-SLE-2010;Clade IV)__AIT17169__SP-HsALB_NP(2-569) (opt4)
aggagagucccgcagucggcguccagcggcucugcuuguucgugugugugucguugcaggccuuauucaagcuuaccaugaagugggugaccuucaucagccugcuguuccuguucagcagcgccuacagcagcgccagcaaggagaucaagagcuuccuguggacccagagccugagaagagagcugagcggcuacugcagcaacaucaagcugcagguggugaaggacgcccaggcccugcugcacggccuggacuucagcgaggugagcaacgugcagagacugaugagaaaggagagaagagacgacaacgaccugaagagacugagagaccugaaccaggccgugaacaaccugguggagcugaagagcacccagcagaagagcauccugagagugggcacccugaccagcgacgaccugcugauccuggccgccgaccuggagaagcugaagagcaaggugaucagaaccgagagaccccugagcgccggcguguacaugggcaaccugagcagccagcagcuggaccagagaagagcccugcugagcaugaucggcaugagcagcggcaaccagagagcccaggccggcagagacggcguggugagagugugggacgugaagaacguggagcugcugaacaaccaguucggcaccaugcccagccugacccuggccugccugaccaagcagggccagguggaccugaacgacgccgugcaggcccugaccgaccugggccugaucuacaccgccaaguaccccaacaccagcgaccuggacagacugacccagagccaccccauccugaacaugaucgacaccaagaagagcagccugaacaucagcggcuacaacuucagccugggcgccgccgugaaggccggcgccugcaugcuggacggcggcaacaugcuggagaccaucaaggugagcccccagaccauggacggcauccugaagagcauccugaaggugaagaaggcccugggcauguucaucagcgacacccccggcgagagaaaccccuacgagaacauccuguacaagaucugccugagcggcgacggcuggcccuacaucgccagcagaaccagcaucaccggcagagccugggagaacaccgugguggaccuggagagcgacggcaagccccagaaggccggcagcaacaacagcaacaagagccugcagagcgugggcuucaccgccggccugaccuacagccagcugaugacccugaaggacgccaugcugcagcuggaccccaacgccaagaccuggauggacaucgagggcagacccgaggaccccguggagaucgcccuguaccagcccagcagcggcugcuacauccacuucuucagagagcccaccgaccugaagcaguucaagcaggacgccaaguacagccacggcaucgacgugaccgaccuguucgccgcccagcccggccugaccagcgccgugaucgacgcccugcccagaaacauggugaucaccugccagggcagcgacgacaucagaaagcugcuggagagccagggcagaaaggacaucaagcugaucgacaucgcccugagcaagaccgacagcagaaaguacgagaacgccgugugggaccaguacaaggaccugugccacaugcacaccggcguggugguggagaagaagaagagaggcggcaaggaggagaucaccccccacugcgcccugauggacugcaucauguucgacgccgccgugagcggcggccugaacaccagcgugcugagagccgugcugcccagagacaugguguucagaaccagcacccccagaguggugcugugaggacuaguaauaaggaaacuguaugaaugucugugggcaggaagugaagagauccuucuguaaagguuuuuggaauuaugucugcugaauaauaaacuuuuuugaaauaauaaaucugguagaaaaaugagaucucaaaggcucuuuucagagccaccaaaaaaaaaaaaaaaaaaaaaaaaaaaaaaaaaaaaaaaaaaaaaaaaaaaaaaaaaaaaaaaaagaauu

SEQ ID NO: 20135 - RNA, 2066 nt, Artificial Sequence
  mRNA product Design b-4 (hSL-A64-N5) comprising derived and/or modified sequence from LASV(G1442-SLE-2011;Clade IV)__AIT17181__SP-HsALB_NP(2-569) (opt4)
aggagagucccgcagucggcguccagcggcucugcuuguucgugugugugucguugcaggccuuauucaagcuuaccaugaagugggugaccuucaucagccugcuguuccuguucagcagcgccuacagcagcgccagcaaggaggugaagagcuuccuguggacccagagccugagaagagagcugagcggcuacugcagcaacaucaagcugcagguggugaaggacgcccaggcccugcugcacggccuggacuucagcgaggugagcaacgugcagagacugaugagaaagcagagaagagacgacaacgaccugaagagacugagagaccugaaccaggccgugaacaaccugguggagcugaagagcacccagcagaagagcgugcugagagugggcacccugaccagcgacgaccugcuggugcuggccgccgaccuggagaagcugaagagcaaggugaucagaaccgagagaccccugagcgccggcguguacaugggcaaccugagcagccagcagcuggaccagagaagagcccugcugaacaugaucggcaugagcggcggcauccagggcaccagaaccggcagagacggcguggugagagugugggacgugaagaacgccgaccugcugaacaaccaguucggcaccaugcccagccugacccuggccugccugaccaagcagggccagguggaccugaacgacguggugcaggcccugaccgaccugggccugaucuacaccgccaaguaccccaacgccagcgaccuggacagacugacccagagccaccccauccugaacaugaucgacaccaagaagagcagccugaacaucagcggcuacaacuucagccugggcgccgccgugaaggccggcgccugcaugcuggacggcggcaacaugcuggagaccaucaaggugagcccccagaccauggacggcauccugaagagcauccugaaggugaagaagacccugggcauguucaucagcgacacccccggcgagagaaaccccuacgagaacauccuguacaagaucugccugagcggcgacggcuggcccuacaucgccagcagaaccagcaucaccggcagagccugggagaacaccgugguggaccuggagagcgacggcaagccccagaaggccggcagcaacaacagcaacaagagccugcagagcgccggcuucgccgccggccugaccuacagccagcugaugacccugaaggacgccaugcugcagcuggaccccaacgccaagaccuggauggacaucgagggcagacccgaggaccccguggagaucgcccuguaccagcccagcagcggcugcuacauccacuucuucagagagcccaccgaccugaagcaguucaagcaggacgccaaguacagccacggcaucgacgugaccgaccuguucgccgcccagcccggccugaccagcgccgugaucgaggcccugcccagaaacauggugaucaccugccagggcagcgacgacaucaagaagcugcuggagagccagggcagaaaggacaucaagcugaucgacaucgcccugagcaagaccgacagcagaaaguacgagaacgccgugugggaccaguacaaggaccugugccacaugcacaccggcguggugguggagaagaagaagagaggcggcaaggaggagaucaccccccacugcgcccugauggacugcaucauguucgacgccgccgugagcggcggccugaacacccuggugcugagagccgugcugcccagagacaugguguucagaaccagcacccccagaguggugcugugaggacuaguaauaaggaaacuguaugaaugucugugggcaggaagugaagagauccuucuguaaagguuuuuggaauuaugucugcugaauaauaaacuuuuuugaaauaauaaaucugguagaaaaaugagaucucaaaggcucuuuucagagccaccaaaaaaaaaaaaaaaaaaaaaaaaaaaaaaaaaaaaaaaaaaaaaaaaaaaaaaaaaaaaaaaaagaauu

SEQ ID NO: 20136 - RNA, 2066 nt, Artificial Sequence
  mRNA product Design b-4 (hSL-A64-N5) comprising derived and/or modified sequence from LASV(G3010-SLE-2013;Clade IV)__AIT17345__SP-HsALB_NP(2-569) (opt4)
aggagagucccgcagucggcguccagcggcucugcuuguucgugugugugucguugcaggccuuauucaagcuuaccaugaagugggugaccuucaucagccugcuguuccuguucagcagcgccuacagcagcgccagcaaggagaucaagagcuuccuguggacccagagccugagaagagagcugagcggcuacugcagcaacaucaagcugcagguggugaaggacgcccaggcccugcugcacggccuggacuucagcgaggugagcaacgugcagagacugaugagaaaggagagaagagacgacaacgaccugaagagacugagagaccugaaccaggccgugaacaaccugguggagcugaagagcacccagcagaagagcauccugagagugggcacccugaccagcgacgaccugcugauccuggccgccgaccuggagaagcugaagagcaaggugaccagaaccgagagaccccugagcgccggcguguacaugggcaaccugagcagccagcagcuggaccagagaagagcccugcugagcaugaucggcaugagcagcggcgugcagggcgccagagccggcagagacggcguggugagagugugggacgugaagaacgccgagcugcugaacaaccaguucggcaccaugcccagccugacccuggccugccugaccaagcagggccagguggaccugaacgacguggugcaggcccugaccgaccugggccugaucuacaccgccaaguaccccaacaccagcgaccuggacagacugacccagagccaccccauccugaacaugaucgacaccaagaagagcagccugaacaucagcggcuacaacuucagccugggcgccgccgugaaggccggcgccugcaugcuggacggcggcaacaugcuggagaccaucaaggugagcccccagaccauggacggcauccugaagagcauccugaaggugaagaaggcccugggcauguucaucagcgagacccccggcgagagaaaccccuacgagaacauccuguacaagaucugccugagcggcgacggcuggcccuacaucgccagcagaaccagcaucaccggcagagccugggagaacaccgugguggaccuggagagcgacggcaagccccagaaggccggcagcaacaacagcaacaagagccugcagagcgccggcuucaccgccggccugaccuacagccagcugaugacccugaaggacgccaugcugcagcuggaccccaacgccaagaccuggauggacaucgagggcagacccgaggaccccguggagguggcccuguaccagcccagcagcggcugcuacauccacuucuucagagagcccaccgaccugaagcaguucaagcaggacgccaaguacagccacggcaucgacgugaccgaccuguucgccgcccagcccggccugaccagcgccgugaucgacgcccugcccagaaacauggugaucaccugccagggcagcgacgacaucaagaagcugcuggagagccagggcagaaaggacaucaagcugaucgacaucgcccugagcaagaccgacagcagaaaguacgagaacgccgugugggaccaguacaaggaccugugccacaugcacaccggcguggugguggagaagaagaagagaggcggcaaggaggagaucaccccccacugcgcccugauggacugcaucauguucgacgccgccgugagcggcggccugaacaccagcgugcugagagccgugcugcccagagacaugguguucagaaccagcacccccagaguggugcugugaggacuaguaauaaggaaacuguaugaaugucugugggcaggaagugaagagauccuucuguaaagguuuuuggaauuaugucugcugaauaauaaacuuuuuugaaauaauaaaucugguagaaaaaugagaucucaaaggcucuuuucagagccaccaaaaaaaaaaaaaaaaaaaaaaaaaaaaaaaaaaaaaaaaaaaaaaaaaaaaaaaaaaaaaaaaagaauu

SEQ ID NO: 20137 - RNA, 2066 nt, Artificial Sequence
  mRNA product Design b-4 (hSL-A64-N5) comprising derived and/or modified sequence from LASV(G502-SLE-2009;Clade IV)__AIT17127__SP-HsALB_NP(2-569) (opt4)
aggagagucccgcagucggcguccagcggcucugcuuguucgugugugugucguugcaggccuuauucaagcuuaccaugaagugggugaccuucaucagccugcuguuccuguucagcagcgccuacagcagcgccagcaaggagaucaagagcuuccuguggacccagagccugagaagagagcugagcggcuacugcagcaacaucaagcugcagguggugaaggacgcccaggcccugcugcacggccuggacuucagcgaggugagcaacgugcagagacugaugagaaaggagagaagagacgacaacgaccugaagagacugagagaccugaaccaggccgugaacaaccugguggagcugaagagcacccagcagaagagcauccugagagugggcacccugaccagcgacgaccugcugauccuggccgccgaccuggagaagcugaagagcaaggugaucagaaccgagagaccccugagcgccggcguguacaugggcaaccugagcagccagcagcuggaccagagaagagcccugcugagcaugaucggcaugagcggcggcaaccagggcgugagagccggcaaggacggcguggugagagugugggacgugaagaacgccgagcugcugaacaaccaguucggcaccaugcccagccugacccuggccugccugaccaagcagggccagguggaccugaacgacgccgugcaggcccugaccgaccugggccugaucuacaccgccaaguaccccaacaccagcgaccuggacagacugacccagagccaccccauccugaacaugaucgacaccaagaagagcagccugaacaucagcggcuacaacuucagccugggcgccgccgugaaggccggcgccugcaugcuggacggcggcaacaugcuggagaccaucaaggugagcccccagaccauggacggcauccugaagagcauccugaaggugaagaaggcccugggcauguucaucagcgacacccccggcgagagaaaccccuacgagaacauccuguacaagaucugccugagcggcgacggcuggcccuacaucgccagcagaaccagcaucaccggcagagccugggagaacaccgugguggaccuggagagcgacggcaagccccagaaggccggcagcaacaacagcaacaagagccugcagagcgccggcuucaccgccggccugaccuacagccagcugaugacccugaaggacgccaugcugcagcuggaccccaacaccaagaccuggauggacaucgagggcagacccgaggaccccguggagaucgcccuguaccagcccagcagcggcugcuacauccacuucuucagagagcccaccgaccugaagcaguucaagcaggacgccaaguacagccacggcaucgacgugaccgaccuguucgccgcccagcccggccugaccagcgccgugaucgacgcccugcccagaaacauggugaucaccugccagggcagcgacgacaucagaaagcugcuggagagccagggcagaaaggacaucaagcugaucgacaucgcccugaacaagaccgacagcagaaaguacgagaacgccgugugggaccaguacaaggaccugugccacaugcacaccggcguggugguggagaagaagaagagaggcggcaaggaggagaucaccccccacugcgcccugauggacugcaucauguucgacgccgccgugagcggcggccugaacaccagcgugcugagagccgugcugcccagagacaugguguucagaaccagcacccccagaguggugcugugaggacuaguaauaaggaaacuguaugaaugucugugggcaggaagugaagagauccuucuguaaagguuuuuggaauuaugucugcugaauaauaaacuuuuuugaaauaauaaaucugguagaaaaaugagaucucaaaggcucuuuucagagccaccaaaaaaaaaaaaaaaaaaaaaaaaaaaaaaaaaaaaaaaaaaaaaaaaaaaaaaaaaaaaaaaaagaauu

SEQ ID NO: 20138 - RNA, 2066 nt, Artificial Sequence
  mRNA product Design b-4 (hSL-A64-N5) comprising derived and/or modified sequence from LASV(G733-SLE-2010;Clade IV)__AIT17155__SP-HsALB_NP(2-569) (opt4)
aggagagucccgcagucggcguccagcggcucugcuuguucgugugugugucguugcaggccuuauucaagcuuaccaugaagugggugaccuucaucagccugcuguuccuguucagcagcgccuacagcagcgccagcaaggagaucaagagcuuccuguggacccagagccugagaagagagcugagcggcuacugcagcaacaucaagcugcagguggugaaggacgcccaggcccugcugcacggccuggacuucagcgaggugagcaacgugcagagacugaugagaaaggagagaagagacgacaacgaccugaagagacugagagaccugaaccaggccgugaacaaccugguggagcugaagagcacccagcagaagagcgugcugagagugggcacccugaccagcgacgagcugcuggugcuggccgccgaccuggagaagcugaagagcaaggugaucagaaccgagagaccccugagcgccggcguguacaugggcaaccugagcagccagcagcuggaccagagaagagcccugcugagcaugaucggcaugagcggcggcaaccagggcgccagaaccggcagagacggcguggugagagugugggacgugaagaacgccgagcugcugaacaaccaguucggcaccaugcccagccugacccuggccugccugaccaagcagggccagguggaccugaacgacgccgugcaggcccugaccgaccugggccugaucuacaccgccaaguaccccaacaccagcgaccuggacagacugacccagagccaccccauccugaacaugaucgacaccaagaagagcagccugaacaucagcggcuacaacuucagccugggcgccgccgugaaggccggcgccugcaugcuggacggcggcaacaugcuggagaccaucaaggugagcccccagaccauggacggcauccugaagagcauccugaaggugaagaaggcccugggcauguucaucagcgacacccccggcgagagaaaccccuacgagaacauccuguacaagaucugccugagcggcgacggcuggcccuacaucgccagcagaaccagcaucaccggcagagccugggagaacaccgugguggaccuggagagcgacggcaagccccagaaggccggcagcaacaacagcaacaagagccugcagagcgccggcuucaccgccggccugaccuacagccagcugaugacccugaaggacgccaugcugcagcuggaccccaacgccaagaccuggauggacaucgagggcagacccgaggaccccguggagaucgcccuguaccagcccagcagcggcugcuacauccacuucuucagagagcccaccgaccugaagcaguucaagcaggacgccaaguacagccacggcaucgacgugaccgaccuguucgccgcccagcccggccugaccagcgccgugaucgacgcccugcccagaaacauggugaucaccugccagggcagcgacgacaucagaaagcugcuggagagccagggcagaaaggacaucaagcugaucgacaucgcccugagcaagaucgacagcagaaaguacgagaacgccgugugggaccaguacaaggaccugugccacaugcacaccggcguggugguggagaagaagaagagaggcggcaaggaggagaucaccccccacugcgcccugauggacugcaucauguucgacgccgccgugagcggcggccugaacagccuggugcugagagccgugcugcccagagacaugguguucagaaccagcacccccagaguggugcugugaggacuaguaauaaggaaacuguaugaaugucugugggcaggaagugaagagauccuucuguaaagguuuuuggaauuaugucugcugaauaauaaacuuuuuugaaauaauaaaucugguagaaaaaugagaucucaaaggcucuuuucagagccaccaaaaaaaaaaaaaaaaaaaaaaaaaaaaaaaaaaaaaaaaaaaaaaaaaaaaaaaaaaaaaaaaagaauu

SEQ ID NO: 20139 - RNA, 2066 nt, Artificial Sequence
  mRNA product Design b-4 (hSL-A64-N5) comprising derived and/or modified sequence from MOPV/LASV reassortant(IGS-1;Clade IV)__AFY05578__SP-HsALB_NP(2-569) (opt4)
aggagagucccgcagucggcguccagcggcucugcuuguucgugugugugucguugcaggccuuauucaagcuuaccaugaagugggugaccuucaucagccugcuguuccuguucagcagcgccuacagcagcgccagcaaggagaucaagagcuuccuguggacccagagccugagaagagagcugagcggcuacugcagcaacaucaagcugcagguggugaaggacgcccaggcccugcugcacggccuggacuucagcgaggugagcaacgugcagagacugaugagaaaggagagaagagacgacaacgaccugaagagacugagagaccugaaccaggccgugaacaaccugguggagcugaagagcacccagcagaagagcauccugagagugggcacccugaccagcgacgaccugcugauccuggccgccgaccuggagaagcugagaagcaaggugaucagaaccgagagaccccugagcgccggcguguacaugggcaaccugagcagccagcagcuggaccagagaagagcccugcugaacaugaucggcaugagcggcggcaaccagggcgccagagccggcagagacggcguggugagagugugggacgugaagaacgccgagcugcugagcaaccaguucggcaccaugcccagccugacccuggccugccugaccaagcagggccagguggaccugaacgacgccgugcaggcccugaccgaccugggccugaucuacaccgccaaguaccccaacaccagcgaccuggacagacugacccagagccaccccauccugaacaugaucgacaccaagaagagcagccugaacaucagcggcuacaacuucagccugggcgccgccgugaaggccggcgccugcaugcuggacggcggcaacaugcuggagaccaucaaggugagcccccagaccauggacggcauccugaagagcauccugaaggugaagaaggcccugggcauguucaucagcgacacccccggcgagagaaaccccuacgagaacauccuguacaagaucugccugagcggcgacggcuggcccuacaucgccagcagaaccagcaucaccggcagagccugggagaacaccgugguggaccuggagagcgacggcaagccccagaaggccgacagcaacaacagcagcaagagccugcagagcgccggcuucaccgccggccugaccuacagccagcugaugacccugaaggacgccaugcugcagcuggaccccaacgccaagaccuggauggacaucgagggcagacccgaggaccccguggagaucgcccuguaccagcccagcagcggcugcuacauccacuucuucagagagcccaccgaccugaagcaguucaagcaggacgccaaguacagccacggcaucgacgugaccgaccuguucgccacccagcccggccugaccagcgccgugaucgacgcccugcccagaaacauggugaucaccugccagggcagcgacgacaucagaaagcugcuggagagccagggcagaaaggacaucaagcugaucgacaucgaccugagcaagaccgacagcagaaaguacgagaacgccgugugggaccaguacaaggaccugugccacaugcacaccggcguggugguggagaagaagaagagaggcggcaaggaggagaucaccccccacugcgcccugauggacugcaucauguucgacgccgccgugagcggcggccugaacaccagcgugcugagagccgugcugcccagagacaugguguucagaaccagcacccccagaguggugcugugaggacuaguaauaaggaaacuguaugaaugucugugggcaggaagugaagagauccuucuguaaagguuuuuggaauuaugucugcugaauaauaaacuuuuuugaaauaauaaaucugguagaaaaaugagaucucaaaggcucuuuucagagccaccaaaaaaaaaaaaaaaaaaaaaaaaaaaaaaaaaaaaaaaaaaaaaaaaaaaaaaaaaaaaaaaaagaauu

SEQ ID NO: 20140 - RNA, 2066 nt, Artificial Sequence
  mRNA product Design b-4 (hSL-A64-N5) comprising derived and/or modified sequence from LASV(LM765-SLE-2012;Clade IV)__AIT17815__SP-HsALB_NP(2-569) (opt4)
aggagagucccgcagucggcguccagcggcucugcuuguucgugugugugucguugcaggccuuauucaagcuuaccaugaagugggugaccuucaucagccugcuguuccuguucagcagcgccuacagcagcgccagcaaggagaucaagagcuuccuguggacccagagccugagaagagagcugagcggcuacugcagcaacaucaagcugcagguggugaaggacgcccaggcccugcugcacggccuggacuucagcgaggugagcaacgugcagagacugaugagaaaggagagaagagacgacaacgaccugaagagacugagagaccugaaccaggccgugaacaaccugguggagcugaagagcacccagcagaagagcauccugagagugggcacccugaccagcgacgaccugcugauccuggccgccgaccuggagaagcugaagagcaaggugaccagaaccgagagaccccugagcgccggcguguacaugggcaaccugagcagccagcagcuggaccagagaagagcccugcuggacaugaucggcaugagcggcagcaaccagggcgccagagccggcagagacggcguggugagagugugggacgugaagaacgccgagcugcugaacaaccaguucggcaccaugcccagccugacccuggccugccugaccaagcagggccagguggaccugaacgacgccgugcaggcccugaccgaccugggccugaucuacaccgccaaguaccccaacaccagcgaccuggacagacugacccagagccaccccauccugaacaugaucgacaccaagaagagcagccugaacaucagcggcuacaacuucagccugggcgccgccgugaaggccggcgccugcaugcuggacggcggcaacaugcuggagaccaucaaggugagcccccagaccauggacggcauccugaagagcauccugaaggugaagaaggcccugggcauguucaucagcgacgcccccggcgagagaaaccccuacgagaacauccuguacaagaucugccugagcggcgacggcuggcccuacaucgccagcagaaccagcaucaccggcagagccugggagaacaccgugguggaccuggagagcgacggcaagccccagaaggccggcagcaacggcagcaacaagagccugcagagcgccggcuucaccgccggccugaccuacagccagcugaugacccugaaggacgccaugcugcagcuggaccccaacgccaagaccuggauggacaucgagggcagacccgaggaccccguggagaucgcccuguaccagcccagcagcggcugcuacauccacuucuucagagagcccaccgaccugaagcaguucaagcaggacgccaaguacagccacggcaucgacgugaccgaccuguucgccgcccagcccggccugaccagcgccgugaucgacgcccugcccagaaacauggugaucaccugccagggcagcgacgacaucagaaagcuguucgagagccagggcagaaaggacaucaagcugaucgacaucgcccugagcaagaccgacagcagaaaguacgagaacgccgugugggaccaguacaaggaccugugccacaugcacaccggcaucgugguggagaagaagaagagaggcggcaaggaggagaucaccccccacugcgcccugauggacugcaucauguucgacgccgccgugagcggcggccugaacaccagcgugcugagagccgugcugcccagagacaugguguucagaaccagcacccccagaguggugcugugaggacuaguaauaaggaaacuguaugaaugucugugggcaggaagugaagagauccuucuguaaagguuuuuggaauuaugucugcugaauaauaaacuuuuuugaaauaauaaaucugguagaaaaaugagaucucaaaggcucuuuucagagccaccaaaaaaaaaaaaaaaaaaaaaaaaaaaaaaaaaaaaaaaaaaaaaaaaaaaaaaaaaaaaaaaaagaauu

SEQ ID NO: 20141 - RNA, 2066 nt, Artificial Sequence
  mRNA product Design b-4 (hSL-A64-N5) comprising derived and/or modified sequence from LASV(LM776-SLE-2012;Clade IV)__AIT17825__SP-HsALB_NP(2-569) (opt4)
aggagagucccgcagucggcguccagcggcucugcuuguucgugugugugucguugcaggccuuauucaagcuuaccaugaagugggugaccuucaucagccugcuguuccuguucagcagcgccuacagcagcgccagcaaggagaucaagagcuuccuguggacccagagccugagaagagagcugagcagcuacugcagcaacaucaagcugcagguggugaaggacgcccaggcccugcugcacggccuggacuucagcgaggugagcaacgugcagagacugaugagaaaggagagaagagacgacaacgaccugaagagacugagagaccugaaccaggccgugaacaaccugguggagcugaagagcacccagcagaagagcauccugagagugggcacccugaccagcgacgaccugcugauccuggccgccgaccuggagaagcugaagagcaaggugaccagaaccgagagaccccugagcgccggcguguacaugggcaaccugagcagccagcagcuggaccagagaagagcccugcugagcaugaucggcaugagcggcagcaaccagggcgccagagccggcagagacggcguggugagagugugggacgugaagaacgccgagcugcugaacaaccaguucggcaccaugcccagccugacccuggccugccugaccaagcagggccagguggaccugaacgacgccgugcaggcccugaccgaccugggccugaucuacaccgccaaguaccccaacaccagcgaccuggacagacugacccagagccaccccauccugaacaugaucgacaccaagaagagcagccugaacaucagcggcuacaacuucagccugggcgccgccgugaaggccggcgccugcaugcuggacggcggcaacaugcuggagaccaucaaggugagcccccagaccauggacggcauccugaagagcauccugaaggugaagaaggcccugggcauguucaucagcgacacccccggcgagagaaaccccuacgagaacauccuguacaagaucugccugagcggcgacggcuggcccuacaucgccagcagaaccagcaucaccggcagagccugggagaacaccgugguggaccuggagagcgacggcaagccccagaaggccggcagcaacaacagcaacaagagccugcagagcgccggcuucaccgccggccugaccuacagccagcugaugacccugaaggacgccaugcugcagcuggaccccaacgccaagaccuggauggacaucgagggcagacccgaggaccccguggagguggcccuguaccagcccagcagcggcugcuacauccacuucuucagagagcccaccgaccugaagcaguucaagcaggacgccaaguacagccacggcaucgacgugaccgaccuguucgccgcccagcccggccugaccagcgccgugaucgacgcccugcccagaaacauggugaucaccugccagggcagcgacgacaucagaaagcugcuggagagccagggcagaaaggacaucaagcugaucgacaucgcccugagcaagaccgacagcagaaaguacgagaacgccgugugggaccaguacaaggaccugugccacaugcacaccggcguggugguggagaagaagaagagaggcggcaaggaggagaucaccccccacugcgcccugauggacugcaucauguucgacgccgccgugagcggcggccugaacaccagcgugcugagagccgugcugcccagagacaugguguucagaaccagcacccccagaguggugcugugaggacuaguaauaaggaaacuguaugaaugucugugggcaggaagugaagagauccuucuguaaagguuuuuggaauuaugucugcugaauaauaaacuuuuuugaaauaauaaaucugguagaaaaaugagaucucaaaggcucuuuucagagccaccaaaaaaaaaaaaaaaaaaaaaaaaaaaaaaaaaaaaaaaaaaaaaaaaaaaaaaaaaaaaaaaaagaauu

SEQ ID NO: 20142 - RNA, 2066 nt, Artificial Sequence
  mRNA product Design b-4 (hSL-A64-N5) comprising derived and/or modified sequence from LASV(Mad39;Clade IV)__ANH09723__SP-HsALB_NP(2-569) (opt4)
aggagagucccgcagucggcguccagcggcucugcuuguucgugugugugucguugcaggccuuauucaagcuuaccaugaagugggugaccuucaucagccugcuguuccuguucagcagcgccuacagcagcgccagcaaggagaucaagagcuuccuguggacccagagccugagaagagagcugagcggcuacugcagcaacaucaagcugcagguggugaaggacgcccaggcccugcugcacggccuggacuucagcgaggugagcaacgugcagagacugaugagaaagcagagaagagacgacaacgaccugaagagacugagagaccugaaccaggccgugaacaaccugguggagcugaagagcacccagcagaagagcgugcugagagugggcacccugaccagcgacgaccugcugacccuggccgccgaccuggagaagcugaagagcaaggugaccagaaccgagagaccccugaccgccggcguguacaugggcaaccugagcagccagcagcuggaccagagaagagcccugcugaacaugaucggcaugagcggcggcaaccagggcgccagaaccggcagagacggcguggugagagugugggacgugaagaacgccgagcugcugaacaaccaguucggcaccaugcccagccugacccuggccugccugaccaagcagggccagguggaccugaacgacguggugcaggcccugaccgaccugggccugaucuacaccgccaaguaccccaacaccagcgaccuggacagacugacccagagccaccccauccugaacaugaucgacaccaacaagagcagccugaacaucagcggcuacaacuucagccugggcgccgccgugaaggccggcgccugcaugcuggacggcggcaacaugcuggagaccaucaaggugagcccccagaccauggacggcauccugaagagcauccugaaggugaagaagagccugggcauguucaucagcgacacccccggcgagagaaaccccuacgagaacauccuguacaagaucugccugagcggcgacggcuggcccuacaucgccagcagaaccagcaucaccggcagagccugggagaacaccgugguggaccuggagagcggcggcaagccccagaaggccggcagcaacaacagcaacaagagccugcagagcgccggcuucgccgccggccugaccuacagccagcugaugacccugaaggacgccaugcugcagcuggaccccaacgccaagaccuggauggacaucgagggcagacccgaggaccccguggagaucgcccuguaccagcccaucagcggcugcuacauccacuucuucagagagcccaccgaccugaagcaguucaagcaggacgccaaguacagccacggcaucgacgugaccgaccuguucgccgcccagcccggccugaccagcgccgugaucgaggcccugcccagaaacauggugaucaccugccagggcagcgacgacaucagaaagcuguucgagagccagggcagaaaggacaucaagcugaucgacaucgcccugagcaagaccgacagcagaaaguacgagaacgccgugugggaccaguacaaggaccugugccacaugcacaccggcguggugguggagaagaagaagaagggcggcaaggaggagaucaccccccacugcgcccugauggacugcaucauguucgacgccgccgugagcggcggccugaacacccuggugcugagagccgugcugcccagagacaugguguucagaaccagcacccccaagguggugcugugaggacuaguaauaaggaaacuguaugaaugucugugggcaggaagugaagagauccuucuguaaagguuuuuggaauuaugucugcugaauaauaaacuuuuuugaaauaauaaaucugguagaaaaaugagaucucaaaggcucuuuucagagccaccaaaaaaaaaaaaaaaaaaaaaaaaaaaaaaaaaaaaaaaaaaaaaaaaaaaaaaaaaaaaaaaaagaauu

SEQ ID NO: 20143 - RNA, 2066 nt, Artificial Sequence
  mRNA product Design b-4 (hSL-A64-N5) comprising derived and/or modified sequence from LASV(Z0947-SLE-2011;Clade IV)__AIT17841__SP-HsALB_NP(2-569) (opt4)
aggagagucccgcagucggcguccagcggcucugcuuguucgugugugugucguugcaggccuuauucaagcuuaccaugaagugggugaccuucaucagccugcuguuccuguucagcagcgccuacagcagcgccagcaaggagaucaagagcuuccuguggacccagagccugagaagagagcugagcggcuacugcagcaacaucaagcugcagguggugaaggacgcccaggcccugcugcacggccuggacuucagcgaggugagcaacgugcagagacugaugagaaaggagagaagagacgacaacgaccugaagagacugagagaccugaaccaggccgugaacaaccugguggagcugaagagcacccagcagaagagcauccugagagugggcacccugaccagcgacgaccugcugauccuggccgccgaccuggagaagcugaagagcaaggugaccagaaccgagagaccccugagcgccggcguguacaugggcaaccugagcagccagcagcuggaccagagaagagcccugcugaacaugaucggcaugagcggcagcaaccagggcgccagaaccggcagagacggcguggugagagugugggacgugaagaacgccgagcugcugaacaaccaguucggcaccaugcccagccugacccuggccugccugaccaagcagggccagguggaccugaacgacgccgugcaggcccugaccgaccugggccugaucuacaccgccaaguaccccaacaccagcgaccuggacagacugacccagagccaccccauccugaacaugaucgacaccaagaagagcagccugaacaucagcggcuacaacuucagccugggcgccgccgugaaggccggcgccugcaugcuggacggcggcaacaugcuggagaccaucaaggugagcccccagaccauggacggcauccugaagagcauccugaaggugaagaaggcccugggcauguucaucagcgacgcccccggcgagagaaaccccuacgagaacauccuguacaagaucugccugagcggcgacggcuggcccuacaucgccagcagaaccagcaucaccggcagagccugggagaacaccgugguggaccuggagagcgacggcaagccccagaaggccggcagcaacggcagcaacaagagccugcagagcgccggcuucaccgccggccugaccuacagccagcugaugacccugaaggacgccaugcugcagcuggaccccaacgccaagaccuggauggacaucgagggcagacccgaggaccccguggagaucgcccuguaccagcccagcagcggcugcuacauccacuucuucagagagcccaccgaccugaagcaguucaagcaggacgccaaguacagccacggcaucgacgugaccgaccuguucgccgcccagcccggccugaccagcgccgugaucgacgcccugcccagaaacauggugaucaccugccagggcagcgacgacaucagaaagcuguucgagagccagggcagaaaggacaucaagcugaucgacaucgcccugagcaagaccgacagcagaaaguacgagaacgccgugugggaccaguacaaggaccugugccacaugcacaccggcaucgugguggagaagaagaagagaggcggcaaggaggagaucaccccccacugcgcccugauggacugcaucauguucgacgccgccgugagcggcggccugaacaccagcgugcugagagccgugcugcccagagacaugguguucagaaccagcacccccagaguggugcugugaggacuaguaauaaggaaacuguaugaaugucugugggcaggaagugaagagauccuucuguaaagguuuuuggaauuaugucugcugaauaauaaacuuuuuugaaauaauaaaucugguagaaaaaugagaucucaaaggcucuuuucagagccaccaaaaaaaaaaaaaaaaaaaaaaaaaaaaaaaaaaaaaaaaaaaaaaaaaaaaaaaaaaaaaaaaagaauu

SEQ ID NO: 20144 - RNA, 2066 nt, Artificial Sequence
  mRNA product Design b-4 (hSL-A64-N5) comprising derived and/or modified sequence from LASV(Josiah;Clade IV)__NP_694869__SP-HsALB_NP(2-569) (opt5)
aggagagucccgcagucggcguccagcggcucugcuuguucgugugugugucguugcaggccuuauucaagcuuaccaugaagugggugaccuucaucagccugcucuuucuguucuccucugccuacagcagcgccuccaaggagaucaaaucuuuccuguggacccagagccucagacgggaacuguccggcuacugcucuaacauuaagcugcaaguggucaaagacgcucaggcccugcuccacgggcuggauuuuagcgagguuuccaaugugcagcgccuuaugagaaaggaacggcgcgacgauaacgaccugaaaagacuccgggaucugaaucaggcggugaacaaucuggucgagcucaagucuacacaacaaaagagcauccugcgcgugggaacgcuuaccuccgacgaucugcucauucuggcugccgaccuugaaaaacuuaagagcaaaguuaucagaacagagcggccccucucugccggcguguauauggggaaccuguccagccagcagcuggaucagcgcagagcucuccugaauaugauuggaaugucuggcgggaaccagggagcccgggcuggccgcgacggcgucgugagaguuugggaugugaagaaugccgagcuucugaacaaucaguucgggaccaugccuucccucacacuggcgugucuuaccaaacagggacaagucgaccugaacgaugccgugcaggcucucacagaccugggccugaucuacaccgccaaguauccgaauacgagcgaccucgaucggcugacccagucucaucccauccuuaacaugauugacacaaagaaauccagccugaauaucuccggguacaacuuuucucucggagcugccgugaaggcgggcgccugcaugcuggaugggggaaacaugcuugaaaccauuaaagucagcccucaaacaauggacggcauccugaaguccauucucaaaguuaagaaagcucugggcauguucaucagcgauacccccggggagcgcaauccuuaugaaaacauucuguacaagaucugucucucuggagacggcuggcccuauaucgccuccagaacgagcauuacagggcgggcuugggagaauaccgugguggaucuggagucugacggaaagccucagaaagccgauagcaacaauuccucuaagagccuucaguccgccggcuuuacagcugggcugaccuacagccagcucaugacccugaaagacgcgaugcugcaacuugauccgaacgccaagacauggauggacaucgaaggaagacccgaggacccugucgaaauugcucucuaccagcccucuuccggcugcuauauccacuucuuucgcgagccuacggaucugaaacaguucaagcaggacgccaaguacagccauggcauugaugugaccgaccuguuugccacacaacccgggcucaccucugcuguuaucgaugcccugccgcggaauauggugaucacaugucagggauccgacgauauuagaaaacuucuggaaagccagggccgcaaggacaucaaacucauugauaucgcgcuguccaagaccgacucucggaaauaugagaacgcugucugggaucaguacaaggaccugugccacaugcauacgggggugguuguggagaagaaaaagagaggaggcaaagaagagauuacaccucacugugcccuuauggauugcaucauguucgacgccgcugucagcgggggccucaauaccuccgugcugcgcgccguccugccccgggacaugguguuuagaaccucuacaccucgcguugugcucugaggacuaguaauaaggaaacuguaugaaugucugugggcaggaagugaagagauccuucuguaaagguuuuuggaauuaugucugcugaauaauaaacuuuuuugaaauaauaaaucugguagaaaaaugagaucucaaaggcucuuuucagagccaccaaaaaaaaaaaaaaaaaaaaaaaaaaaaaaaaaaaaaaaaaaaaaaaaaaaaaaaaaaaaaaaaagaauu

SEQ ID NO: 20145 - RNA, 2066 nt, Artificial Sequence
  mRNA product Design b-4 (hSL-A64-N5) comprising derived and/or modified sequence from LASV(LP;Clade I)__AAF86702__SP-HsALB_NP(2-569) (opt5)
aggagagucccgcagucggcguccagcggcucugcuuguucgugugugugucguugcaggccuuauucaagcuuaccaugaagugggugaccuucaucagccugcucuuucuguucuccucugccuacagcagcaacuccaaggagaucaaaucuuuccuguggacccagagccucagacgggaacuguccggcuacugcucuaauauuaagcuccaaguggucaaagacgcccaggcucugcuccacgggcuggauuuuagcgagguuuccaacgugcagcgccuuaugagaaagcagaaacgggacgaugccgaccugaagcgccucagagaucugaaucaagcggugaacaaucuggucgaacucaagucuacacagcagaaaaacgugcugcggguuggaacgcuuagcuccgacgaucugaucacccucgcugccgaccuggagaaacuuaaaagcaaggugauucgcacagaaagaccccugucuuccggcgucuauauggggaaucucagcucucagcaacuggaucagcggcgcgcccugcucuccaugaucggaaugagcggcgggccucagggaaacagaaccggcggcgacggggugguucgggugugggaugucaaaaaugcugagcugcuuaacaaucaguucggaacaaugccgucucugacccucgccugucugacaaagcaaggccagguggaccuuaacgaugcugugcaggcccugaccgaccucgggcugauuuacacggcgaaguaucccaauuccagcgaccuggauaugcucacccaaucccauccuauccugggaauggucgacacaaagaagucuagccuuaacaucuccggcuacaauuuuagccugggggccgcuguuaaagccggagcuugcaugcucgauggcggcaacaugcuggagaccauuaaggugucuccccagacaauggacgggauccuuaaauccauucugaaggugaaacgcagccucggaauguucaucucugauaccccuggcgaaagaaaccccuaugagaauauucuguacaagaucugucugagcggggaaggauggccuuauauugccucccggacgucuaucacaggccgcgcgugggagaacacccucgucgaccuggagagcgauaauaagccgcccaaacuuaacuccgccgggagcaauaagucucugcaggcugccggacucaacgcuggccugacauacucccagcugaugacccuuaaagacugcaugcuccaacuggauccuagcucuaagaccuggaucgacauugaaggcagacccgaggauccuguggaaaucgcccuguuucagcccuccagcggguguuacauucacuucuuucgggagccgacagaccucaaacaguucaagcaggacgccaaguauucccauggaaucgauguuacggaccuguuuucuacccaaccuggccuuacaagcgcugugauugaagcgcugcccagaaauaugguccuuaccugccagggguccgaugacaucaaaaagcugcuggagucucagggacgccgggauaucaaacuuauugacaucagccucuccaaggccgauagcagaaaauucgagaacgcugugugggaccaguacaaggaucugugucacaugcauacaggcguuguggucgaaaagaaaaagcgcgggggcaaagaggaaauuaccccucacugcgcccugcucgacuguaucauguuugaugccgcuacgacaggaucucugaauauuaccacccuucgggccgugcugcccagagacauggucuuccgcacauccacccccaaggugguucucugaggacuaguaauaaggaaacuguaugaaugucugugggcaggaagugaagagauccuucuguaaagguuuuuggaauuaugucugcugaauaauaaacuuuuuugaaauaauaaaucugguagaaaaaugagaucucaaaggcucuuuucagagccaccaaaaaaaaaaaaaaaaaaaaaaaaaaaaaaaaaaaaaaaaaaaaaaaaaaaaaaaaaaaaaaaaagaauu

SEQ ID NO: 20146 - RNA, 2066 nt, Artificial Sequence
  mRNA product Design b-4 (hSL-A64-N5) comprising derived and/or modified sequence from LASV(803213;Clade II)__AAF86704__SP-HsALB_NP(2-569) (opt5)
aggagagucccgcagucggcguccagcggcucugcuuguucgugugugugucguugcaggccuuauucaagcuuaccaugaagugggugaccuucaucagccugcucuuucuguucuccucugccuacagcagcgccuccaaggaggugaaaucuuuccuguggacccagagccucagacgggaacuguccggcuacugcucuaacaucaaacuucaagucguuaaggacgcucaggcccugcuccacgggcuggauuuuagcgaggugaauaacgugcagcgccuuaugagaaagcagaaacgggacgauggagaccugaagcgccucagagaucugaaucaagcggucaacaaucugguggaacucaaguccacacagcagaaaucuauucugcggguuggcacgcuuaccagcgacgaucugcucacacuggcugccgaccuugagaagcugaaauccaaggugauccgcaccgaaagaccccucagcucuggggucuauaugggaaaccuguccacacagcaacuggagcagcggcgcgcccuccugaauaugauuggcauggugggaggagcucagggcacccagccuggcagagaugggguugugcgggucugggacgugaaaaacccggaucuucugaauaaccaauucggaacaaugcccagccucacccuggccugucuuacgaagcagggccagguggaccugaaugaugcuguccucgcccugaccgaccuggggcucaucuacacagcgaaguauccuaacucuuccgaccuggaucgccuuagccaaucucaucccauucugaauaugguugacaccaaaaaguccagccucaacaucuccggauacaauuuuucucugggcgccgcugugaaagccggggcuugcaugcuugauggaggcaacaugcuggagacaaucaaggugaccccucagacgauggacggcauucucaaaagcauccugaaggucaaaagaucccuggggauguucgugagcgauacacccggagaacggaacccuuaugagaauauucucuacaagaucugucugucuggcgacggguggccguauauugccucccgcaccagcaucguugggagagcgugggaaaacacaaccguggaucuugagucugacggcaagccccagaaagucgggaccgccggaagcaauaagucccugcagucugcuggcuuuccuacaggccucacguacagccaacugaugacccugaaagauuccaugaugcagcuugaccccagcgccaagacauggauugauaucgaggggcggccugaagaccccguggagaucgcucucuaccagccgaugucuggaugcuauauucacuucuuuagagaaccuaccgaccugaaacaguucaagcaagaugccaaguacucccauggcaucgacguugccgaucuguuucccgcucagccugggcucacaagcgcggugauugaggcccugccccgcaacaugguccuuaccugucagggaucugacgauaucaaaaagcugcucgacucccagggccggagagauauuaaacugaucgacaucagccuguccaagguggauucucgcaaauucgaaaaugcugucugggaccaaugcaaggaucuuugucacaugcauacgggggugguuguggagaagaaaaagcggggcggaaaagaggaaauuacaccccacugcgcccucauggacuguaucauguuugaugccgcugucagcggcgggcugaacauuccugugcugagagccguucucccgcgcgacaugguguuccggaccuccucucccaaggucgugcugugaggacuaguaauaaggaaacuguaugaaugucugugggcaggaagugaagagauccuucuguaaagguuuuuggaauuaugucugcugaauaauaaacuuuuuugaaauaauaaaucugguagaaaaaugagaucucaaaggcucuuuucagagccaccaaaaaaaaaaaaaaaaaaaaaaaaaaaaaaaaaaaaaaaaaaaaaaaaaaaaaaaaaaaaaaaaagaauu

SEQ ID NO: 20147 - RNA, 2069 nt, Artificial Sequence
  mRNA product Design b-4 (hSL-A64-N5) comprising derived and/or modified sequence from LASV(GA391;Clade III)__CAA36646__SP-HsALB_NP(2-570) (opt5)
aggagagucccgcagucggcguccagcggcucugcuuguucgugugugugucguugcaggccuuauucaagcuuaccaugaagugggugaccuucaucagccugcucuuucuguucuccucugccuacagcagcgccuccaaggaggugagaucuuuccuguggacccagagccuccggcgcgaacuguccggcuacugcucuaacaucaaacuucaagucguuaaggacgcucaggcccugcuccacgggcuggauuuuagcgagguguccaaugugcagagacuuaugcggaaacagaagcgcgacgauggagaccugaaaagacuccgggaucugaaccaagcggucaauaaccugguggaacucaagucuacacagcagaaaagcguucugcgcgugggcacgcuuuccagcgacgaucugcucauucuggcugccgaccuugagaaacugaagucuaaagucaccagaacagaacggccccucuccagcgggguguauaugggaaaucugucuucccagcaacuggaucagcgcagagcccuccugaacaugaucggcaugaccgggguuagcggaggcggcaagggggcuucugacggaauugugcgggucugggaugugaaaaaugccgagcuucugaacaaucaguucggcacaaugccuucccucacccuggcuugucuuacaaagcaggggcaaguggaccugaacgaugccguccaggcgcucaccgaccugggacugaucuacacggccaaguauccgaauagcuccgaccucgaucgccugucucagagccaucccauucuuaacaugaucgacaccaaaaaguccagccugaauaucucuggcuacaacuuuucccucggggcugccguuaaagcuggagccugcaugcuggauggcggcaauaugcuugagacaauuaaggugagcccucaaaccauggacgggauccugaaaucuauucucaaggugaaaaagagccugggaauguucgucuccgauacacccggcgaaagaaacccuuaugagaacauccuguacaagauuugucucucuggggacggauggcccuauaucgcgagccggaccuccauugugggccgcgccugggaaaauacgguuguggaucuggagcaggacaacaaaccucagaagaucgggaauggaggcagcaacaaaucucuucaguccgcuggcuuugccgcugggcugacauacagccaacucaugacccugaaggauuucaaaugcuuuaaucugaucccgaacgccaagacauggauggacauugagggaagacccgaagauccugucgagaucgcccuuuaccagcccucuuccggcuguuaugugcacuucuuucgggaaccuaccgaccucaagcaguucaaacaggacgcuaaguacagccaugggauugauguuaccgaccuguuugcggcccaacccggacugacauccgcugugaucgaggcccucccgagaaauauggucauuacgugccagggcucugaagauauccgcaaacugcuugagagccaggggcggagagacaucaagcugauugauaucacccucuccaaagccgacucucgcaaguucgagaacgcugugugggaucaguuuaaggaccugugucacaugcauacaggcgucgugguugaaaagaagaaacggggaggcaaggaggaaauuaccccucacugcgcccugauggauuguaucauguucgacgcggcugugagcgggggacuugaugccaaaguccucagagugguucugccccgcgacaugguguuccggacauccaccccuaaggucgugcugugaggacuaguaauaaggaaacuguaugaaugucugugggcaggaagugaagagauccuucuguaaagguuuuuggaauuaugucugcugaauaauaaacuuuuuugaaauaauaaaucugguagaaaaaugagaucucaaaggcucuuuucagagccaccaaaaaaaaaaaaaaaaaaaaaaaaaaaaaaaaaaaaaaaaaaaaaaaaaaaaaaaaaaaaaaaaagaauu

SEQ ID NO: 20148 - RNA, 2066 nt, Artificial Sequence
  mRNA product Design b-4 (hSL-A64-N5) comprising derived and/or modified sequence from LASV(AV;Clade V)__CCA30315__SP-HsALB_NP(2-569) (opt5)
aggagagucccgcagucggcguccagcggcucugcuuguucgugugugugucguugcaggccuuauucaagcuuaccaugaagugggugaccuucaucagccugcucuuucuguucuccucugccuacagcagcgccuccaaggaggugaaaucuuuccuguggacccagagccucagacgggaacuguccggcuacugcucuaacaucaaacuucaagucguuaaggacgcucaggcccugcuccacgggcuggauuuuagcgagguguccaaugugcagcgccuuaugagaaagcagcggcgcgacgauucugaccugaaaagacuccgggaucugaaccaagcggucaauaaccugguggaacucaagagcacacagcagaaguccguucugcgcgugggaacgcuuagcucugacgaucugcucacccuggcugccgaccuugagaaacugaaguccaaagucacaagaaccgaacggccccucagcucuggcguguauauggggaaucuguccagccagcaacuggaucagcgcagagcccuccugaaccuuauuggaaugacaaauggcucucaggggucccaggcuggacgggacggcguugugcgcgucugggaugugaagaacgccgagcugcucaauaaccaauucggcaccaugccuagccugacacuugcuugucugaccaaacagggacagguggaccucaaugaugucguucaagcccugacggaccuggggcucaucuacaccgcgaaguauccgaacacauccgaccuggauagacuuacccagucucaucccauucugaauaugaucgacacaaagaaaagcucccucaacauuagcggcuacaauuuuucucugggggccgcugugaaggccggagcuugcaugcuugauggcgggaacaugcuggagaccaucaaaguguccccucagagcauggacggaauccucaagucuauucugaaagucaagcgggcccugggcauguucgugagcgauacgcccggcgaacgcaacccuuaugagaauauccucuacaaaauuugucuguccggggacggauggcccuauaucgcgucuagaacaagcauuguuggccgggccugggaaaacaccguggucgaucuugagacagacgggaagccucagaagaucggauccggcaauagcaacaaaucucugcaauccgcuggguuuagcgccggacucaccuacucucagcugaugacccugaaggaugcuaugcuucagcucgacccgaaugccaaaacauggauggauauugagggcagacccgaagacccuguggagguugcccuguaccagcccaucuccggcugcuauauccacuucuuucgcgaaccuacggaccugaagcaauucaaacaggaugcuaaguacagccaugggauugacaucgcggaucucuuugccgcucagcccggacugaccuccgccgugauugaggcccuuccgcggaacauggucaucacaugucagggcucugaagacauuaagaaacugcucgagagccaagggagaaaggauaucaaacugaucgacauugcucuguccaagaucgauucucgcaaauucgagaaugccgugugggaccaguauaaggaucuuugccacaugcauaccggagucgugguugaaaagaaaaagcggggcgggaaagaggaaauuacaccucacugugcgcucauggacugcaucauguuugaugcugccgugagcggcggacugaacacccugguccucagagccgugcugccccgcgacaugguuuuccggacguccacaccuagagugguccuuugaggacuaguaauaaggaaacuguaugaaugucugugggcaggaagugaagagauccuucuguaaagguuuuuggaauuaugucugcugaauaauaaacuuuuuugaaauaauaaaucugguagaaaaaugagaucucaaaggcucuuuucagagccaccaaaaaaaaaaaaaaaaaaaaaaaaaaaaaaaaaaaaaaaaaaaaaaaaaaaaaaaaaaaaaaaaagaauu

SEQ ID NO: 20149 - RNA, 2066 nt, Artificial Sequence
  mRNA product Design b-4 (hSL-A64-N5) comprising derived and/or modified sequence from LASV(Togo/2016/7082;Clade VI)__AMR44578__SP-HsALB_NP(2-569) (opt5)
aggagagucccgcagucggcguccagcggcucugcuuguucgugugugugucguugcaggccuuauucaagcuuaccaugaagugggugaccuucaucagccugcucuuucuguucuccucugccuacagcagcaacuccaaggaggugaaaucuuuccuguggacccagagccucagacgggaacuguccggcuacugcucuaauaucaaacuucaagucguuaaagacgcccaggcucugcuccacgggcuggauuuuagcgagguguccaacgugcagcgccuuaugagaaagcagaaacgggacgauggagaccugaagcgccucagagaucugaaucaagccgucaacaaucugguggaacucaagucuguucagcagaaaagcauucugcgggugggcacacuuacguccgacgaucugcucacccuggcggcugaccuugagaagcugaaaagcaaggucacacgcaccgaaagaccccucucuuccgggguguauaugggaaaccugagcucucagcaacuggaucagcggcgcgcccuccuguccaugaucggcaugagcgggggaaaucagaacucucagccuaaaggcgacggcguugugagagucugggaugugaagaaugccgaccuucugaacaaucaauucgggacaaugccgucccucacccuggcuugucuuacaaagcagggacagguggaucugaacgacgccguccaagcucucaccgaccugggccugauuuacacggccaaauaucccaauagcuccgaucucgaccggcugucucagagccauccuauccuuaacaugauugauaccaagaaauccagccugaauaucucuggguacaacuuuucccucggagcggccaucaagacaggcgcuugcaugcuggacgggggaaacaugcuugagaccauuaaaguuacaccccagaccauggauggcauccucaagagcauucugaaagugaagcgcucucugggcauguucaucagcgacacgccuggggagagaaaucccuaugaaaacauucuguacaagaucugucucuccggagauggcuggccuuauauugccucucggacagcuaucaucgggcgcgccugggagaauaccguggucgaccuggaaagcgauuccaaaccgcagaagauuggaagcaacggcucuaauaaaucccuucaaagcgcgggguuugcccccggacugacauacucucagcucaugacccugaaggacuccaugcugcagcuugauccuaacgcuaaaaccuggaucgacauugagggcagacccgaggacccuguggaaguugcccucuuccagcccaucagcggcugcuacauucacuuuuuccgggagccgacagaucugaagcaauuuaagcaggacgcuaaauauucccaugggaucgaugugacggaccuguucgccgcccagccuggacucaccucugcugucaucgaagcgcugcccagaaauauggugcuuacaugucagggcagcgaugacauuaagaaacugcucgauucccaagggcgccgggacaucaagcugauugauguuucucugaacaaaaucgacagcagaaaguuugagaaugccgugugggaucaguacaaggaccuuugccacaugcauaccggagucguggucgaaaagaagaaaaagggcgggaaagaggagauuacaccucacugugcucuccuggauugcaucauguucgacgccgccguguccggcggacugaacgcuaccguucuccgcgccgugcugccccgggacauggucuuuagaacgagcucucccaaggugguucuuugaggacuaguaauaaggaaacuguaugaaugucugugggcaggaagugaagagauccuucuguaaagguuuuuggaauuaugucugcugaauaauaaacuuuuuugaaauaauaaaucugguagaaaaaugagaucucaaaggcucuuuucagagccaccaaaaaaaaaaaaaaaaaaaaaaaaaaaaaaaaaaaaaaaaaaaaaaaaaaaaaaaaaaaaaaaaagaauu

SEQ ID NO: 20150 - RNA, 2066 nt, Artificial Sequence
  mRNA product Design b-4 (hSL-A64-N5) comprising derived and/or modified sequence from LASV(KAK-428;Clade n.d. (VII))__ANH09741__SP-HsALB_NP(2-569) (opt5)
aggagagucccgcagucggcguccagcggcucugcuuguucgugugugugucguugcaggccuuauucaagcuuaccaugaagugggugaccuucaucagccugcucuuucuguucuccucugccuacagcagcaacuccaaggaggugaaaucuuuccuguggacccagagccucagacgggaacuguccggcuacugcacaaauaucaaacuucaagucguuaaggacgcccaggcucugcuccacgggcuggauuuuucugaggugagcaacgugcagcgccuuaugagaaagcagaaacgggacgauaaugaccugaagcgccucagagaucugaaccaagccgucaauaaccugguggaacucaaguccguucagcagaaaucugugcugaaggucggaacgcuuaauagcgacgaucugcucacccuggcggcugaccuugagaaacugaaguccaaagugguucggacagaacgcccccucagcucuggcguguauauggggaaccuguccagccagcaacuggaucagagacgggcccuccugaauaugauuggaauggccggcgggucucagggaaaccagccuucccgcgacggcgucgugagagugugggaugucaagaaugcugaccuucugaacaaucaauucggcaccaugccgagccucacacuggccugucuuaccaagcaggggcagguugaucugaacgacguggugcucgcucugacagaccugggacucaucuacaccgccaaauaucccaauucuuccgaucuggaccggcuuagccaaaaccauccuguccugaacaugauugaugugaauaaguccucucucaacaucagcggcuacaauuuuucccugggggcggccguuaaagcuggagccugcaugcuugacggcgggaacaugcuggagacgauuaagaucagcccccagaccguggauggaauccucaaaucuauucugaaggucaaacgcgcucugggcauguucguguccgacacaccuggcgagagaaaucccuaugaaaacauccucuacaagguuugucugagcgggaauggauggccuuauauugccucucggaccagcaucgugggccgcgcgugggagaacacagucguggaucuugaauccaauaagaaccagccgaaagucgggaauaacggaucuaauaagaugcugcagagcuccggcuuugccaccgggcucacguacagccaacugaugacacugagagacucuaugcuucagcucgaucccaccgcuaaaacauggauugacaucgagggacggccugaggaucccguggaacuggcccuguuccagccuuccagcggcugcuacauucacuuuuucagagagcccaccgaccucaagcaguuuaaacaagacgcuaaguauucucauggcaucgauguuaacgaccuguucuccgcccagccggggcuuaccagcgccgugcuggaagcucucccucgcaauaugguccugacaugucagggauccgaugacauccggaagcugcuugauucucaggacagaaaagauauuaagcucaucgacauuagccuguccaaagcggaugcccgcaaguuugagaacgacgugugggaucaauucaaagaccugugccacaugcauacgggcaucguuguggaaaagaagaaaaagggagggaaacaggagaugacaccccacugugcucuccuggauugcauuauguuugacgccgccgucucuggcgggcuuaacgugccuacccugcgggcugugcuccccaccgacaugguuuucagaacaaucaccacgaaggucgugcugugaggacuaguaauaaggaaacuguaugaaugucugugggcaggaagugaagagauccuucuguaaagguuuuuggaauuaugucugcugaauaauaaacuuuuuugaaauaauaaaucugguagaaaaaugagaucucaaaggcucuuuucagagccaccaaaaaaaaaaaaaaaaaaaaaaaaaaaaaaaaaaaaaaaaaaaaaaaaaaaaaaaaaaaaaaaaagaauu

SEQ ID NO: 20151 - RNA, 2066 nt, Artificial Sequence; identical to SEQ ID NO: 20145
  mRNA product Design b-4 (hSL-A64-N5) comprising derived and/or modified sequence from LASV(Pinneo-NIG-1969;Clade I)__AIT17837__SP-HsALB_NP(2-569) (opt5)

SEQ ID NO: 20152 - RNA, 2066 nt, Artificial Sequence
  mRNA product Design b-4 (hSL-A64-N5) comprising derived and/or modified sequence from LASV(ISTH0009-NIG-2011;Clade II)__AIT17405__SP-HsALB_NP(2-569) (opt5)
aggagagucccgcagucggcguccagcggcucugcuuguucgugugugugucguugcaggccuuauucaagcuuaccaugaagugggugaccuucaucagccugcucuuucuguucuccucugccuacagcagcguguccaaggaggucaaaucuuuccuguggacccagagccucagacgggaacuguccggcuacugcucuaacaucaaacuucaaguugugaaggacgcccaggcucugcuccacgggcuggauuuuagcgagguguccaauguccagcgccuuaugagaaagcagaaacgggacgauucugaccugaagcgccucagagaucugaaccaagccgugaauaaccugguugaacucaagagcacacagcagaaauccauucugcgggugggaacgcuuaccagcgacgaucugcucacacuggcggcugaccuugagaagcugaaaucuaaggucauccgcaccgaaagaccccucuccagcggcguguauauggggaaucugucuacacagcaacuggagcagcggcgcgcccuccugaacaugauuggaaugguuggcggggcccagggaacccagccuggcagagauggcgugguccgggugugggacgugaaaaauccggaucuucugaacaaucaauucgggacaaugcccucccucacccuggcuugucuuacgaagcagggacaggucgaccugaacgaugccguucucgcucugaccgaccugggccucaucuacacagccaaguauccuaauagcucugaccuggaucgccuuucccaaagccaucccauucugaacaugguggacaucaaaaaguccucucucaauaucagcggguacaacuuuucccugggagcggccgugaaagcuggcgccugcaugcuugaugggggaaauaugcuggagaccauuaaggucacaccucagaccauggacggcauccucaaaagcauucugaaggugaaaagaucucugggcauguucguuuccgauacgcccggggaacggaacccuuaugagaacauccucuacaagauuugucugagcggagacggcuggccguauaucgcuucucgcacaagcauuguggggagagccugggaaaauaccacagucgaucuugaguccgacggaaagccccagaaagugggcucugcggggagcaacaagucccugcagagcgccggauuuccuaccggccucaccuacucucaacugaugacacugaaagauuccaugaugcagcuugaccccagcgcuaagacguggaucgauaucgagggccggccugaagaccccguugagauugcccucuaccagccgaugucugggugcuauauccacuucuuuagagaaccuaccgaccugaaacaguucaagcaagaugcuaaguacucccauggaauugacguggccgaucuguuucccgcccagccuggccucacaagcgcugucaucgaggcgcugccccgcaauauggugcuuaccugucagggguccgacgauauuaaacggcugcucgacucucagggaagacgcgauaucaagcugaucgacauugcccugagcaaagcugauucccggagauucgaaaacgccgucugggaccaaugcaaggaucuuugucacaugcauacaggcgugguuguggagaaaaagaagcgcgggggcaaagaggaaaucacgccccacugcgcccucauggacuguauuauguaugaugcugccgucucuggaggccugaauaucccugugcugcgggcgguucucccgagagacaugguguuucgcaccagcucccccaaggucgugcugugaggacuaguaauaaggaaacuguaugaaugucugugggcaggaagugaagagauccuucuguaaagguuuuuggaauuaugucugcugaauaauaaacuuuuuugaaauaauaaaucugguagaaaaaugagaucucaaaggcucuuuucagagccaccaaaaaaaaaaaaaaaaaaaaaaaaaaaaaaaaaaaaaaaaaaaaaaaaaaaaaaaaaaaaaaaaagaauu

SEQ ID NO: 20153 - RNA, 2066 nt, Artificial Sequence
  mRNA product Design b-4 (hSL-A64-N5) comprising derived and/or modified sequence from LASV(ISTH2010-NIG-2012;Clade II)__AIT17483__SP-HsALB_NP(2-569) (opt5)
aggagagucccgcagucggcguccagcggcucugcuuguucgugugugugucguugcaggccuuauucaagcuuaccaugaagugggugaccuucaucagccugcucuuucuguucuccucugccuacagcagcgccuccaaggaggugaaaucuuuccuguggacccagagccucagacgggaacuguccggcuacugcucuaacaucaaacuucaagucguuaaggacgcucaggcccugcuccacgggcuggauuuuagcgagguguccaaugugcagcgccuuaugagaaagcagaaacgggacgauucugaccugaagcgccucagagaucugaaccaagcggucaauaaccugguggaacucaagagcacacagcagaaauccauucugcggguuggaacgcuuaccagcgacgaucugcucacacuggcugccgaccuugagaagcugaaaucuaaggugauccgcaccgaaagaccccucuccagcggcgucuauauggggaaucugucuacacagcaacuggagcagcggcgcgcccuccugaaccuuauuggaauggugggcggggcucagggaacccagccuggcagagauggcguugugcgggucugggacgugaaaaauccggaucugcucaacaaucaauucgggacaaugcccucccugacccuugccugucugacgaagcagggacagguggaccucaacgaugcuguccuggcccugaccgaccucggccugaucuacacagcgaaguauccuaauagcucugaccuugaucgccugucccaaagccaucccauucucaacaugguugacaccaaaaaguccucucugaauaucagcggguuuaacuucucccuuggagccgcugugaaagccggcgcuugcaugcuggaugggggaaauaugcucgagacaaucaaggugaccccucagacgauggacggcauucugaaaagcauccugaaggucaaaaagucucucggcauguuuguguccgauacacccggggaaagaaacccuuacgagaacauucuguauaagaucugucuuagcggagacggcuggccguacauugccucucggaccagcaucguugggcgcgcgugggaaaauacaaccguggaucuggaguccgacggaaaaccccacaaggucggcaccgccgggucuaacaaaagccuccaguccgcuggauucccuacaggccugacguauagccagcugaugacccuuaaggauucuaugaugcaacucgaccccuccgccaaaacauggauugauaucgagggcagaccugaagaccccguggagaucgcucuguaccagccgaugagcgggugcuacauucacuuuuuccgggaaccuaccgaccugaagcaguuuaagcaggaugccaaauauucucauggaaucgacguugccgaucucuuccccgcucaaccuggccugacauccgcggugauugaggcccuucccagaaauaugguccugaccugucaggggagcgacgauaucaagcgccuccuggacucccagggacggagagauauuaaacugaucgacaucgcucuuucuaaggccgauagccgccgguuugaaaacgccgugugggaccagugcaaagaucucugucauaugcacacgggcgucgugguugagaagaagaaaagagggggcaaggaggaaauuacaccccacugcgcucugauggacuguaucauguacgaugccgcgguguccggaggccugaauauuccuguccuccgcgcugugcugccgcgggacaugguuuucagaaccucuagccccaaagugguccuuugaggacuaguaauaaggaaacuguaugaaugucugugggcaggaagugaagagauccuucuguaaagguuuuuggaauuaugucugcugaauaauaaacuuuuuugaaauaauaaaucugguagaaaaaugagaucucaaaggcucuuuucagagccaccaaaaaaaaaaaaaaaaaaaaaaaaaaaaaaaaaaaaaaaaaaaaaaaaaaaaaaaaaaaaaaaaagaauu

SEQ ID NO: 20154 - RNA, 2066 nt, Artificial Sequence
  mRNA product Design b-4 (hSL-A64-N5) comprising derived and/or modified sequence from LASV(Lassa virus/H.sapiens-wt/NGA/2015/ISTH_0543;Clade II)__AVO03640__SP-HsALB_NP(2-569) (opt5)
aggagagucccgcagucggcguccagcggcucugcuuguucgugugugugucguugcaggccuuauucaagcuuaccaugaagugggugaccuucaucagccugcucuuucuguucuccucugccuacagcagcgccuccaaggaggugaaaucuuuccuguggacccagagccucagacgggaacuguccggcuacugcucuaacaucaaacuucaagucguuaaggacgcucaggcccugcuccacgggcuggauuuuagcgagguguccaaugugcagcgccuuaugagaaagcagaaacgggacgauucugaccugaagcgccucagagaucugaaccaagcggucaauaaccugguggaacucaagagcacacagcagaaauccauucugcggguuggaacgcuuaccagcgacgaucugcucacacuggcugccgaccuugagaagcugaaaucuaaggugauccgcaccgaaagaccccucuccagcggcgucuauauggggaaucugucuacacagcaacuggagcagcggcgcgcccuccugaacaugauuggaauggugggcggggcucagggaacccagccuggcagagauggcguugugcgggucugggacgugaaaaauccggaucuucugaacaaucaauucgggacaaugcccucccucacccuggccugucuuacgaagcagggacagguggaccugaacgaugcuguccucgcccugaccgaccugggccucaucuacacagcgaaguauccuaauagcucugaccuggaucgccuuucccaaagccaucccauucugaacaugguugacaccaaaaaguccucucucaauaucagcggguacaacuuuucccugggagccgcugugaaagccggcgcuugcaugcuugaugggggaaauaugcuggagacaaucaaggugaccccucagacgauggacggcauucucaaaagcauccugaaggucaaaaagucucugggcauguucguguccgauacacccggggaaagaaacccuuaugagaacauucucuacaagaucugucugagcggagacggcuggccguauauugccucucggaccagcaucguugggcgcgcgugggaaaauacaaccguggaucuugaguccgacggaaaaccccagaaggucggcucugccgggagcaacaaaucccugcagagcgcuggauuuccuaccggccucacauacucucaacugaugacgcugaaggauuccaugaugcagcuugaccccagcgccaaaaccuggauugauaucgagggcagaccugaagaccccguggagaucgcucucuaccagccgaugucugggugcuauauucacuucuuucgggaaccuacagaccugaagcaguucaagcaagaugccaaauacucccauggaaucgacguugccgaucuguuucccgcucagccuggccucaccagcgcggugauugaggcccugcccagaaauaugguccuuacaugucagggguccgacgauaucaagcgccugcucgacucucagggacggaaagauauuaagcugaucgacaucgcucugagcaaagccgauuccagacgcuucgaaaacgccgugugggaccaaugcaaggaucuuugucacaugcauaccggcgucgugguugagaagaaaaagagagggggcaaagaggaaauuacgccccacugcgcucucauggacuguaucauguaugaugccgcggugucuggaggccugaauauuccuguccugcgggcugugcucccgcgcgacaugguuuuucggacaagcucccccaaggugguccugugaggacuaguaauaaggaaacuguaugaaugucugugggcaggaagugaagagauccuucuguaaagguuuuuggaauuaugucugcugaauaauaaacuuuuuugaaauaauaaaucugguagaaaaaugagaucucaaaggcucuuuucagagccaccaaaaaaaaaaaaaaaaaaaaaaaaaaaaaaaaaaaaaaaaaaaaaaaaaaaaaaaaaaaaaaaaagaauu

SEQ ID NO: 20155 - RNA, 2066 nt, Artificial Sequence
  mRNA product Design b-4 (hSL-A64-N5) comprising derived and/or modified sequence from LASV(Lassa virus/H.sapiens-wt/NGA/2016/ISTH_0009;Clade II)__AVO03572__SP-HsALB_NP(2-569) (opt5)
aggagagucccgcagucggcguccagcggcucugcuuguucgugugugugucguugcaggccuuauucaagcuuaccaugaagugggugaccuucaucagccugcucuuucuguucuccucugccuacagcagcgccuccaaggaggugaaaucuuuccuguggacccagagccucagacgggaacuguccggcuacugcucuaacaucaaacuucaagucguuaaggacgcucaggcccugcuccacgggcuggauuuuagcgagguguccaaugugcagcgccuuaugagaaagcagaaacgggacgauucugaccugaagcgccucagagaucugaaccaagcggucaauaaccugguggaacucaagagcacacagcagaaauccauucugcggguuggaacgcuuaccagcgacgaucugcucacacuggcugccgaccuugagaagcugaaaucuaaggugauccgcaccgaaagaccccucuccagcggcgucuauauggggaaucugucuacacagcaacuggagcagcggcgcgcccuccugaacaugauuggaauggugggcggggcucagggaacccagccuggcagagauggcguugugcgggucugggacgugaaaaauccggaucuucugaacaaucaauucgggacaaugcccucccucacccuggccugucuuacgaagcagggacagguggaccugaacgaugcuguccucgcccugaccgaccugggccucaucuacacagcgaaguauccuaauagcucugaccuggaucgccuuucccaaagccaucccauucugaacaugguugacaccaaaaaguccucucucaauaucagcggguacaacuuuucccugggagccgcugugaaagccggcgcuugcaugcuugaugggggaaauaugcuggagacaaucaaggugaccccucagacgauggacggcauucucaaaagcauccugaaggucaaaaagucucugggcauguucguguccgauacacccggggaaagaaacccuuaugagaacauucucuacaagaucugucugagcggagacggcuggccguauauugccucucggaccagcaucguugggcgcgcgugggaaaauacaaccguggaucuugaguccgacggaaaaccccagaaggucggcucugccgggagcaacaaaucccugcagagcgcuggauuuccuaccggccucacauacucucaacugaugacgcugaaggauuccaugaugcagcuugaccccagcgccaaaaccuggauugauaucgagggcagaccugaagaccccguggagaucgcucucuaccagccgaugucugggugcuauauucacuucuuucgggaaccuacagaccugaagcaguucaagcaagaugccaaauacucccauggaaucgacguugccgaucuguuucccgcucagccuggccucaccagcgcggugauugaggcccugcccagaaauaugguccuuacaugucagggguccgacgauaucaagcgccugcucgacucucagggacggagagauauuaaacugaucgacaucgcucugagcaaggccgauucccgccgguucgaaaacgccgugugggaccaaugcaaagaucuuugucacaugcauaccggcgucgugguugagaagaagaaaagagggggcaaggaggaaauuacgccccacugcgcucucauggacuguaucauguaugaugccgcggugucuggaggccugaauauuccuguccugcgcgcugugcucccgcgggacaugguuuuuagaacaagcucccccaaagugguccugugaggacuaguaauaaggaaacuguaugaaugucugugggcaggaagugaagagauccuucuguaaagguuuuuggaauuaugucugcugaauaauaaacuuuuuugaaauaauaaaucugguagaaaaaugagaucucaaaggcucuuuucagagccaccaaaaaaaaaaaaaaaaaaaaaaaaaaaaaaaaaaaaaaaaaaaaaaaaaaaaaaaaaaaaaaaaagaauu

SEQ ID NO: 20156 - RNA, 2066 nt, Artificial Sequence
  mRNA product Design b-4 (hSL-A64-N5) comprising derived and/or modified sequence from LASV(Lassa virus/H.sapiens-wt/NGA/2016/ISTH_0017;Clade II)__AVO03568__SP-HsALB_NP(2-569) (opt5)
aggagagucccgcagucggcguccagcggcucugcuuguucgugugugugucguugcaggccuuauucaagcuuaccaugaagugggugaccuucaucagccugcucuuucuguucuccucugccuacagcagcgccuccaaggaggugaaaucuuuccuguggacccagagccucagacgggaacuguccggcuacugcucuagcaucaaacuucaagucguuaaggacgcucaggcccugcuccacgggcuggauuuuuccgaggugucuaacgugcagcgccuuaugagaaagcagaaacgggacgauagcgaccugaagcgccucagagaucugaaucaagcggucaacaaucugguggaacucaaguccacacagcagaaaagcauucugcggguuggaacgcuuaccucugacgaucugcucacacuggcugccgaccuugagaagcugaaauccaaggugauccgcaccgaaagaccccucagcucuggcgucuauauggggaaccuguccacacagcaacuggagcagcggcgcgcccuccugaauaugauuggaauggcuggcggggcccagggaacccagccuggcagagauggcgugguucgggugugggacgucaaaaacccggaucuucugaauaaccaauucgggacaaugcccagccucacccuggcuugucuuacgaagcagggacagguggaccugaaugaugccgugcucgcgcugaccgaccugggccucaucuacacagccaaguauccuaacucuuccgaccuggaucgccuuagccaaucccaucccauucugaauauggucgacaccaaaaagucuagccucaacaucuccggguacaauuuuagccugggagcugccguuaaagcuggcgccugcaugcuugaugggggaaacaugcuggagacaaucaaggugaccccucagacgauggacggcauucucaaaucuauccugaaggugaaaagaucccugggcauguucgucagcgaugcgcccggggaacggaauccuuaugagaacauucucuacaagaucugucugucuggagacggcuggccguauauugccagccgcacauccaucguggggagagcuugggaaaacaccacaguugaucuugagucugacggaaagccccagaaagugggcgccaccgggagcaauaagucccugcagagcgcuggauuuccuaccggccucacauacucucaacugaugacgcugaaagauuccaugaugcagcuugaccccagcgccaagaccuggauugauaucgagggccggccugaagaccccgucgagguggcccucuaccagccgguuucugggugcuauauccacuucuuuagagaaccuacagaccugaaacaguucaagcaagaugcuaaguacucccauggaauugacguggcggaucuguuucccgcccagccuggccucaccagcgcugucaucgaggcccugccccgcaacauggugcuuacaugucagggguccgacgauauuaaaaagcugcucgacucucagggacggaaagauaucaagcugauugacaucgcccugagcaaagcugauuccagacgcuucgaaaaugccgucugggaccaaugcaaggaucuuugucacaugcauaccggcgugguuguggagaagaaaaagagagggggcaaagaggaaaucacgccccacugcgcgcucauggacuguauuauguaugaugcugccgucucuggaggccugaacaucccugugcugcgggccguucucccgcgcgacaugguguuucggacaagcucccccaaggucgugcugugaggacuaguaauaaggaaacuguaugaaugucugugggcaggaagugaagagauccuucuguaaagguuuuuggaauuaugucugcugaauaauaaacuuuuuugaaauaauaaaucugguagaaaaaugagaucucaaaggcucuuuucagagccaccaaaaaaaaaaaaaaaaaaaaaaaaaaaaaaaaaaaaaaaaaaaaaaaaaaaaaaaaaaaaaaaaagaauu

SEQ ID NO: 20157 - RNA, 2066 nt, Artificial Sequence
  mRNA product Design b-4 (hSL-A64-N5) comprising derived and/or modified sequence from LASV(Lassa virus/H.sapiens-wt/NGA/2018/ISTH_0959;Clade II)__AVV65100__SP-HsALB_NP(2-569) (opt5)
aggagagucccgcagucggcguccagcggcucugcuuguucgugugugugucguugcaggccuuauucaagcuuaccaugaagugggugaccuucaucagccugcucuuucuguucuccucugccuacagcagcgccuccaaggaggugaaaucuuuccuguggacccagagccucagacgggaacuguccggcuacugcucuaacaucaaacuucaagucguuaaggacgcucaggcccugcuccacgggcuggauuuuagcgagguguccaaugugcagcgccuuaugagaaagcagaaacgggacgauucugaccugaagcgccucagagaucugaaccaagcggucaauaaccugguggaacucaagagcacccagcagaaauccauucugcggguuggaacgcuuaccagcgacgaucugcucacacuggcugccgaccuugagaagcugaaaucuaaggugauccgcaccgaaagaccccucuccagcggcgucuauauggggaaucugucuacacagcaacuggagcagcggcgcgcccuccugaaccuuauuggaauggugggcggggcucagggaacccagccuggcagagauggcguugugcgggucugggacgugaaaaauccggaucugcucaacaaucaauucgggacaaugcccucccugacccuugccugucugacgaagcagggacagguggaccucaacgaugucguucuggcucugaccgaccucggccugaucuacacagccaaguauccuaauagcucugaccuugaucgccugucccaaagccaucccauucucaacaugguggacaccaaaaaguccucucugaauaucagcggguuuaacuucucccuuggagcggccgugaaagcuggcgccugcaugcuggaugggggaaauaugcucgagacaaucaaggucaccccucagacgauggacggcauucugaaaagcauccugaaggugaaaaagucucucggcauguuuguuuccgauacacccggggaaagaaacccuuacgagaacauucuguauaagaucugucuuagcggagacggcuggccguacauugcuucucggaccagcaucguggggcgcgccugggaaaauacaaccgucgaucuggaguccgacggaaaaccccacaaggugggcaccgcggggucuaacaaaagccuccaguccgccggauucccuacaggccugacguauagccagcugaugacccuuaaggauucuaugaugcaacucgaccccuccgcuaaaacauggauugauaucgagggcagaccugaagaccccguugagaucgcccuguaccagccgaugagcgggugcuacauucacuuuuuccgggaaccuaccgaccugaagcaguuuaagcaggaugcuaaauauucucauggaaucgacguggccgaucucuuccccgcccaaccuggccugacauccgcugucauugaggcgcuucccagaaauauggugcugaccugucaggggagcgacgauaucaagcgccuccuggacucccagggacggaaagauauuaagcugaucgacaucgcccuuucuaaaacggauagcagacgcuuugaaaacgcugucugggaccagugcaaggaucucugucauaugcacacaggcgugguuguggagaagaaaaagagagggggcaaagaggaaauuacaccccacugcgcccugauggacuguaucauguacgaugccgcugucuccggaggccugaauauuccugugcuccgggccguucugccgcgcgacaugguguuccggaccucuagccccaaggucgugcuuugaggacuaguaauaaggaaacuguaugaaugucugugggcaggaagugaagagauccuucuguaaagguuuuuggaauuaugucugcugaauaauaaacuuuuuugaaauaauaaaucugguagaaaaaugagaucucaaaggcucuuuucagagccaccaaaaaaaaaaaaaaaaaaaaaaaaaaaaaaaaaaaaaaaaaaaaaaaaaaaaaaaaaaaaaaaaagaauu

SEQ ID NO: 20158 - RNA, 2066 nt, Artificial Sequence
  mRNA product Design b-4 (hSL-A64-N5) comprising derived and/or modified sequence from LASV(LASV003-NIG-2008;Clade II)__AIT17581__SP-HsALB_NP(2-569) (opt5)
aggagagucccgcagucggcguccagcggcucugcuuguucgugugugugucguugcaggccuuauucaagcuuaccaugaagugggugaccuucaucagccugcucuuucuguucuccucugccuacagcagcgccuccaaggaggugaaaucuuuccuguggacccagagccucagacgggaacuguccggcuacugcucuagcaucaaacuucaagucguuaaggacgcucaggcccugcuccacgggcuggauuuuuccgaggugucuaacgugcagcgccuuaugagaaagcagaaacgggacgauagcgaccugaagcgccucagagaucugaaucaagcggucaacaaucugguggaacucaaguccacccagcagaaaagcguucugcgggugggaacgcuuaccucugacgaucugcucacacuggcugccgaccuugagaagcugaaauccaaggucauucgcaccgaaagaccccucagcucuggcguguauauggggaaccuguccgcccagcaacuggagcagcggcgcacacuccugaauaugaucggaaugguuggcggggcucagggaacccagccuggcagagauggcgugguccgggugugggacgugaaaaacccggaucuucugaauaaccaauucgggacaaugcccagccucacccuggccugucuuacgaagcagggacaggucgaccugaaugauguugugcucgcucugaccgaccugggccucauuuacacagccaaguauccuaacucuuccgaccuggaucgccuuagccaaucccaucccauccugucuaugguggacaccaaaaagagcucccucaauauuagcggguacaacuuuucucugggagcggccgucaaagcuggcgccugcaugcuugaugggggaaauaugcuggagacaaucaaggugaccccucagacgauggacggcauccucaaauccauucugaagguuaaaaagagccugggcauguucgugucugauacacccggggaaagaaacccuuaugagaauauccucuacaagauuugucugagcggagacggcuggccguauaucgcuucccggaccucuauugucgggcgcgccugggaaaacacaaccguggaucuugagagcgacggaaaaccccagaagguuggcaccgcgggguccaacaaaagccugcagucugccggauuuccuacaggccucacguacucccaacugaugacccugaaggauagcaugaugcagcuugaccccucugcuaaaacauggaucgauauugagggcagaccugaagaccccguggagaucgcccucuaccagccgauguccgggugcuauauccacuucuuucgggaaccuaccgaccugaagcaguucaagcaagaugcuaaauacagccauggaauugacgucacagaucuguuucccgcccagccuggccucaccuccgccgugaucgaggcucugcccagaaauaugguccuuacgugucaggggucugacgauauuaagcgccugcucgacagccagggacggagagauaucaaacugauugacaucgcgcuguccaaggccgauucucgccgguucgaaaacgcugugugggaccaaugcaaagaucuuugucacaugcauacaggcguuguggucgagaagaagaaaagagggggcaaggaggaaaucacaccccacugcgcccucauggacuguauuauguaugaugccgcugugagcggaggccugaauaucccuguucugcgcgccgugcucccgcgggacauggucuuuagaaccuccagccccaaaguggugcugugaggacuaguaauaaggaaacuguaugaaugucugugggcaggaagugaagagauccuucuguaaagguuuuuggaauuaugucugcugaauaauaaacuuuuuugaaauaauaaaucugguagaaaaaugagaucucaaaggcucuuuucagagccaccaaaaaaaaaaaaaaaaaaaaaaaaaaaaaaaaaaaaaaaaaaaaaaaaaaaaaaaaaaaaaaaaagaauu

SEQ ID NO: 20159 - RNA, 2066 nt, Artificial Sequence
  mRNA product Design b-4 (hSL-A64-N5) comprising derived and/or modified sequence from LASV(LASV035-NIG-2009;Clade II)__AIT17589__SP-HsALB_NP(2-569) (opt5)
aggagagucccgcagucggcguccagcggcucugcuuguucgugugugugucguugcaggccuuauucaagcuuaccaugaagugggugaccuucaucagccugcucuuucuguucuccucugccuacagcagcgccuccaaggaggugaaaucuuuccuguggacccagagccucagacgggaacuguccggcuacugcucuagcaucaaacuucaagucguuaaagacgcucaggcccugcuccacgggcuggauuuuuccgaggugucuaacgugcagcgccuuaugagaaagcagaaacgggacgauagcgaccugaagcgccucagagaucugaaucaagcggucaacaaucugguggaacucaaguccacacagcagaaaagcauucugcggguuggaacgcuuaccucugacgaucugcucacacuggcugccgaccuugagaagcugaaauccaaggugauccgcaccgaaagaccccucagcucuggcgucuauauggggaaccuguccgcccagcaacuggagcagcggcgcgcucuccugaauaugauuggaauggugggcggggcccagggaacacagccuggcagagauggcguugugcgggucugggacgugaaaaacccggaucuucugaauaaccaauucgggaccaugcccagccucacacuggcuugucuuaccaagcagggacagguggaccugaaugaugccguccucgcgcugacggaccugggccucaucuacaccgccaaguauccuaacucuuccgaccuggaucgccuuagccaaucccaucccauucugaauaugguugacacaaagaagucuagccucaacaucuccggguacaauuuuagccugggagcugccgugaaagcuggcgccugcaugcuugaugggggaaacaugcuggagaccaucaaggugacaccucagaccauggacggcauucucaaaucuauccugaaggucaaaagaucccugggcauguucgugagcgauacgcccggggaacggaauccuuaugagaacauucucuacaagaucugucugucuggagacggcuggccguauauugcgagccgcacauccaucguugggagagccugggaaaacaccacaguggaucuugagucugacggaaagccccagaaagucggcaccaccgggagcaauaagucccugcagagcgcuggauuuccuacaggccucacguacucucaacugaugacccugaaagauuccaugaugcagcuugaccccagcgccaagacauggauugauaucgagggccggccugaagaccccguggagaucgcucucuaccagccgaugucugggugcuauauucacuucuuuagagaaccuaccgaccugaaacaguucaagcaagaugccaaguacucccauggaaucgacguugccgaucuguuucccgcucagccuggccucacaagcgcggugauugaggcccugccccgcaacaugguccuuaccugucagggguccgacgauaucaaaaagcugcucgacucucagggacggagagauauuaaacugaucgacaucgcucugagcaaggccgauucccgcaaauucgaaaaugccgugugggaccaaugcaaggaucuuugucacaugcauacgggcgucgugguugagaagaaaaagagagggggcaaagaggaaauuacaccccacugcgcucucauggacuguaucauguaugaugccgcggugucuggaggccugaacauuccuguccugcgggcugugcucccgcgcgacaugguuuuucggaccagcucccccaaggugguccugugaggacuaguaauaaggaaacuguaugaaugucugugggcaggaagugaagagauccuucuguaaagguuuuuggaauuaugucugcugaauaauaaacuuuuuugaaauaauaaaucugguagaaaaaugagaucucaaaggcucuuuucagagccaccaaaaaaaaaaaaaaaaaaaaaaaaaaaaaaaaaaaaaaaaaaaaaaaaaaaaaaaaaaaaaaaaagaauu

SEQ ID NO: 20160 - RNA, 2066 nt, Artificial Sequence
  mRNA product Design b-4 (hSL-A64-N5) comprising derived and/or modified sequence from LASV(LASV1000-NIG-2009;Clade II)__AIT17783__SP-HsALB_NP(2-569) (opt5)
aggagagucccgcagucggcguccagcggcucugcuuguucgugugugugucguugcaggccuuauucaagcuuaccaugaagugggugaccuucaucagccugcucuuucuguucuccucugccuacagcagcgccuccaaggaggugaaaucuuuccuguggacccagagccucagacgggaacuguccggcuacugcucuaacaucaaacuucaagucguuaaggacgcucaggcccugcuccacgggcuggauuuuagcgagguguccaaugugcagcgccuuaugagaaagcagaaacgggacgauucugaccugaagcgccucagagaucugaaccaagcggucaauaaccugguggaacucaagagcacacagcagaaauccauucugcggguuggaacgcuuaccagcgacgaucugcucacacuggcugccgaccuugagaagcugaaaucuaaggugauccgcaccgaaagaccccucuccagcggcgucuauauggggaaucugucuacacagcaacuggagcagcggcgcgcccuccugaacaugauuggaauggugggcggggcucagggaacccagccuggcagagauggcguugugcgggucugggacgugaaaaauccggaucuucugaacaaucaauucgggacaaugcccucccucacccuggccugucuuacgaagcagggacagguggaccugaacgaugucguucucgcucugaccgaccugggccucaucuacacagccaaguauccuaauagcucugaccuggaucgccuuucccaaagccaucccauucugaacaugguggacaccaaaaaguccucucucaauaucagcggguacaacuuuucccugggagcggccgugaaagcuggcgccugcaugcuugaugggggaaauaugcuggagacaaucaaggucaccccucagacgauggacggcauucucaaaagcauccugaaggugaaaaagucucugggcauguucguuuccgauacacccggggaaagaaacccuuaugagaacauucucuacaagaucugucugagcggagacggcuggccguauauugcuucucggaccagcaucguggggcgcgccugggaaaauacaaccgucgaucuugaguccgacggaaaaccccagaaggugggcaccgcggggucuaacaaaagccugcaguccgccggauuuccuacaggccucacguacagccaacugaugacccugaaggauucuaugaugcagcuugaccccuccgcuaaaacauggauugauaucgagggcagaccugaagaccccguugagaucgcccucuaccagccggugagcgggugcuauauucacuucuuucgggaaccuaccgaccugaagcaguucaagcaagaugcuaaauacucucauggaaucgacgucgccgaucuguuucccgcccagccuggccucacauccgcugugauugaggcgcugcccagaaauaugguccuuaccugucaggggagcgacgauaucaagcgccugcucgacucccagggacggagagauauuaaacugaucgacaucgcccugucuaaggcugauagccgccgguucgaaaacgccgugugggaccaaugcaaagaucuuugucacaugcauacgggcguuguggucgagaagaagaaaagagggggcaaggaggaaauuacaccccacugcgcccucauggacuguaucauguaugaugcugccguguccggaggccugaauauuccuguucugcgcgcggugcucccgcgggacauggucuuuagaaccucuagccccaaaguggugcugugaggacuaguaauaaggaaacuguaugaaugucugugggcaggaagugaagagauccuucuguaaagguuuuuggaauuaugucugcugaauaauaaacuuuuuugaaauaauaaaucugguagaaaaaugagaucucaaaggcucuuuucagagccaccaaaaaaaaaaaaaaaaaaaaaaaaaaaaaaaaaaaaaaaaaaaaaaaaaaaaaaaaaaaaaaaaagaauu

SEQ ID NO: 20161 - RNA, 2066 nt, Artificial Sequence
  mRNA product Design b-4 (hSL-A64-N5) comprising derived and/or modified sequence from LASV(LASV221-NIG-2010;Clade II)__AIT17625__SP-HsALB_NP(2-569) (opt5)
aggagagucccgcagucggcguccagcggcucugcuuguucgugugugugucguugcaggccuuauucaagcuuaccaugaagugggugaccuucaucagccugcucuuucuguucuccucugccuacagcagcgccuccaaggaggugaaaucuuuccuguggacccagagccucagacgggaacuguccggcuacugcucuagcaucaaacuucaagucguuaaggacgcucaggcccugcuccacgggcuggauuuuuccgaggugucuaacgugcagcgccuuaugagaaagcagcggcgcgacgauagcgaccugaaaagacuccgggaucugaaucaagcggucaacaaucugguggaacucaaguccacacagcaaaagagcauucugcgcguuggaacgcuuaccucugacgaucugcucacacuggcugccgaccuugagaaacugaaguccaaagugaucagaaccgaacggccccucagcucuggcgucuauauggggaaccuguccacacagcagcuggagcagcgcagagcccuccugaauaugauuggaauggugggcggggcucagggaacccagccuggccgggauggcguugugcgcgucugggacgugaagaacccggaucuucugaauaaccaauucgggacaaugcccagccucacccuggccugucuuacgaaacagggacagguggaccugaaugaugcuguccucgcccugaccgaccugggccucaucuacacagcgaaguauccuaacucuuccgaccuggauagacuuagccaaucccaucccauucugaauaugguugacaccaagaaaucuagccucaacaucuccggguacaauuuuagccugggagccgcugugaaggccggcgcuugcaugcuugaugggggaaacaugcuggagacaaucaaagugaccccucagacggucgacggcauucucaagucuauccugaaagugaagcggucccugggcauguucguuagcgauacacccggggaacgcaauccuuaugagaacauucucuacaaaaucugucugucuggagacggcuggccguauauugccagcagaaccuccaucguggggcgggcgugggaaaacacaaccgucgaucuugagucugacggaaagccccagaaggugggcaccgccgggagcaauaaaucccugcagagcgcuggauuuccuacaggccucacguacucucaacugaugacccugaaggauuccaugaugcagcuugaccccagcgccaaaacauggauugauaucgagggcagaccugaagaccccguugagaucgcucucuaccagccgaugucugggugcuauauucacuucuuucgcgaaccuaccgaccugaagcaguucaaacaagaugccaaguacucccauggaaucgacguggccgaucuguuucccgcucagccuggccucacaagcgcggucauugaggcccugccccggaacauggugcuuaccugucagggguccgacgauaucaagagacugcucgacucucagggacgccgggauauuaaacugaucgacaucgcucugagcaaggccgauuccagaaaauucgaaaaugccgucugggaccaaugcaaggaucuuugucacaugcauacgggcgugguuguggagaaaaagaagcgcgggggcaaagaggaaauuacaccccacugcgcucucauggacuguaucauguaugaugccgcggucucuggaggccugaacauuccugugcugcgggcuguucucccgagagacaugguguuucgcaccagcucccccaaggucgugcugugaggacuaguaauaaggaaacuguaugaaugucugugggcaggaagugaagagauccuucuguaaagguuuuuggaauuaugucugcugaauaauaaacuuuuuugaaauaauaaaucugguagaaaaaugagaucucaaaggcucuuuucagagccaccaaaaaaaaaaaaaaaaaaaaaaaaaaaaaaaaaaaaaaaaaaaaaaaaaaaaaaaaaaaaaaaaagaauu

SEQ ID NO: 20162 - RNA, 2066 nt, Artificial Sequence
  mRNA product Design b-4 (hSL-A64-N5) comprising derived and/or modified sequence from LASV(LASV237-NIG-2010;Clade II)__AIT17639__SP-HsALB_NP(2-569) (opt5)
aggagagucccgcagucggcguccagcggcucugcuuguucgugugugugucguugcaggccuuauucaagcuuaccaugaagugggugaccuucaucagccugcucuuucuguucuccucugccuacagcagcgccuccaaggaggugaaaucuuuccuguggacccagagccucagacgggaacuguccggcuacugcucuaacaucaaacuucaagucguuaaggacgcucaggcccugcuccacgggcuggauuuuagcgagguguccaaugugcagcgccuuaugagaaagcagaaacgggacgauucugaccugaagcgccucagagaucugaaccaagcggucaauaaccugguggaacucaagagcacacagcagaaauccauucugcggguuggaacgcuuaccagcgacgaucugcucacacuggcugccgaccuugagaagcugaaaucuaaggugauccgcaccgaaagaccccucuccagcggcgucuauauggggaaucugucuacacagcaacuggagcagcggcgcgcccuccugaacaugauuggaauggugggcggggcucagggaacccagccuggcagagauggcguugugcgggucugggacgugaaaaauccggaucuucugaacaaucaauucgggacaaugcccucccucacccuggccugucuuacgaagcagggacagguggaccugaacgaugcuguccucgcccugaccgaccugggccucaucuacacagcgaaguauccuaauagcucugaccuggaucgccuuucccaaagccaucccauucugaacaugguugacaucaaaaaguccucucucaauaucagcggguacaacuuuucccugggagccgcugugaaagccggcgcuugcaugcuugaugggggaaauaugcuggagaccauuaaggugacaccucagaccauggacggcauccucaaaagcauucugaaggucaaaagaucucugggcauguucguguccgauacgcccggggaacggaacccuuaugagaacauccucuacaagauuugucugagcggagacggcuggccguauaucgccucucgcacaagcauuguugggagagcgugggaaaauaccacaguggaucuugaguccgacggaaagccccagaaagucggcucugccgggagcaacaagucccugcagagcgcuggauuuccuaccggccucaccuacucucaacugaugacacugaaagauuccaugaugcagcuugaccccagcgccaagacguggaucgauaucgagggccggccugaagaccccguggagauugcucucuaccagccgaugucugggugcuauauccacuucuuuagagaaccuaccgaccugaaacaguucaagcaagaugccaaguacucccauggaauugacguugccgaucuguuucccgcucagccuggccucacaagcgcggugaucgaggcccugccccgcaauaugguccuuaccugucagggguccgacgauauuaaacggcugcucgacucucagggaagacgcgauaucaagcugaucgacauugcucugagcaaagccgauucccggagauucgaaaacgccgugugggaccaaugcaaggaucuuugucacaugcauacaggcgucgugguugagaaaaagaagcgcgggggcaaagaggaaaucacgccccacugcgcucucauggacuguauuauguaugaugccgcggugucuggaggccugaauaucccuguccugcgggcugugcucccgagagacaugguuuuucgcaccagcucccccaaggugguccugugaggacuaguaauaaggaaacuguaugaaugucugugggcaggaagugaagagauccuucuguaaagguuuuuggaauuaugucugcugaauaauaaacuuuuuugaaauaauaaaucugguagaaaaaugagaucucaaaggcucuuuucagagccaccaaaaaaaaaaaaaaaaaaaaaaaaaaaaaaaaaaaaaaaaaaaaaaaaaaaaaaaaaaaaaaaaagaauu

SEQ ID NO: 20163 - RNA, 2066 nt, Artificial Sequence
  mRNA product Design b-4 (hSL-A64-N5) comprising derived and/or modified sequence from LASV(LASV253-NIG-2011;Clade II)__AIT17671__SP-HsALB_NP(2-569) (opt5)
aggagagucccgcagucggcguccagcggcucugcuuguucgugugugugucguugcaggccuuauucaagcuuaccaugaagugggugaccuucaucagccugcucuuucuguucuccucugccuacagcagcgccuccaaggaggugaaaucuuuccuguggacccagagccucagacgggaacuguccggcuacugcucuagcaucaaacuucaagucguuaaggacgcucaggcccugcuccacgggcuggauuuuuccgaggugucuaacgugcagcgccuuaugagaaagcagaaacgggacgauagcgaccugaagcgccucagagaucugaaucaagcggucaacaaucugguggaacucaaguccacccagcagaaaagcguucugcgggugggaacgcuuaccucugacgaucugcucacacuggcugccgaccuugagaagcugaaauccaaggucauucgcaccgaaagaccccucagcucuggcguguauauggggaaccuguccacacagcaacuggagcagcggcgcgcccuccugaauaugaucggaaugguuggcggggcucagggaacccagccuggcagagauggcgugguccgggugugggacgugaaaaacccggaucuucugaauaaccaauucgggacaaugcccagccucacccuggccugucuuacgaagcagggacaggucgaccugaaugauguugugcucgcucugaccgaccugggccucauuuacacagccaaguauccuaacucuuccgaccuggaucgccuuagccaaucccaucccauccugaauaugguggacaccaaaaagucuagccucaacauuuccggguacaauuuuagccugggagcggccgucaaagcuggcgccugcaugcuugaugggggaaacaugcuggagacaaucaaggugaccccucagacgauggacggcauccucaaaucuauucugaagguuaaaaagucccugggcauguucgugagcgauacacccggggaaagaaauccuuaugagaacauccucuacaagauuugucugucuggagacggcuggccguauaucgcuagccggaccuccauugucgggcgcgccugggaaaacacaaccguggaucuugagucugacggaaaaccccagaagguuggcaccgcggggagcaauaaaucccugcagagcgccggauuuccuacaggccucacguacucucaacugaugacccugaaggauuccaugaugcagcuugaccccagcgcuaaaacauggaucgauauugagggcagaccugaagaccccguggagaucgcccucuaccagccgaugucugggugcuauauccacuucuuucgggaaccuaccgaccugaagcaguucaagcaagaugcuaaauacucccauggaauugacgucacagaucuguuucccgcccagccuggccucaccagcgccgugaucgaggcucugcccagaaacaugguccuuacgugucagggguccgacgauauuaagcgccugcucgacucucagggacggagagauaucaaacugauugacaucgcgcugagcaaggccgauucccgccgguucgaaaaugcugugugggaccaaugcaaagaucuuugucacaugcauacaggcguuguggucgagaagaagaaaagagggggcaaggaggaaaucacaccccacugcgcccucauggacuguauuauguaugaugccgcugugucuggaggccugaacaucccuguucugcgcgccgugcucccgcgggacauggucuuuagaaccagcucccccaaaguggugcugugaggacuaguaauaaggaaacuguaugaaugucugugggcaggaagugaagagauccuucuguaaagguuuuuggaauuaugucugcugaauaauaaacuuuuuugaaauaauaaaucugguagaaaaaugagaucucaaaggcucuuuucagagccaccaaaaaaaaaaaaaaaaaaaaaaaaaaaaaaaaaaaaaaaaaaaaaaaaaaaaaaaaaaaaaaaaagaauu

SEQ ID NO: 20164 - RNA, 2066 nt, Artificial Sequence
  mRNA product Design b-4 (hSL-A64-N5) comprising derived and/or modified sequence from LASV(LASV254-NIG-2011;Clade II)__AIT17675__SP-HsALB_NP(2-569) (opt5)
aggagagucccgcagucggcguccagcggcucugcuuguucgugugugugucguugcaggccuuauucaagcuuaccaugaagugggugaccuucaucagccugcucuuucuguucuccucugccuacagcagcgccuccaaggaggugaaaucuuuccuguggacccagagccucagacgggaacuguccggcuacugcucuagcaucaaacuucaagucguuaaggacgcucaggcccugcuccacgggcuggauuuuuccgaggugucuaacgugcagcgccuuaugagaaagcagaaacgggacgauagcgaccugaagcgccucagagaucugaaucaagcggucaacaaucugguggaacucaaguccacacagcagaaaagcguucugcgggugggaacgcuuaccucugacgaucugcucacacuggcugccgaccuugagaagcugaaauccaaggucauucgcaccgaaagaccccucagcucuggcguguauauggggaaccuguccacacagcaacuggagcagcggcgcgcccuccugaauaugaucggaaugguuggcggggcucagggaacccagccuggcagagauggcgugguccgggugugggacgugaaaaacccggaucuucugaauaaccaauucgggacaaugcccagccucacccuggccugucuuacgaagcagggacaggucgaccugaaugaugcuguucucgcccugaccgaccugggccucauuuacacagcgaaguauccuaacucuuccgaccuggaucgccuuagccaaucccaucccauccugaauaugguggacaccaaaaagucuagccucaacauuuccggguacaauuuuagccugggagccgcugugaaagccggcgcuugcaugcuugaugggggaaacaugcuggagacaaucaaggucaccccucagacgauggacggcauccucaaaucuauucugaaggugaaaaagucccugggcauguucguuagcgauacacccggggaaagaaauccuuaugagaacauccucuacaagauuugucugucuggagacggcuggccguauaucgccagccggaccuccauuguggggcgcgcgugggaaaacacaaucgucgaucuugagucugacggaaaaccccagaaggugggcaccgccgggagcaauaaaucccugcagagcgcuggauuuccuaccggccucacauacucucaacugaugacgcugaaggauuccaugaugcagcuugaccccagcgccaaaaccuggauugauaucgagggcagaccugaagaccccguugagaucgcucucuaccagccgaugucugggugcuauauucacuucuuucgggaaccuacagaccugaagcaguucaagcaagaugccaaauacucccauggaaucgacguggccgaucuguuucccgcucagccuggccucaccagcgcggucauugaggcccugcccagaaacauggugcuuacaugucagggguccgacgauaucaagcgccugcucgacucucagggacggagagauauuaaacugaucgacaucgcucugagcaaggccgauucccgccgguucgaaaaugccgucugggaccaaugcaaagaucuuugucacaugcauaccggcgugguuguggagaagaagaaaagagggggcaaggaggaaauuacgccccacugcgcucucauggacuguaucauguaugaugccgcggucucuggaggccugaacauuccugugcugcgcgcuguucucccgcgggacaugguguuuagaacaagcucccccaaagucgugcugugaggacuaguaauaaggaaacuguaugaaugucugugggcaggaagugaagagauccuucuguaaagguuuuuggaauuaugucugcugaauaauaaacuuuuuugaaauaauaaaucugguagaaaaaugagaucucaaaggcucuuuucagagccaccaaaaaaaaaaaaaaaaaaaaaaaaaaaaaaaaaaaaaaaaaaaaaaaaaaaaaaaaaaaaaaaaagaauu

SEQ ID NO: 20165 - RNA, 2066 nt, Artificial Sequence
  mRNA product Design b-4 (hSL-A64-N5) comprising derived and/or modified sequence from LASV(Nig08-04;Clade II)__ADU56611__SP-HsALB_NP(2-569) (opt5)
aggagagucccgcagucggcguccagcggcucugcuuguucgugugugugucguugcaggccuuauucaagcuuaccaugaagugggugaccuucaucagccugcucuuucuguucuccucugccuacagcagcgccuccaaggaggugaaaucuuuccuguggacccagagccucagacgggaacuguccggcuacugcucuaacaucaaacuucaagucguuaaggacgcucaggcccugcuccacgggcuggauuuuagcgagguguccaaugugcagcgccuuaugagaaagcagaaacgggacgauggagaccugaagcgccucagagaucugaaccaagcggucaauaaccugguggaacucaagucuacccagcagaaaagcguucugcgggugggcacgcuuaccuccgacgaucugcucacacuggcugccgaccuugagaagcugaaaagcaaggucauucgcaccgaaagaccccucucuuccgggguguauaugggaaaucugagcacacagcaacuggagcagcggaaagcccuccugucuaugaucggcaugguugggggagcucagggcacccagccuggccgcgaugggguggucagagugugggacgugaagaacccggaucuucugaauaaccaauucggaacaaugcccucccucacccuggccugucuuacgaagcagggccaggucgaccugaaugaugcuguucucgcccugaccgaccuggggcucauuuacacagcgaaauauccuaacagcucugaccuggaucggcuuucccaaagccaucccauccugaauaugguggacaccaagaaauccucucucaacauuagcggauacaauuuuucccugggcgccgcugugaaggccggggcuugcaugcuugauggaggcaacaugcuggagacaaucaaagucaccccucagacgauggacggcauccucaagagcauucugaaagugaagcgcucucuggggauguucguuuccgauacacccggagaaagaaauccuuaugagaacauccucuacaagauuugucugagcggcgacggguggccguauaucgccucucggaccagcauugugggacgcgcgugggaaaacacaaccgucgaucuugaguccgacggcaaaccccagaagguggggaccgccggaucuaauaaaagccugcaguccgcuggcuuuccuacaggccucacguacagccaacugaugacccugaaggauucuaugaugcagcuugaccccuccgccaaaacauggaucgauauugaggggagaccugaagaccccguugagaucgcucucuaccagccgaugagcggaugcuauauccacuucuuucgggaaccuaccgaccugaagcaguucaagcaagaugccaaauacucucauggcauugacgugacagaucuguuuuccgcccagcccgggcucaccagcgcugucaucgaggcgcugccuagaaacauggugcuuacgugucagggauccgacgauauuaagaaacugcucgacucucagggccgccgggauaucaagcugauugacaucagccugaauaaagccgauuccagacgcuucgaaaacgcugucugggaccaaugcaaggaucuuugucacaugcauacaggggugguuguggagaagaaaaagcggggcggaaaagaggaaaucacaccccacugcgcccucauggacuguauuauguuugaugccgcugucucuggcgggcugaauauccccauucugagagccgugcucccucgcgacaugguuuuccggaccagcuccccgaaggugguccugugaggacuaguaauaaggaaacuguaugaaugucugugggcaggaagugaagagauccuucuguaaagguuuuuggaauuaugucugcugaauaauaaacuuuuuugaaauaauaaaucugguagaaaaaugagaucucaaaggcucuuuucagagccaccaaaaaaaaaaaaaaaaaaaaaaaaaaaaaaaaaaaaaaaaaaaaaaaaaaaaaaaaaaaaaaaaagaauu

SEQ ID NO: 20166 - RNA, 2069 nt, Artificial Sequence
  mRNA product Design b-4 (hSL-A64-N5) comprising derived and/or modified sequence from LASV(GA391;Clade III)__AAA46284__SP-HsALB_NP(2-570) (opt5)
aggagagucccgcagucggcguccagcggcucugcuuguucgugugugugucguugcaggccuuauucaagcuuaccaugaagugggugaccuucaucagccugcucuuucuguucuccucugccuacagcagcgccuccaaggaggugagaucuugccuguggacccagagccuccggcgcgaacuguccggcuacuguucuaacaucaaacuucaagucguuaaggacgcucaggcccugcuccacgggcuggauuucagcgagguguccaaugugcagagacuuaugcggaaacagaagcgcgacgauggagaccugaaaagacuccgggaucugaaccaagcggucaauaaccugguggaacucaagucuacacagcagaaaagcguucugcgcgugggcacgcuuuccagcgacgaucugcucauucuggcugccgaccuugagaaacugaagucuaaagucaccagaacagaacggccccucuccagcgggguguauaugggaaaucugucuucccagcaacuggaucagcgcagagcccuccugaacaugaucggcaugaccgggguuagcggaggcggcaagggggcuucuaauggaauugugcgggucugggacgugaaaaacgccgagcuucugaauaaccaguuuggcacaaugccuucccucacccuggcuugccuuacaaagcaggggcaaguggaucugaaugacgccguccaggcgcucaccgaucugggacugaucuacacggccaaguauccgaacagcuccgaccucgaccgccugucucagagccaucccauucuuaauaugaucgauaccaaaaaguccagccugaacaucucuggcuacaauuucucccucggggcugccguuaaagcuggagccuguaugcuggacggcggcaacaugcuugagacaauuaaggugagcccucaaaccauggaugggauccugaaaucuauucucaaggugaaaaagagccugggaauguuugucuccgacacacccggcgaaagaaacccuuaugagaauauccuguacaagauuugccucucuggggauggauggagcuauaucgcgucccggaccagcauugugggccgcgccugggaaaacacgguuguggaccuggagcaggauaauaaaccccagaagaucgggaacggaggcucuaauaaaucccuucagagcgcuggcuucgccgcugggcugaucuacucucaacucaugacacugaaggacuuuaaauguuucaaccugauuccuaaugccaagaccuggauggauaucgagggaagaccggaagaccccgucgagauugcccuuuaccagccuuccagcggcugcuaugugcacuuuuuccgggaacccacagaucucaagcaguuuaaacaggacgcuaaguacucccaugggagagacguuaccgaucuguucgcggcccaaccuggacugaccucugcugugaucgaggcccucccccgcaacauggucauuacaugucagggcagcgaagacauccggaaacugcuugagucccaggggagacgcgauaucaagcugauugacaucacgcucucuaaagccgauagccggaaguuugagaaugcugugugggaccaguucaaggaucugugccacaugcauaccggcgucgugguugaaaagaagaaaagaggaggcaaggaggaaauuacaccgcacugugcccugauggacugcaucauguuugaugcggcuguguccgggggacuugacgccaaaguccuccgcgugguucugccucgggauaugguguucagaaccagcacacccaaggucgugcugugaggacuaguaauaaggaaacuguaugaaugucugugggcaggaagugaagagauccuucuguaaagguuuuuggaauuaugucugcugaauaauaaacuuuuuugaaauaauaaaucugguagaaaaaugagaucucaaaggcucuuuucagagccaccaaaaaaaaaaaaaaaaaaaaaaaaaaaaaaaaaaaaaaaaaaaaaaaaaaaaaaaaaaaaaaaaagaauu

SEQ ID NO: 20167 - RNA, 2066 nt, Artificial Sequence
  mRNA product Design b-4 (hSL-A64-N5) comprising derived and/or modified sequence from LASV(Nig08-A19;Clade III)__ADU56619__SP-HsALB_NP(2-569) (opt5)
aggagagucccgcagucggcguccagcggcucugcuuguucgugugugugucguugcaggccuuauucaagcuuaccaugaagugggugaccuucaucagccugcucuuucuguucuccucugccuacagcagcgccuccaaggaggugaaaucuuuccuguggacccagagccucagacgggaacuguccggcuacugcucuaacaucaaacuucaagucguuaaggacgcucaggcccugcuccacgggcuggauuuuagcgagguguccaaugugcagcgccuuaugagaaagcagaaacgggacgauggagaccugaagcgccucagagaucugaaccaagcggucaauaaccugguggaacucaagucuacacagcagaaaagcguucugcgggugggcacgcuuuccagcgacgaucugcucguccuggcugccgaccuugagaagcugaaaucuaaggugguucgcaccgaaagaccccucuccagcgggauuuauaugggaaaucugucuucccagcaacuggaucagcggaaagcccuccugaacaugaucggcaugacagggggaaauggcggccgcaacaccacaagcgacgggauugugagagucugggaugugaagaaugcugagcuucugaacaaucaguucggaaccaugccuucucucacacuggccugucuuaccaagcagggccaaguggaccugaacgaugcuguccaggcccucacggaccuggggcugaucuacaccgcgaaauaucccaauuccagcgaccucgaucggcuggcccagucccauccgauucuuaacaugaucgacacaaagaaaucuagccugaauaucuccggauacaacuuuagccucggcgcugccguuaaggcuggggccugcaugcuggauggaggcaacaugcuugagaccauuaaagugucuccucaaacaauggacggcauccugaaguccauucucaaagugaagcgcagccuggggauguucaucucugauacccccggagaaagaaauccuuaugagaacauucuguacaagaucugucucagcggcgacggguggcccuauauugcgucccggacgucuaucgucggacgcgccugggaaaauacagugguugaucuggagagcgacaacaaaccucagaagaccggcaaugggggauccaacaaaagccuucagucugcuggcuuugccgcuggccugacauacucccagcucaugacccugaaggauagcaugcugcaacuugacccgaaugccaaaaccuggauggauaucgaggggagacccgaagacccuguggagauugcccucuaccagcccucuuccggaugcuauauccacuucuuucgggaaccuacagaccugaagcaguucaagcaggaugcuaaauacagccauggcauugacgucacggaucuguuugcggcccaacccgggcucaccuccgcugugaucgaggcccugccgagaaacaugguuauuacaugucagggaucugaagacauccgcaaacuucuggagagccagggccggagagauaucaagcucauugacaucucccugucuaagguggauagccgcaaauucgagaaugccgucugggaccaguuuaaggaucugugccacaugcauaccgggauuguggucgaaaagaaaaagcggggcggaaaagaggaaaucacaccucacugugcucuuauggacugcauuauguucgaugccgcgguguccggcgggguugacgcuaaggugcucagagccguccugccccgcgauaugguguuucggaccagcacgccuaaaguugugcugugaggacuaguaauaaggaaacuguaugaaugucugugggcaggaagugaagagauccuucuguaaagguuuuuggaauuaugucugcugaauaauaaacuuuuuugaaauaauaaaucugguagaaaaaugagaucucaaaggcucuuuucagagccaccaaaaaaaaaaaaaaaaaaaaaaaaaaaaaaaaaaaaaaaaaaaaaaaaaaaaaaaaaaaaaaaaagaauu

SEQ ID NO: 20168 - RNA, 2066 nt, Artificial Sequence
  mRNA product Design b-4 (hSL-A64-N5) comprising derived and/or modified sequence from LASV(G1180-SLE-2010;Clade IV)__AIT17169__SP-HsALB_NP(2-569) (opt5)
aggagagucccgcagucggcguccagcggcucugcuuguucgugugugugucguugcaggccuuauucaagcuuaccaugaagugggugaccuucaucagccugcucuuucuguucuccucugccuacagcagcgccuccaaggagaucaaaucuuuccuguggacccagagccucagacgggaacuguccggcuacugcucuaacauuaagcugcaaguggucaaagacgcucaggcccugcuccacgggcuggauuuuagcgagguuuccaaugugcagcgccuuaugagaaaggaacggcgcgacgauaacgaccugaaaagacuccgggaucugaaucaggcggugaacaaucuggucgagcucaagucuacacaacaaaagagcauccugcgcgugggaacgcuuaccuccgacgaucugcucauucuggcugccgaccuugaaaaacuuaagagcaaaguuaucagaacagagcggccccucucugccggcguguauauggggaaccuguccagccagcagcuggaucagcgcagagcucuccugucuaugauuggaauguccagcggcaaucagcgggcccaggcugggcgcgacggagucgugagaguuugggaugugaagaacgucgagcuucugaauaaccaguucggcaccaugccuucucucacacuggccugucuuaccaaacaaggccagguggaccugaaugaugcggugcaggcccucacagaccuggggcugaucuacaccgcuaaguauccgaacacguccgaccucgaucggcugacccaaagccaucccauccuuaauaugauugacacaaagaaauccucucugaacaucagcggauacaauuuuucccucggcgccgcugucaaggccggggcgugcaugcuggauggaggcaacaugcuugaaaccauuaaaguuagcccucagacaauggacgggauccugaagucuauucucaaagugaagaaagcccugggaauguucaucuccgauacccccggcgagcgcaacccuuaugaaaauauucuguacaagaucugucucagcggcgacggguggcccuauaucgcuucuagaacgagcauuacaggacgggccugggagaacaccguggucgaucuggaguccgacggcaagccucagaaagcugggucuaauaacagcaauaagucccuucagagcgugggauuuacagccggccugaccuacucucaacucaugacccugaaagaugccaugcugcagcuugacccgaacgcuaagacauggauggauaucgaagggagacccgaggacccuguugaaauugcgcucuaccagcccuccagcggaugcuauauccacuucuuucgcgagccuacggaccugaaacaguucaagcaagaugccaaguacucucauggcauugacgugaccgaucuguuugcugcccagcccggccucacauccgccgucaucgacgcucugccgcggaauauggugaucaccugucaggggagcgaugacauuagaaaacuucuggaaucccagggacgcaaggauaucaaacucauugacaucgcccugucuaagacagauagccggaaauaugagaacgcgguuugggaccaauacaaggaucugugccacaugcauaccggcguggucguggagaagaaaaagagagggggaaaagaagagauuacgccucacugugcucuuauggacugcaucauguucgaugccgccgucuccggcgggcucaauacaucugugcugcgcgcuguucugccccgggacaugguguuuagaaccagcaccccucgcgucgugcucugaggacuaguaauaaggaaacuguaugaaugucugugggcaggaagugaagagauccuucuguaaagguuuuuggaauuaugucugcugaauaauaaacuuuuuugaaauaauaaaucugguagaaaaaugagaucucaaaggcucuuuucagagccaccaaaaaaaaaaaaaaaaaaaaaaaaaaaaaaaaaaaaaaaaaaaaaaaaaaaaaaaaaaaaaaaaagaauu

SEQ ID NO: 20169 - RNA, 2066 nt, Artificial Sequence
  mRNA product Design b-4 (hSL-A64-N5) comprising derived and/or modified sequence from LASV(G1442-SLE-2011;Clade IV)__AIT17181__SP-HsALB_NP(2-569) (opt5)
aggagagucccgcagucggcguccagcggcucugcuuguucgugugugugucguugcaggccuuauucaagcuuaccaugaagugggugaccuucaucagccugcucuuucuguucuccucugccuacagcagcgccuccaaggaggugaaaucuuuccuguggacccagagccucagacgggaacuguccggcuacugcucuaacaucaaacuucaagucguuaaggacgcucaggcccugcuccacgggcuggauuuuagcgagguguccaaugugcagcgccuuaugagaaagcagcggcgcgacgauaacgaccugaaaagacuccgggaucugaaucaagcggucaacaaucugguggaacucaagucuacacagcaaaagagcguucugcgcgugggaacgcuuaccuccgacgaucugcucguccuggcugccgaccuugagaaacuuaagagcaaagugauuagaacagaacggccccucucugccggcguuuauauggggaaccuguccagccagcagcuggaucagcgcagagcucuccugaauaugaucggaaugucuggcgggauucagggaacccggacaggccgcgacggcguggucagagugugggaugugaagaacgccgaccuucugaauaaccaguucgggaccaugccuucccucacacuggcuugucuuaccaaacaaggacaggucgaucugaaugacguugugcaggcccucacggaccugggccugaucuacaccgcgaaguauccgaacgccagcgaucucgaccggcugacacaaucucaucccauucuuaauaugaucgauaccaagaaauccagccugaacaucuccggguacaauuuuucucucggagcugccgugaaggcuggcgccugcaugcuggacgggggaaacaugcuugagacaauuaaagucagcccucagaccauggauggcauccugaaguccauucucaaagugaagaaaacgcugggcauguucaucagcgacacacccggggagcgcaacccuuaugaaaauauucuguacaagaucugucucucuggagauggcuggcccuauauugcguccagaaccagcaucacagggcgggccugggagaacaccguuguggaccuggaaucugauggaaagccucagaaagcuggcagcaauaacuccaauaagucucuucagagcgccggguuugcugccggacugaccuacucccaacucaugacacugaaagacgccaugcugcagcuugauccgaacgcuaagacguggauggacaucgagggcagacccgaggacccugucgaaauugcgcucuaccagcccagcucuggcugcuauauccacuucuuucgcgagccuaccgaucugaaacaguucaagcaagacgccaaguacucccaugggauugaugugacagaccuguuugcugcccagcccggacucaccagcgccguuaucgaagcucugccgcggaauauggugauuacaugucagggcucugaugacaucaaaaagcugcuggagucccaggggagaaaagauaucaagcucauugacaucgcccugagcaaaaccgauucccgcaaguaugaaaacgcggucugggaccaauacaaggaucugugccacaugcauacgggaguggucguggagaaaaagaaacggggcgggaaggaggaaauuacaccucacugugcucuuauggacugcaucauguucgaugccgccguuucuggcggacucaauacccuggugcugagagcuguccucccccgcgacaugguguuucggaccagcacaccuagaguugugcugugaggacuaguaauaaggaaacuguaugaaugucugugggcaggaagugaagagauccuucuguaaagguuuuuggaauuaugucugcugaauaauaaacuuuuuugaaauaauaaaucugguagaaaaaugagaucucaaaggcucuuuucagagccaccaaaaaaaaaaaaaaaaaaaaaaaaaaaaaaaaaaaaaaaaaaaaaaaaaaaaaaaaaaaaaaaaagaauu

SEQ ID NO: 20170 - RNA, 2066 nt, Artificial Sequence
  mRNA product Design b-4 (hSL-A64-N5) comprising derived and/or modified sequence from LASV(G3010-SLE-2013;Clade IV)__AIT17345__SP-HsALB_NP(2-569) (opt5)
aggagagucccgcagucggcguccagcggcucugcuuguucgugugugugucguugcaggccuuauucaagcuuaccaugaagugggugaccuucaucagccugcucuuucuguucuccucugccuacagcagcgccuccaaggagaucaaaucuuuccuguggacccagagccucagacgggaacuguccggcuacugcucuaacauuaaacuucaaguggucaaagacgcucaggcccugcuccacgggcuggauuuuagcgagguuuccaaugugcagcgccuuaugagaaaggaacggcgcgacgauaacgaccugaaaagacuccgggaucugaaucaggcggugaacaaucuggucgagcucaagucuacacaacaaaagagcauccugcgcgugggaacgcuuaccuccgacgaucugcucauucuggcugccgaccuugaaaaacuuaagagcaaaguuacaagaaccgagcggccccucucugccggcguguauauggggaaccuguccagccagcagcuggaucagcgcagagcucuccugucuaugaucggaauguccagcggcguccagggggcccgggcuggacgcgacggcgugguuagagugugggaugucaagaaugccgagcuucugaacaaucaguucggcacaaugccuucucucacccuggcgugucuuacaaaacaggggcaaguggaccugaacgaugugguccaggcccucaccgaccugggacugauuuacacggcuaaguauccgaauaccuccgaccucgaucggcugacacagagccaucccauccuuaacaugaucgacaccaagaaauccucucugaauauuagcggcuacaacuuuucccucggggccgcuguuaaggccggagcgugcaugcuggauggcgggaauaugcuugaaacaaucaaagugagcccucaaaccauggacggcauucugaagucuauccucaaagugaagaaagcccugggaauguucauuuccgagacgcccggcgaacgcaacccuuaugagaacauccuguacaagauuugucucagcggggauggauggcccuauaucgcuucuagaacaagcaucaccggccgggccugggagaauacagucguggaccuggaauccgaugggaagccucagaaagcuggaucuaacaauagcaacaagucccuucagagcgccggcuuuaccgccgggcugaccuacucucagcucaugacacugaaagacgcuaugcugcaacuugauccgaaugcgaagacguggauggacauugagggaagacccgaagauccuguugagguggcccucuaccagcccuccagcggcugcuauauccacuucuuucgcgaaccuaccgaccugaaacaguucaagcaggacgcuaaguacucucauggcauugaugucacagaccuguuugccgcccaacccgggcucaccuccgcugugaucgaugcccugccgcggaacaugguuauuacaugucagggaagcgacgauaucaaaaagcugcuggagucccagggcagaaaagacaucaagcucauugauaucgcgcugucuaaaaccgacagccgcaaguaugagaaugcugugugggaucaguacaaggaccugugccacaugcauacgggggucguggucgaaaagaagaaacggggaggcaaggaggaaauuacaccucacugugcccuuauggauugcaucauguucgacgccgcuguguccgggggccucaacaccucuguucugagagccgugcugccccgcgauauggucuuucggaccagcacaccuagagugguucucugaggacuaguaauaaggaaacuguaugaaugucugugggcaggaagugaagagauccuucuguaaagguuuuuggaauuaugucugcugaauaauaaacuuuuuugaaauaauaaaucugguagaaaaaugagaucucaaaggcucuuuucagagccaccaaaaaaaaaaaaaaaaaaaaaaaaaaaaaaaaaaaaaaaaaaaaaaaaaaaaaaaaaaaaaaaaagaauu

SEQ ID NO: 20171 - RNA, 2066 nt, Artificial Sequence
  mRNA product Design b-4 (hSL-A64-N5) comprising derived and/or modified sequence from LASV(G502-SLE-2009;Clade IV)__AIT17127__SP-HsALB_NP(2-569) (opt5)
aggagagucccgcagucggcguccagcggcucugcuuguucgugugugugucguugcaggccuuauucaagcuuaccaugaagugggugaccuucaucagccugcucuuucuguucuccucugccuacagcagcgccuccaaggagaucaaaucuuuccuguggacccagagccucagacgggaacuguccggcuacugcucuaacauuaagcugcaaguggucaaagacgcucaggcccugcuccacgggcuggauuuuagcgagguuuccaaugugcagcgccuuaugagaaaggaacggcgcgacgauaacgaccugaaaagacuccgggaucugaaucaggcggugaacaaucuggucgagcucaagucuacacaacaaaagagcauccugcgcgugggaacgcuuaccuccgacgaucugcucauucuggcugccgaccuugaaaaacuuaagagcaaaguuaucagaacagagcggccccucucugccggcguguauauggggaaccuguccagccagcagcuggaucagcgcagagcucuccugucuaugauuggaauguccggcgggaaucagggaguccgggccggcaaggacggcgugguucgcgugugggaugucaaaaacgcugagcuucugaauaaccaguucgggaccaugccuagccucacacuggccugucuuaccaagcagggacaaguggaccugaaugaugcggugcaggcccucacagaccugggccugaucuacaccgcuaaguauccgaacacgucugaccucgauagacugacccagucccaucccauccuuaauaugauugacaccaaaaagagcucccugaacaucucuggguacaauuuuagccucggagccgcugucaaagccggcgcgugcaugcuggaugggggaaacaugcuugaaacaauuaagguuuccccucaaacaauggacggcauccugaaaagcauucucaaggugaaaaaggcccugggcauguucaucucugauacccccggggagcggaacccuuaugaaaauauucuguacaagaucugucucuccggagacggcuggcccuauaucgcuagccgcacgucuauuacagggagagccugggagaacaccguggucgaucuggagagcgacggaaaaccucagaaggcuggcuccaauaacucuaauaaaagccuucaguccgccggguuuacagccggacugaccuacagccagcucaugacccugaaggaugcuaugcugcaacuugacccgaacacaaaaacguggauggauaucgaaggccggcccgaggacccuguggaaauugcgcucuaccagcccucuuccggcugcuauauccacuucuuuagagagccuaccgaccugaagcaguucaagcaggaugccaaauacagccaugggauugacguuacagaucuguuugcugcccaacccggacucaccucugccgugaucgacgcucugccgcgcaauauggucaucacaugucagggcuccgaugacauucggaaacuucuggaaagccaggggagaaaggauaucaagcucauugacaucgcccugaacaaaaccgauucccgcaaguaugagaaugcggugugggaccaguacaaggaucugugccacaugcauacgggaguuguggucgagaaaaagaaacggggcgggaaggaagagauuacaccucacugugcucuuauggacugcaucauguucgaugccgccgugucuggcggacucaacaccagcguccugagagcugugcugccccgcgacaugguuuuucggaccuccacaccuagagugguccucugaggacuaguaauaaggaaacuguaugaaugucugugggcaggaagugaagagauccuucuguaaagguuuuuggaauuaugucugcugaauaauaaacuuuuuugaaauaauaaaucugguagaaaaaugagaucucaaaggcucuuuucagagccaccaaaaaaaaaaaaaaaaaaaaaaaaaaaaaaaaaaaaaaaaaaaaaaaaaaaaaaaaaaaaaaaaagaauu

SEQ ID NO: 20172 - RNA, 2066 nt, Artificial Sequence
  mRNA product Design b-4 (hSL-A64-N5) comprising derived and/or modified sequence from LASV(G733-SLE-2010;Clade IV)__AIT17155__SP-HsALB_NP(2-569) (opt5)
aggagagucccgcagucggcguccagcggcucugcuuguucgugugugugucguugcaggccuuauucaagcuuaccaugaagugggugaccuucaucagccugcucuuucuguucuccucugccuacagcagcgccuccaaggagaucaaaucuuuccuguggacccagagccucagacgggaacuguccggcuacugcucuaacauuaagcugcaaguggucaaagacgcucaggcccugcuccacgggcuggauuuuagcgagguuuccaaugugcagcgccuuaugagaaaggaacggcgcgacgauaacgaccugaaaagacuccgggaucugaaucaggcggugaacaaucuggucgagcucaagucuacacaacaaaagagcgugcugcgcguuggaacgcuuaccuccgacgaacugcucgugcuggcugccgaucuugagaaacuuaagagcaaagucaucagaacagagcggccccucucugccggcguguauauggggaaccuguccagccagcagcuggaccagcgcagagcucuccugucuaugauuggaauguccggcgggaaucagggagcccggaccggccgcgauggcguugugagagucugggacgugaagaacgcugaacuucugaauaaccaguucgggacaaugccuagccucacccuggccugucuuacaaaacagggacaaguggaucugaaugacgcgguccaggcccucaccgaucugggccugaucuacacggcuaaguauccgaacaccucugaccucgaccggcugacacagucccaucccauucuuaauaugaucgauaccaagaaaagcucccugaacaucucuggguacaauuuuagccucggagccgcuguuaaggccggcgcgugcaugcuggacgggggaaacaugcuugagacaauuaaaguguccccucaaaccauggauggcauccucaagagcauucugaaagugaagaaagcccugggcauguucaucucugacacgcccggggaacgcaacccuuaugagaauauucuguacaagaucugucucuccggagauggcuggcccuauauugcuagcagaacaucuaucaccgggcgggccugggagaacacagucguggaccuggaaagcgauggaaagccucagaaagcuggcuccaauaacucuaauaagagccuucaguccgccggguuuaccgccggacugaccuacagccagcucaugacacugaaagacgcuaugcugcaacuugauccgaacgcgaagacguggauggacaucgagggcagacccgaagauccuguugagauugcccucuaccagcccucuuccggcugcuauauccacuucuuucgcgaaccuaccgaccugaaacaguucaagcaggacgcuaaguacagccaugggauugaugugacagaccuguuugccgcccaacccggacucaccucugcugucaucgaugcccugccgcggaauauggugauuacaugucagggcuccgacgauaucagaaaacuucuggagagccaggggcgcaaggacaucaaacucauugauaucgcgcuguccaagauugacucucggaaauaugagaacgcuguuugggaucaguacaaggaccugugccacaugcauaccggaguggucguggaaaagaaaaagagaggcgggaaagaggaaaucacgccucacugugcccuuauggauugcauuauguucgacgccgcugucagcggcggacucaauucccuggugcugcgcgccguucucccccgggauaugguguuuagaacaucuaccccucgcgucgugcugugaggacuaguaauaaggaaacuguaugaaugucugugggcaggaagugaagagauccuucuguaaagguuuuuggaauuaugucugcugaauaauaaacuuuuuugaaauaauaaaucugguagaaaaaugagaucucaaaggcucuuuucagagccaccaaaaaaaaaaaaaaaaaaaaaaaaaaaaaaaaaaaaaaaaaaaaaaaaaaaaaaaaaaaaaaaaagaauu

SEQ ID NO: 20173 - RNA, 2066 nt, Artificial Sequence
  mRNA product Design b-4 (hSL-A64-N5) comprising derived and/or modified sequence from MOPV/LASV reassortant(IGS-1;Clade IV)__AFY05578__SP-HsALB_NP(2-569) (opt5)
aggagagucccgcagucggcguccagcggcucugcuuguucgugugugugucguugcaggccuuauucaagcuuaccaugaagugggugaccuucaucagccugcucuuucuguucuccucugccuacagcagcgccuccaaggagaucaaaucuuuccuguggacccagagccucagacgggaacuguccggcuacugcucuaacauuaaacuucaaguggucaaggacgcucaggcccugcuccacgggcuggauuuuagcgagguuuccaaugugcagcgccuuaugagaaaggaacggcgcgacgauaacgaccugaaaagacuccgggaucugaaucaggcggugaacaaucuggucgagcucaagucuacacaacaaaagagcauccugcgcgugggaacgcuuaccuccgacgaucugcucauucuggcugccgaccuugaaaaacugagaagcaagguuauccggacagagcgcccccucucugccggcguguauauggggaaccuguccagccagcagcuggaucagagacgggcucuccugaauaugauuggaaugucuggcgggaaccagggagcccgcgcuggcagagacggcgucgugcggguuugggaugugaaaaaugccgagcuucuguccaaccaguucgggaccaugccuagccucacacuggcgugucuuaccaagcagggacaagucgaccugaaugaugccgugcaggcucucacagaccugggccugaucuacaccgccaaauauccgaacacgucugaccucgaucgccugacccagucccaucccauccuuaauaugauugacacaaagaaaagcucccugaacaucucuggguacaauuuuagccucggagcugccgugaaggcgggcgccugcaugcuggaugggggaaacaugcuugaaaccauuaaggucuccccucaaacaauggacggcauccugaaaagcauucucaagguuaaaaaggcucugggcauguucaucucugauacccccggggagagaaacccuuaugaaaauauucuguacaaaaucugucucuccggagacggcuggcccuauaucgccagccggacgucuauuacagggagagcuugggagaacaccgugguggaucuggagagcgacggaaagccucagaaggccgauuccaauaacucuagcaaaucccuucagagcgccggcuuuacagcugggcugaccuacucucagcucaugacccugaaggacgcgaugcugcaacuugauccgaaugccaaaacauggauggacaucgaaggacgccccgaggacccugucgaaauugcucucuaccagcccuccagcggcugcuauauccacuucuuucgggagccuacggaucugaagcaguucaaacaggacgccaaguacucucauggcauugaugugaccgaccuguuugccacacaacccgggcucaccuccgcuguuaucgaugcccugccgagaaacauggugaucacaugucagggaagcgacgauauucgcaaacuucuggaaucccagggccggaaggacaucaagcucauugauaucgaccugucuaaaaccgauagcagaaaguaugagaaugcggucugggaccaguacaaagaucugugccacaugcauacgggggugguuguggagaagaagaaacgcggaggcaaggaagagauuacaccucacugugcucuuauggacugcaucauguucgacgccgccgucuccgggggccucaacaccucugugcugcgggcuguccugcccagagauaugguguuucgcaccagcacaccucggguugugcucugaggacuaguaauaaggaaacuguaugaaugucugugggcaggaagugaagagauccuucuguaaagguuuuuggaauuaugucugcugaauaauaaacuuuuuugaaauaauaaaucugguagaaaaaugagaucucaaaggcucuuuucagagccaccaaaaaaaaaaaaaaaaaaaaaaaaaaaaaaaaaaaaaaaaaaaaaaaaaaaaaaaaaaaaaaaaagaauu

SEQ ID NO: 20174 - RNA, 2066 nt, Artificial Sequence
  mRNA product Design b-4 (hSL-A64-N5) comprising derived and/or modified sequence from LASV(LM765-SLE-2012;Clade IV)__AIT17815__SP-HsALB_NP(2-569) (opt5)
aggagagucccgcagucggcguccagcggcucugcuuguucgugugugugucguugcaggccuuauucaagcuuaccaugaagugggugaccuucaucagccugcucuuucuguucuccucugccuacagcagcgccuccaaggagaucaaaucuuuccuguggacccagagccucagacgggaacuguccggcuacugcucuaacauuaagcugcaaguggucaaagacgcucaggcccugcuccacgggcuggauuuuagcgagguuuccaaugugcagcgccuuaugagaaaggaacggcgcgacgauaacgaccugaaaagacuccgggaucugaaucaggcggugaacaaucuggucgagcucaagucuacacaacaaaagagcauccugcgcgugggaacgcuuaccuccgacgaucugcucauucuggcugccgaccuugaaaaacuuaagagcaaaguuacaagaaccgagcggccccucucugccggcguguauauggggaaccuguccagccagcagcuggaucagcgcagagcucuccuggacaugaucggaaugucuggcuccaaucagggggcccgggcuggacgcgauggcgucgugagaguuugggacgugaagaacgccgagcuucugaauaaccaguucggcacaaugccuagccucacccuggcgugucuuacaaaacaggggcaagucgaucugaaugacgccgugcaggcucucaccgaccugggacugauuuacacggccaaguauccgaacaccucugaucucgaccggcugacacagucccaucccauccuuaauaugaucgauaccaagaaaagcucccugaacauuucuggcuacaauuuuagccucggggcugccgugaaggcgggagccugcaugcuggacggcgggaacaugcuugaaacaaucaaagucuccccucaaaccauggauggcauucucaagagcauccugaaaguuaagaaagcucugggaauguucauuucugacgcccccggcgagcgcaacccuuaugaaaauauccuguacaagauuugucucuccggggauggauggcccuauaucgcuagcagaacgucuaucacaggccgggccugggagaacaccgugguggaccuggagagcgaugggaagccucagaaagccggauccaauggcucuaacaagagccuucaguccgcuggguuuacagcgggacugaccuacagccagcucaugacccugaaagacgccaugcugcaacuugauccgaaugcuaagacauggauggacauugaaggcagacccgaggacccugucgaaaucgcccucuaccagcccucuuccggcugcuauauucacuucuuucgcgagccuacggaucugaaacaguucaagcaggacgccaaguacagccaugggaucgaugugaccgaccuguuugcugcccaacccggacucacaucugcgguuauugaugcucugccgcggaacauggugaucaccugucagggcuccgacgauaucagaaaacuuuucgaaagccaggggcgcaaggacauuaaacugaucgauauugcccucuccaagacagacucucggaaauaugagaaugccgucugggaucaguacaaggaccugugccacaugcauaccggaaucgugguugagaagaaaaagagaggcgggaaagaagagauuacgccucacugugcucugauggauugcaucauguuugacgccgcugugagcggcggacuuaacacauccguccuccgcgccgugcugccccgggacauggucuucagaaccucuaccccucgcgugguucugugaggacuaguaauaaggaaacuguaugaaugucugugggcaggaagugaagagauccuucuguaaagguuuuuggaauuaugucugcugaauaauaaacuuuuuugaaauaauaaaucugguagaaaaaugagaucucaaaggcucuuuucagagccaccaaaaaaaaaaaaaaaaaaaaaaaaaaaaaaaaaaaaaaaaaaaaaaaaaaaaaaaaaaaaaaaaagaauu

SEQ ID NO: 20175 - RNA, 2066 nt, Artificial Sequence
  mRNA product Design b-4 (hSL-A64-N5) comprising derived and/or modified sequence from LASV(LM776-SLE-2012;Clade IV)__AIT17825__SP-HsALB_NP(2-569) (opt5)
aggagagucccgcagucggcguccagcggcucugcuuguucgugugugugucguugcaggccuuauucaagcuuaccaugaagugggugaccuucaucagccugcucuuucuguucuccucugccuacagcagcgccuccaaggagaucaaaucuuuccuguggacccagagccucagacgggaacuguccucuuacugcagcaacauuaaacuucaaguggucaaggacgcucaggcccugcuccacggccuggauuuuuccgagguuucuaaugugcagcgccuuaugagaaaggaacggcgcgacgauaacgaccugaaaagacuccgggaucugaaucaggcggugaacaaucuggucgagcucaagagcacacaacagaaguccauccugcgcguggggacgcuuaccagcgacgaucugcucauucuggcugccgaccuugaaaaacugaagucuaaaguuacaagaaccgagcggccccucuccgccggaguguauaugggcaaccugagcucucagcagcuggaucaacgcagagcucuccuguccaugaucgggaugagcggaucuaaucagggcgcccgggcugggcgcgacggagucgugagaguuugggaugugaagaacgccgagcuucugaauaaccaguucggcacaaugccuucccucacccuggcgugucuuacaaaacagggccaagucgaccugaaugaugccgugcaggcucucaccgaccuggggcugauuuacacggccaaguauccgaacaccagcgaccucgaucggcugacacagucccaucccauccuuaauaugaucgacaccaagaaaucuagccugaacauuuccggauacaauuuuagccucggcgcugccgugaaggcgggggccugcaugcuggauggaggcaacaugcuugaaacaaucaaagucucuccucaaaccauggacgggauucugaaguccauccucaaaguuaagaaagcucugggaauguucauuagcgauacgcccggcgagcgcaacccuuaugaaaauauccuguacaagauuugucucucuggcgacggguggcccuauaucgccagcagaacauccaucaccggacgggcuugggagaacacagugguggaucuggagucugacggcaagccucagaaagccgggagcaauaacuccaauaagagccuucagucugccggauuuaccgcuggccugaccuacucccagcucaugacacugaaagaugcgaugcugcaacuugacccgaacgccaagacguggauggauauugaagggagacccgaggacccugucgaaguggcucucuaccagcccagcucuggaugcuauauccacuucuuucgcgagccuaccgaccugaaacaguucaagcaggaugccaaguacucccauggcauugacguuacagaucuguuugccgcucaacccggccucaccagcgccgugaucgacgcgcugccgcggaauauggucauuacaugucagggguccgaugacaucagaaaacuucuggaaucucagggacgcaaggauaucaaacucauugacaucgcucugagcaagaccgauucccggaaauaugagaacgccgugugggaccaguacaaggaucugugccacaugcauacgggcguuguggucgagaagaaaaagagagggggaaaagaagagauuacaccucacugugcccuuauggacugcaucauguucgaugcugccgugucuggcgggcucaauaccagcguccugcgcgcugugcugccccgggacaugguuuuuagaaccuccacaccucgcgugguccucugaggacuaguaauaaggaaacuguaugaaugucugugggcaggaagugaagagauccuucuguaaagguuuuuggaauuaugucugcugaauaauaaacuuuuuugaaauaauaaaucugguagaaaaaugagaucucaaaggcucuuuucagagccaccaaaaaaaaaaaaaaaaaaaaaaaaaaaaaaaaaaaaaaaaaaaaaaaaaaaaaaaaaaaaaaaaagaauu

SEQ ID NO: 20176 - RNA, 2066 nt, Artificial Sequence
  mRNA product Design b-4 (hSL-A64-N5) comprising derived and/or modified sequence from LASV(Mad39;Clade IV)__ANH09723__SP-HsALB_NP(2-569) (opt5)
aggagagucccgcagucggcguccagcggcucugcuuguucgugugugugucguugcaggccuuauucaagcuuaccaugaagugggugaccuucaucagccugcucuuucuguucuccucugccuacagcagcgccuccaaggagaucaaaucuuuccuguggacccagagccucagacgggaacuguccggcuacugcucuaacauuaagcugcaaguggucaaagacgcucaggcccugcuccacgggcuggauuuuagcgagguuuccaaugugcagcgccuuaugagaaagcagcggcgcgacgauaacgaccugaaaagacuccgggaucugaaucaagcggugaacaaucuggucgaacucaagucuacacagcaaaagagcgugcugcgcguuggaacgcuuaccuccgacgaucugcucacacuggcugccgaccuugagaaacuuaagagcaaagugaccagaacagaacggccccucaccgccggcgucuauauggggaaccugucuucccagcagcuggaucagcgcagagcucuccugaauaugaucggaaugagcggcgggaaccagggagcccggacaggccgcgacggcgugguuagagugugggaugucaagaaugcugagcuucugaacaaucaguucgggaccaugccuucucucacgcuggccugucuuaccaaacaaggacagguggaccugaacgaugugguccaggcgcucacagaccugggccugauuuacaccgccaaguauccgaauacauccgaccucgaucggcugacccaaagccaucccauccuuaacaugauugacacgaauaagucuucccugaacaucagcggguacaacuuuucccucggagcugccguuaaagcuggcgccugcaugcuggaugggggaaauaugcuugagacaaucaaggugucuccucagaccauggacggcauucugaaaagcauccucaaggugaaaaagucccugggcauguucauuagcgauacacccggggaacgcaacccuuaugagaauauccuguacaaaauuugucucucuggagacggcuggcccuauaucgcguccagaaccagcauuaccgggcgggccugggaaaacacagucguggaucuggagucuggaggcaagccucagaaggcugggagcaauaacuccaauaaaucucuucagagcgccggauuugcugccggccugacguacucccaacucaugacccugaaggacgccaugcugcagcuugauccgaacgcuaaaacauggauggacaucgagggcagacccgaagauccuguugagaucgcgcucuaccagcccauuagcgggugcuauauccacuucuuucgcgaaccuaccgaccugaagcaguucaaacaagacgccaaguacucucauggaauugaugugacagaccuguuugcugcccagcccggccucaccuccgccgucaucgaggcucugccgcggaauauggugauuacgugucaggggagcgaugacaucagaaaacuuuucgaaucucagggacgcaaggauaucaagcugauugacaucgcccucuccaaaacagauagccggaaguaugagaacgcgguuugggaccaauacaaagaucugugccacaugcauaccggcguggucguggagaagaagaaaaagggcgggaaagaagagauuaccccucacugugcucugauggacugcaucauguuugaugccgccgucuccggaggccuuaauacacucgugcugagagcuguucugccccgcgacaugguguuccggaccucuacaccuaaggucgugcucugaggacuaguaauaaggaaacuguaugaaugucugugggcaggaagugaagagauccuucuguaaagguuuuuggaauuaugucugcugaauaauaaacuuuuuugaaauaauaaaucugguagaaaaaugagaucucaaaggcucuuuucagagccaccaaaaaaaaaaaaaaaaaaaaaaaaaaaaaaaaaaaaaaaaaaaaaaaaaaaaaaaaaaaaaaaaagaauu

SEQ ID NO: 20177 - RNA, 2066 nt, Artificial Sequence
  mRNA product Design b-4 (hSL-A64-N5) comprising derived and/or modified sequence from LASV(Z0947-SLE-2011;Clade IV)__AIT17841__SP-HsALB_NP(2-569) (opt5)
aggagagucccgcagucggcguccagcggcucugcuuguucgugugugugucguugcaggccuuauucaagcuuaccaugaagugggugaccuucaucagccugcucuuucuguucuccucugccuacagcagcgccuccaaggagaucaaaucuuuccuguggacccagagccucagacgggaacuguccggcuacugcucuaacauuaagcugcaaguggucaaagacgcucaggcccugcuccacgggcuggauuuuagcgagguuuccaaugugcagcgccuuaugagaaaggaacggcgcgacgauaacgaccugaaaagacuccgggaucugaaucaggcggugaacaaucuggucgagcucaagucuacacaacaaaagagcauccugcgcgugggaacgcuuaccuccgacgaucugcucauucuggcugccgaccuugaaaaacuuaagagcaaaguuacaagaaccgagcggccccucucugccggcguguauauggggaaccuguccagccagcagcuggaucagcgcagagcucuccugaauaugaucggaaugucuggcuccaaccagggggcccggacaggacgcgacggcgucgugagaguuugggaugugaagaaugcugagcuucugaacaaucaguucggcaccaugccuagccucacacuggccugucuuaccaaacaggggcaagucgaccugaacgaugcggugcaggcccucacggaccugggacugauuuacaccgcuaaguauccgaauacaucugaccucgaucggcugacccagucccaucccauccuuaacaugaucgacacaaagaaaagcucccugaauauuucuggcuacaacuuuagccucggggccgcugugaaggccggagcgugcaugcuggauggcgggaacaugcuugaaaccaucaaagucuccccucaaacgauggacggcauucucaagagcauccugaaaguuaagaaagcccugggaauguucauuucugaugcucccggcgagcgcaauccuuaugaaaacauccuguacaagauuugucucuccggggacggauggcccuauaucgccagcagaacaucuaucaccggccgggcuugggagaauacagugguggaucuggagagcgacgggaagccucagaaagccggauccaacggcucuaauaagagccuucaguccgccggguuuaccgcuggacugaccuacagccagcucaugacacugaaagaugcgaugcugcaacuugacccgaacgccaagacguggauggauauugaaggcagacccgaggacccugucgaaaucgcucucuaccagcccucuuccggcugcuauauucacuucuuucgcgagccuaccgaccugaaacaguucaagcaggaugccaaguacagccaugggaucgacgugacagaucuguuugccgcucaacccggacucaccucugccguuauugacgcgcugccgcggaauauggugaucacaugucagggcuccgaugacaucagaaaacuuuucgaaagccaggggcgcaaggauauuaaacugaucgacauugcucucuccaagaccgauucucggaaauaugagaacgccgucugggaccaguacaaggaucugugccacaugcauacgggaaucgugguugagaagaaaaagagaggcgggaaagaagagauuacaccucacugugcccugauggacugcaucauguuugaugcugccgugagcggcggacuuaauaccuccguccuccgcgcugugcugccccgggacauggucuucagaaccucuacaccucgcgugguucugugaggacuaguaauaaggaaacuguaugaaugucugugggcaggaagugaagagauccuucuguaaagguuuuuggaauuaugucugcugaauaauaaacuuuuuugaaauaauaaaucugguagaaaaaugagaucucaaaggcucuuuucagagccaccaaaaaaaaaaaaaaaaaaaaaaaaaaaaaaaaaaaaaaaaaaaaaaaaaaaaaaaaaaaaaaaaagaauu

SEQ ID NO: 20178 - RNA, 2097 nt, Artificial Sequence
  mRNA product Design b-4 (hSL-A100) comprising derived and/or modified sequence from LASV(Josiah;Clade IV)__NP_694869__SP-HsALB_NP(2-569) (opt1)
aggagagucccgcagucggcguccagcggcucugcuuguucgugugugugucguugcaggccuuauucaagcuuaccaugaagugggugaccuucaucagccugcucuuccuguucuccagcgccuacuccagcgccuccaaggagaucaagagcuuccuguggacccagucccuccgccgggagcugagcggcuacugcuccaacaucaagcuccagguggucaaggacgcccaggcgcugcugcacgggcuggacuucagcgagguguccaacgugcagcgccucaugcggaaggagcgccgggacgacaacgaccugaagcgccugcgggaccucaaccaggccgucaacaaccugguggagcucaagagcacccagcagaaguccauccugcgcgugggcacccugaccagcgacgaccugcucauccuggccgccgaccuggagaagcucaaguccaaggucauccggaccgagcgcccccugagcgccgggguguacaugggcaaccuguccagccagcagcucgaccagcggcgcgcgcugcugaacaugaucgggauguccggcggcaaccagggggcccgggccggccgcgacggggugguccgggugugggacgugaagaacgccgagcuccugaacaaccaguucggcaccaugccgagccugacgcucgcgugccugaccaagcaggggcaggucgaccugaacgacgccgugcaggcccucaccgaccugggccugaucuacaccgccaaguaccccaacacguccgaccucgaccgccugacccagagccaccccauccugaacaugaucgacaccaagaaguccagccucaacaucagcggcuacaacuucucccugggggccgcggugaaggccggcgccugcaugcuggacgggggcaacaugcucgagaccaucaaggucagcccccagacgauggacggcauccugaaguccauccugaaggugaagaaggcccucgggauguucaucagcgacaccccgggcgagcggaaccccuacgagaacauccuguacaagaucugccuguccggggacggcuggcccuacaucgccagccgcaccuccaucaccgggcgggcgugggagaacacgguggucgaccucgagagcgacggcaagccccagaaggccgacuccaacaacagcuccaagagccugcaguccgccggcuucaccgccgggcugaccuacagccagcucaugacccugaaggacgccaugcugcagcuggacccgaacgcgaagacguggauggacaucgagggccgccccgaggaccccguggagaucgcccucuaccagcccuccagcgggugcuacauccacuucuuccgggagccgaccgaccugaagcaguucaagcaggacgccaaguacucccacggcaucgacgugaccgaccuguucgccacccagcccgggcucacgagcgccgucaucgacgcgcugccccgcaacauggugaucacgugccagggcuccgacgacauccgcaagcugcucgagagccagggccggaaggacaucaagcugaucgacaucgcccugagcaagaccgacucccgcaaguacgagaacgccgugugggaccaguacaaggaccucugccacaugcacaccggggucguggucgagaagaagaagcggggcgggaaggaggagaucaccccgcacugcgcccugauggacugcaucauguucgacgcggccgugagcggcgggcugaacaccuccgugcuccgcgccguccugccccgggacaugguguuccgcaccagcacgccccgggugguccugugaggacuaguaauaaggaaacuguaugaaugucugugggcaggaagugaagagauccuucuguaaagguuuuuggaauuaugucugcugaauaauaaacuuuuuugaaauaauaaaucugguagaaaaaugagaucucaaaggcucuuuucagagccaccaaaaaaaaaaaaaaaaaaaaaaaaaaaaaaaaaaaaaaaaaaaaaaaaaaaaaaaaaaaaaaaaaaaaaaaaaaaaaaaaaaaaaaaaaaaaaaaaaaaaa

SEQ ID NO: 20179 - RNA, 2097 nt, Artificial Sequence
  mRNA product Design b-4 (hSL-A100) comprising derived and/or modified sequence from LASV(LP;Clade I)__AAF86702__SP-HsALB_NP(2-569) (opt1)
aggagagucccgcagucggcguccagcggcucugcuuguucgugugugugucguugcaggccuuauucaagcuuaccaugaagugggugaccuucaucagccugcucuuccuguucuccagcgccuacuccagcaacuccaaggagaucaagagcuuccuguggacccagucccuccgccgggagcugagcggcuacugcuccaacaucaagcuccagguggucaaggacgcccaggcccugcugcacgggcuggacuucagcgagguguccaacgugcagcgccucaugcggaagcagaagcgcgacgacgcggaccugaagcggcugcgcgaccucaaccaggccgucaacaaccugguggagcucaagagcacccagcagaagaacgugcugcgggucggcacgcuguccagcgacgaccugaucacccucgccgccgaccuggagaagcugaaguccaaggugauccgcaccgagcggccccucagcuccgggguguacaugggcaaccugagcucccagcagcuggaccagcgccgggcccuccugagcaugaucgggauguccggcggcccgcaggggaaccgcaccggcggggacggcgucgugcgggugugggacgucaagaacgcggagcugcucaacaaccaguucgggacgaugcccagccugacccuggccugccucaccaagcagggccagguggaccugaacgacgccgugcaggcccugaccgaccucggccugaucuacacggcgaaguaccccaacuccagcgaccuggacaugcucacccagagccaccccauccuggggauggucgacaccaagaaguccagccugaacaucuccggcuacaacuucagccucggggccgccgugaaggccggcgccugcaugcuggacggcgggaacaugcuggagaccaucaagguguccccgcagacgauggacggcauccucaagagcauccugaaggucaagcgcucccuggggauguucaucagcgacacccccggcgagcggaaccccuacgagaacauccucuacaagaucugccuguccggggagggcuggcccuacaucgcgagccgcaccuccaucaccggccgggccugggagaacacgcugguggaccucgagagcgacaacaagccgcccaagcugaacuccgccgggagcaacaagucccugcaggccgccggccucaacgcggggcugaccuacagccagcugaugacccugaaggacugcaugcuccagcuggaccccuccagcaagaccuggaucgacaucgagggccgccccgaggacccgguggagaucgcccuguuccagcccuccagcgggugcuacauccacuucuuccgggagcccacggaccucaagcaguucaagcaggacgccaaguacagccacggcaucgacgucaccgaccuguucuccacccagcccggccugaccagcgccgugaucgaggcccucccgcgcaacauggugcugacgugccagggguccgacgacaucaagaagcugcucgagagccagggccggcgcgacaucaagcugaucgacaucucccugagcaaggcggacucccgcaaguucgagaacgccgucugggaccaguacaaggaccucugccacaugcacaccgggguggucguggagaagaagaagcggggcgggaaggaggagaucacgccccacugcgcccugcuggacugcaucauguucgacgccgccaccaccggcagccucaacaucaccacccugcgcgcggugcugccccgggacauggucuuccgcaccuccacgcccaagguggugcucugaggacuaguaauaaggaaacuguaugaaugucugugggcaggaagugaagagauccuucuguaaagguuuuuggaauuaugucugcugaauaauaaacuuuuuugaaauaauaaaucugguagaaaaaugagaucucaaaggcucuuuucagagccaccaaaaaaaaaaaaaaaaaaaaaaaaaaaaaaaaaaaaaaaaaaaaaaaaaaaaaaaaaaaaaaaaaaaaaaaaaaaaaaaaaaaaaaaaaaaaaaaaaaaaa

SEQ ID NO: 20180 - RNA, 2097 nt, Artificial Sequence
  mRNA product Design b-4 (hSL-A100) comprising derived and/or modified sequence from LASV(803213;Clade II)__AAF86704__SP-HsALB_NP(2-569) (opt1)
aggagagucccgcagucggcguccagcggcucugcuuguucgugugugugucguugcaggccuuauucaagcuuaccaugaagugggugaccuucaucagccugcucuuccuguucuccagcgccuacuccagcgccuccaaggaggugaaguccuuccuguggacccagagccuccgccgggagcugagcggcuacugcuccaacaucaagcugcaggucgugaaggacgcccaggcgcuccugcacgggcuggacuucagcgaggugaacaacguccagcgccucaugcggaagcagaagcgcgacgacggcgaccugaagcggcugcgcgaccucaaccaggccgugaacaaccugguggagcugaaguccacccagcagaaguccauccuccgggucgggacgcugaccagcgacgaccugcucacccuggccgccgaccuggagaagcucaagagcaaggugauccgcaccgagcggccccuguccagcggcguguacauggggaaccuguccacgcagcagcucgagcagcgccgggcccugcugaacaugaucggcauggucggcggggcgcagggcacccagccggggcgcgacggcguggugcgggucugggacgugaagaaccccgaccuccugaacaaccaguucgggaccaugcccagccugacccucgccugccugacgaagcagggccagguggaccugaacgacgccguccucgcccugaccgaccugggccucaucuacaccgcgaaguaccccaacuccagcgaccuggaccgccugucccagagccacccgauccucaacaugguggacaccaagaaguccagccugaacaucagcggguacaacuucucccugggcgccgccgugaaggccggggccugcaugcucgacggcggcaacaugcuggagacgaucaaggucacgccccagaccauggacgggauccucaagagcauccugaaggugaagcggucccugggcauguucgugagcgacacccccggggagcgcaaccccuacgagaacauccuguacaagaucugccucuccggcgacggguggccguacaucgcgagccggaccuccaucgucggccgcgccugggagaacaccaccguggaccuggagagcgacggcaagccccagaagguggggaccgccggcuccaacaagagccugcaguccgccggguuccccacgggccucaccuacagccagcugaugacccugaaggacuccaugaugcagcuggaccccagcgccaagaccuggaucgacaucgaggggcggccggaggaccccgucgagaucgcgcucuaccagcccauguccggcugcuacauccacuucuuccgcgagcccacggaccugaagcaguucaagcaggacgccaaguacagccacggcaucgacguggccgaccuguucccggcccagcccgggcucaccuccgccgucaucgaggcgcugccccggaacauggugcugaccugccagggcagcgacgacaucaagaagcuccuggacucccaggggcgccgcgacaucaagcugaucgacaucagccucagcaagguggacucccggaaguucgagaacgccgucugggaccagugcaaggaccugugccacaugcacaccggcgugguggucgagaagaagaagcgcgggggcaaggaggagaucacgccccacugcgcccugauggacugcaucauguucgacgccgccgugagcggcgggcucaacaucccggugcugcgggcgguccugccccgcgacaugguguuccggaccuccagccccaaggugguccucugaggacuaguaauaaggaaacuguaugaaugucugugggcaggaagugaagagauccuucuguaaagguuuuuggaauuaugucugcugaauaauaaacuuuuuugaaauaauaaaucugguagaaaaaugagaucucaaaggcucuuuucagagccaccaaaaaaaaaaaaaaaaaaaaaaaaaaaaaaaaaaaaaaaaaaaaaaaaaaaaaaaaaaaaaaaaaaaaaaaaaaaaaaaaaaaaaaaaaaaaaaaaaaaaa

SEQ ID NO: 20181 - RNA, 2100 nt, Artificial Sequence
  mRNA product Design b-4 (hSL-A100) comprising derived and/or modified sequence from LASV(GA391;Clade III)__CAA36646__SP-HsALB_NP(2-570) (opt1)
aggagagucccgcagucggcguccagcggcucugcuuguucgugugugugucguugcaggccuuauucaagcuuaccaugaagugggugaccuucaucagccugcucuuccuguucuccagcgccuacuccagcgccuccaaggaggugcgcagcuuccuguggacccagucccuccggcgcgagcugagcggcuacugcuccaacaucaagcugcaggucgugaaggacgcccaggcgcuccugcacgggcuggacuucagcgagguguccaacguccagcggcucaugcgcaagcagaagcgggacgacggcgaccugaagcgccugcgggaccucaaccaggccgugaacaaccugguggagcucaagagcacccagcagaaguccguccugcgcguggggacccugagcuccgacgaccugcucauccuggccgccgaccuggagaagcucaagagcaaggugacccggaccgagcgcccccuguccagcggcgucuacauggggaaccuguccagccagcagcucgaccagcggcgcgcccugcugaacaugaucggcaugaccggcguguccgggggcgggaagggcgcgagcgacgggaucgugcgggucugggacgugaagaacgccgagcuccugaacaaccaguucggcacgaugccgucccugacccucgccugccugaccaagcagggccagguggaccugaacgacgccguccaggcgcucaccgaccuggggcugaucuacacggccaaguaccccaacagcagcgaccucgaccgccugucccagagccaccccauccugaacaugaucgacaccaagaaguccagccucaacaucuccggcuacaacuucagccugggggccgccgugaaggccggcgcgugcaugcuggacggcgggaacaugcucgagaccaucaaggugagcccccagaccauggacggcauccucaaguccauccugaaggucaagaagucccuggggauguucgugagcgacacgccgggcgagcggaaccccuacgagaacauccuguacaagaucugccuguccggggacggcuggcccuacaucgccagccgcaccuccaucgugggccgggccugggagaacaccgucguggaccucgagcaggacaacaagccccagaagaucgggaacggcgggagcaacaagucccugcagagcgccggcuucgccgcggggcugaccuacucccagcucaugacgcugaaggacuucaagugcuucaaccugaucccgaacgccaagaccuggauggacaucgagggccgccccgaggaccccguggagaucgcccuguaccagcccagcuccggcugcuacguccacuucuuccgggagccgaccgaccucaagcaguucaagcaggacgccaaguacagccacgggaucgacgugaccgaccuguucgccgcgcagcccggccugacgagcgccgucaucgaggcccucccccgcaacauggugaucacgugccagggguccgaggacauccggaagcugcuggagagccagggccgccgcgacaucaagcucaucgacaucacccuguccaaggccgacagccggaaguucgagaacgccgugugggaccaguucaaggaccugugccacaugcacaccggggucgugguggagaagaagaagcgcggcggcaaggaggagaucacgccccacugcgcgcucauggacugcaucauguucgacgccgccgucuccgggggccuggacgccaaggugcugcgggugguccucccgcgcgacaugguguuccggaccagcacccccaaggugguccugugaggacuaguaauaaggaaacuguaugaaugucugugggcaggaagugaagagauccuucuguaaagguuuuuggaauuaugucugcugaauaauaaacuuuuuugaaauaauaaaucugguagaaaaaugagaucucaaaggcucuuuucagagccaccaaaaaaaaaaaaaaaaaaaaaaaaaaaaaaaaaaaaaaaaaaaaaaaaaaaaaaaaaaaaaaaaaaaaaaaaaaaaaaaaaaaaaaaaaaaaaaaaaaaaa

SEQ ID NO: 20182 - RNA, 2097 nt, Artificial Sequence
  mRNA product Design b-4 (hSL-A100) comprising derived and/or modified sequence from LASV(AV;Clade V)__CCA30315__SP-HsALB_NP(2-569) (opt1)
aggagagucccgcagucggcguccagcggcucugcuuguucgugugugugucguugcaggccuuauucaagcuuaccaugaagugggugaccuucaucagccugcucuuccuguucuccagcgccuacuccagcgccuccaaggaggugaaguccuuccuguggacccagagccuccgccgggagcugagcggcuacugcuccaacaucaagcugcaggucgugaaggacgcccaggcgcuccugcacgggcuggacuucagcgagguguccaacguccagcgccucaugcggaagcagcgccgggacgacagcgaccugaagcgccugcgggaccucaaccaggccgugaacaaccugguggagcugaaguccacccagcagaaguccguccuccgcgugggcacgcugagcagcgacgaccugcucacccuggccgccgaccuggagaagcucaaguccaaggugacccggaccgagcgcccccugagcuccggggucuacaugggcaaccugagcucccagcagcucgaccagcggcgcgcccugcugaaccucaucgggaugacgaacggcagccagggcucccaggcggggcgggacggcguggugcgcgucugggacgugaagaacgccgagcugcugaacaaccaguucgggaccaugccgagccucacccuggccugccugaccaagcagggccagguggaccucaacgacgucgugcaggcccugacggaccuggggcucaucuacaccgcgaaguaccccaacaccagcgaccuggaccggcugacccagucccaccccauccucaacaugaucgacacgaagaaguccagccugaacaucagcggcuacaacuucucccugggcgccgccgugaaggccggggccugcaugcucgacggcgggaacaugcuggagaccaucaaggucagcccccaguccauggacggcauccucaagagcauccugaaggugaagcgcgcgcugggcauguucguguccgacaccccgggggagcggaaccccuacgagaacauccuguacaagaucugccucagcggcgacggguggcccuacaucgccucccgcaccagcaucgucggccgggccugggagaacacggugguggaccuggagaccgacgggaagccccagaagaucggcuccggcaacagcaacaagucccugcagagcgccggguucuccgccggccucaccuacagccagcugaugacccugaaggacgcgaugcugcagcucgacccgaacgccaagacguggauggacaucgaggggcgccccgaggaccccgucgagguggcccuguaccagcccaucuccggcugcuacauccacuucuuccgggagccgaccgaccugaagcaguucaagcaggacgccaaguacagccacgggaucgacaucgccgaccucuucgcggcccagcccggccugaccagcgccgucaucgaggcccugccccgcaacauggugaucacgugccagggcuccgaggacaucaagaagcuccuggagagccaggggcgcaaggacaucaagcugaucgacaucgcccucuccaagaucgacagccggaaguucgagaacgcggugugggaccaguacaaggaccugugccacaugcacaccggcgucgugguggagaagaagaagcgcgggggcaaggaggagaucaccccgcacugcgcccugauggacugcaucauguucgacgccgccgucuccgggggccucaacacccuggugcugcgggcggugcucccccgcgacauggucuuccggaccagcacgccccgcguggugcugugaggacuaguaauaaggaaacuguaugaaugucugugggcaggaagugaagagauccuucuguaaagguuuuuggaauuaugucugcugaauaauaaacuuuuuugaaauaauaaaucugguagaaaaaugagaucucaaaggcucuuuucagagccaccaaaaaaaaaaaaaaaaaaaaaaaaaaaaaaaaaaaaaaaaaaaaaaaaaaaaaaaaaaaaaaaaaaaaaaaaaaaaaaaaaaaaaaaaaaaaaaaaaaaaa

SEQ ID NO: 20183 - RNA, 2097 nt, Artificial Sequence
  mRNA product Design b-4 (hSL-A100) comprising derived and/or modified sequence from LASV(Togo/2016/7082;Clade VI)__AMR44578__SP-HsALB_NP(2-569) (opt1)
aggagagucccgcagucggcguccagcggcucugcuuguucgugugugugucguugcaggccuuauucaagcuuaccaugaagugggugaccuucaucagccugcucuuccuguucuccagcgccuacuccagcaacuccaaggaggugaaguccuuccuguggacccagagccuccgccgggagcugagcggcuacugcuccaacaucaagcugcaggucgugaaggacgcccaggcccuccugcacgggcuggacuucagcgagguguccaacguccagcgccucaugcggaagcagaagcgcgacgacggcgaccugaagcggcugcgcgaccucaaccaggcggugaacaaccugguggagcucaagagcguccagcagaaguccauccugcggguggggacccugaccagcgacgaccugcucacccuggccgccgaccuggagaagcucaaguccaaggugacccgcaccgagcggccccugagcuccggcgucuacauggggaaccugagcucccagcagcucgaccagcgccgggcccugcugagcaugaucggcauguccggcgggaaccagaacagccagccgaagggcgacgggguggugcgcgucugggacgugaagaacgccgaccuccugaacaaccaguucggcacgaugcccucccugacccucgcgugccugaccaagcagggccagguggaccugaacgacgccguccaggcccucaccgaccuggggcugaucuacacggccaaguaccccaacagcagcgaccucgaccggcugucccagagccaccccauccugaacaugaucgacaccaagaaguccagccucaacaucuccggcuacaacuucagccugggggcggccaucaagaccggcgccugcaugcuggacgggggcaacaugcucgagaccaucaaggugacgccgcagaccauggacggcauccugaaguccauccugaaggugaagcgcagccucgggauguucaucuccgacacccccggcgagcggaaccccuacgagaacauccuguacaagaucugccugagcggggacggcuggcccuacaucgccucccgcaccgccaucaucgggcgggcgugggagaacacggucguggaccucgagagcgacuccaagccgcagaagaucggcagcaacggcuccaacaagagccugcaguccgccggguucgcccccggccugaccuacagccagcucaugacccugaaggacuccaugcugcagcuggaccccaacgccaagaccuggaucgacaucgaggggcgccccgaggacccgguggaggucgcccucuuccagcccaucagcggcugcuacauccacuucuuccgggagcccacggaccugaagcaguucaagcaggacgcgaaguacagccacgggaucgacgugaccgaccuguucgccgcccagcccggccucaccuccgccgugaucgaggcccugccgcgcaacaugguccugaccugccagggcagcgacgacaucaagaagcuccuggacucccaggggcggcgcgacaucaagcugaucgacgugagccucaacaagaucgacucccgcaaguucgagaacgcggucugggaccaguacaaggaccugugccacaugcacacgggcgugguggucgagaagaagaagaagggcgggaaggaggagaucacgccccacugcgcccugcucgacugcaucauguucgacgccgccgugagcgggggccugaacgccaccgugcugcgggcgguccucccccgcgacaugguguuccggaccuccagccccaaggugguccugugaggacuaguaauaaggaaacuguaugaaugucugugggcaggaagugaagagauccuucuguaaagguuuuuggaauuaugucugcugaauaauaaacuuuuuugaaauaauaaaucugguagaaaaaugagaucucaaaggcucuuuucagagccaccaaaaaaaaaaaaaaaaaaaaaaaaaaaaaaaaaaaaaaaaaaaaaaaaaaaaaaaaaaaaaaaaaaaaaaaaaaaaaaaaaaaaaaaaaaaaaaaaaaaaa

SEQ ID NO: 20184 - RNA, 2097 nt, Artificial Sequence
  mRNA product Design b-4 (hSL-A100) comprising derived and/or modified sequence from LASV(KAK-428;Clade n.d. (VII))__ANH09741__SP-HsALB_NP(2-569) (opt1)
aggagagucccgcagucggcguccagcggcucugcuuguucgugugugugucguugcaggccuuauucaagcuuaccaugaagugggugaccuucaucagccugcucuuccuguucuccagcgccuacuccagcaacuccaaggaggugaaguccuuccuguggacccagagccuccgccgggagcugagcggcuacugcaccaacaucaagcugcaggucgugaaggacgcccaggcccuccugcacgggcuggacuucuccgaggugagcaacguccagcgccucaugcggaagcagaagcgcgacgacaacgaccugaagcggcugcgcgaccucaaccaggcggugaacaaccugguggagcugaaguccguccagcagaaguccgugcucaaggugggcacgcugaacagcgacgaccugcucacccuggccgccgaccuggagaagcucaagagcaaggucgugcggaccgagcgcccccuguccagcgggguguacaugggcaaccuguccagccagcagcucgaccagcggcgcgcccugcugaacaugaucgggauggccggcggcucccaggggaaccagccgagccgggacggcgucgugcgcgugugggacgucaagaacgcggaccuccugaacaaccaguucgggaccaugcccucccugacgcucgccugccugaccaagcagggccagguggaccugaacgacgugguccucgcccugaccgaccuggggcucaucuacaccgccaaguaccccaacagcuccgaccuggaccggcugagccagaaccaccccgugcucaacaugaucgacgugaacaagagcucccugaacaucagcggcuacaacuucucccugggcgcggccgucaaggccggggccugcaugcucgacggcgggaacaugcuggagacgaucaagaucagcccgcagaccguggacggcauccugaaguccauccucaaggugaagcgcgcccugggcauguucgucagcgacacccccggggagcggaaccccuacgagaacauccuguacaaggugugccucuccggcaacggguggcccuacaucgcgagccgcaccuccaucgucggccgggccugggagaacacggugguggaccuggagagcaacaagaaccagccgaaggucgggaacaacggcuccaacaagaugcugcagagcuccggcuucgccaccgggcucaccuacagccagcugaugacccugcgcgacuccaugcugcagcucgaccccacggccaagaccuggaucgacaucgagggccggcccgaggaccccguggagcuggcccuguuccagccgagcuccgggugcuacauccacuucuuccgcgagcccaccgaccucaagcaguucaagcaggacgcgaaguacagccacggcaucgacgugaacgaccuguucuccgcccagcccgggcugaccagcgccguccucgaggcccugccccggaacauggugcugacgugccagggcagcgacgacauccgcaagcuccuggacucccaggaccgcaaggacaucaagcugaucgacaucagccucuccaaggccgacgcgcggaaguucgagaacgacgugugggaccaguucaaggaccugugccacaugcacaccggcaucgucguggagaagaagaagaagggcgggaagcaggagaugaccccgcacugcgcccugcucgacugcaucauguucgacgccgccgugagcgggggccugaacguccccacccugcgcgccgugcuccccacggacaugguguuccggaccaucaccaccaaggucgugcugugaggacuaguaauaaggaaacuguaugaaugucugugggcaggaagugaagagauccuucuguaaagguuuuuggaauuaugucugcugaauaauaaacuuuuuugaaauaauaaaucugguagaaaaaugagaucucaaaggcucuuuucagagccaccaaaaaaaaaaaaaaaaaaaaaaaaaaaaaaaaaaaaaaaaaaaaaaaaaaaaaaaaaaaaaaaaaaaaaaaaaaaaaaaaaaaaaaaaaaaaaaaaaaaaa

SEQ ID NO: 20185 - RNA, 2097 nt, Artificial Sequence; identical to SEQ ID NO: 20179
  mRNA product Design b-4 (hSL-A100) comprising derived and/or modified sequence from LASV(Pinneo-NIG-1969;Clade I)__AIT17837__SP-HsALB_NP(2-569) (opt1)

SEQ ID NO: 20186 - RNA, 2097 nt, Artificial Sequence
  mRNA product Design b-4 (hSL-A100) comprising derived and/or modified sequence from LASV(ISTH0009-NIG-2011;Clade II)__AIT17405__SP-HsALB_NP(2-569) (opt1)
aggagagucccgcagucggcguccagcggcucugcuuguucgugugugugucguugcaggccuuauucaagcuuaccaugaagugggugaccuucaucagccugcucuuccuguucuccagcgccuacuccagcguguccaaggaggucaagagcuuccuguggacccagucccuccgccgggagcugagcggcuacugcuccaacaucaagcuccagguggugaaggacgcccaggcccugcugcacgggcuggacuucagcgaggucuccaacgugcagcgccucaugcggaagcagaagcgcgacgacagcgaccugaagcggcugcgcgaccucaaccaggcggugaacaaccuggucgagcugaaguccacccagcagaaguccauccuccgggugggcacccugaccagcgacgaccugcucacccuggccgccgaccuggagaagcucaagagcaaggugauccgcaccgagcggccccuguccagcggggucuacaugggcaaccuguccacgcagcagcucgagcagcgccgggcccugcugaacaugaucgggauggugggcggcgcccaggggacccagccgggccgcgacggggugguccgggugugggacgugaagaaccccgaccuccugaacaaccaguucggcaccaugcccagccugacccucgcgugccugacgaagcaggggcaggucgaccugaacgacgccgugcucgcccugaccgaccugggccucaucuacaccgccaaguaccccaacuccagcgaccuggaccgccugucccagagccacccgauccucaacaugguggacaucaagaaguccagccugaacaucagcggcuacaacuucucccugggggcggccgucaaggccggcgccugcaugcucgacgggggcaacaugcuggagaccaucaaggugacgccccagaccauggacggcauccucaagagcauccugaaggugaagcggucccuggggauguucgucagcgacacccccggcgagcgcaaccccuacgagaacauccuguacaagaucugccucuccggggacggcuggccguacaucgccagccggaccuccaucguggggcgcgcgugggagaacacgaccguggaccuggagagcgacggcaagccccagaaggucggcuccgccgggagcaacaagucccugcagagcgccggcuuccccaccgggcucaccuacucccagcugaugacgcugaaggacagcaugaugcagcuggaccccuccgccaagaccuggaucgacaucgagggccggccggaggaccccguggagaucgcccucuaccagcccaugagcgggugcuacauccacuucuuccgcgagcccaccgaccugaagcaguucaagcaggacgcgaaguacucccacggcaucgacgucgccgaccuguucccggcccagcccggccucaccagcgccgugaucgaggcccugccccggaacauggugcugacgugccaggggagcgacgacaucaagcgccuccuggacucccagggccgccgggacaucaagcugaucgacaucgcgcucagcaaggccgacucccgccgguucgagaacgccgucugggaccagugcaaggaccugugccacaugcacaccggggugguggucgagaagaagaagcgcggcgggaaggaggagaucacgccccacugcgcccugauggacugcaucauguacgacgccgcggugagcggcggccucaacaucccggugcugcgggccguccugccccgcgacaugguguuccggaccuccagccccaaggugguccucugaggacuaguaauaaggaaacuguaugaaugucugugggcaggaagugaagagauccuucuguaaagguuuuuggaauuaugucugcugaauaauaaacuuuuuugaaauaauaaaucugguagaaaaaugagaucucaaaggcucuuuucagagccaccaaaaaaaaaaaaaaaaaaaaaaaaaaaaaaaaaaaaaaaaaaaaaaaaaaaaaaaaaaaaaaaaaaaaaaaaaaaaaaaaaaaaaaaaaaaaaaaaaaaaa

SEQ ID NO: 20187 - RNA, 2097 nt, Artificial Sequence
  mRNA product Design b-4 (hSL-A100) comprising derived and/or modified sequence from LASV(ISTH2010-NIG-2012;Clade II)__AIT17483__SP-HsALB_NP(2-569) (opt1)
aggagagucccgcagucggcguccagcggcucugcuuguucgugugugugucguugcaggccuuauucaagcuuaccaugaagugggugaccuucaucagccugcucuuccuguucuccagcgccuacuccagcgccuccaaggaggugaaguccuuccuguggacccagagccuccgccgggagcugagcggcuacugcuccaacaucaagcugcaggucgugaaggacgcccaggcgcuccugcacgggcuggacuucagcgagguguccaacguccagcgccucaugcggaagcagaagcgcgacgacagcgaccugaagcggcugcgcgaccucaaccaggccgugaacaaccugguggagcugaaguccacccagcagaaguccauccuccgggucggcacgcugaccagcgacgaccugcucacccuggccgccgaccuggagaagcucaagagcaaggugauccgcaccgagcggccccuguccagcgggguguacaugggcaaccuguccacgcagcagcucgagcagcgccgggcccugcugaaccucaucgggauggucggcggcgcgcaggggacccagccgggccgcgacgggguggugcgggucugggacgugaagaaccccgaccugcugaacaaccaguucggcaccaugcccagccucacccuggccugccugacgaagcagggccagguggaccucaacgacgccguccuggcccugaccgaccucgggcugaucuacaccgcgaaguaccccaacuccagcgaccuggaccgccucucccagagccacccgauccugaacaugguggacaccaagaaguccagccugaacaucagcggcuucaacuucucccucggggccgccgugaaggccggcgccugcaugcuggacgggggcaacaugcuggagacgaucaaggucacgccccagaccauggacggcauccucaagagcauccugaaggugaagaagucccuggggauguucgugagcgacacccccggcgagcggaaccccuacgagaacauccucuacaagaucugccuguccggggacggcuggccguacaucgcgagccgcaccuccaucgucgggcgggccugggagaacaccaccguggaccuggagagcgacggcaagccccacaaggugggcaccgccggguccaacaagagccuccaguccgccggcuuccccacggggcugaccuacagccagcugaugacccugaaggacuccaugaugcagcucgaccccagcgccaagaccuggaucgacaucgagggccgcccggaggaccccgucgagaucgcgcuguaccagcccauguccgggugcuacauccacuucuuccgggagcccacggaccugaagcaguucaagcaggacgccaaguacagccacggcaucgacguggccgaccucuucccggcccagcccggccugaccuccgccgucaucgaggcgcugccccgcaacauggugcugaccugccaggggagcgacgacaucaagcggcuccuggacagccagggccgccgcgacaucaagcucaucgacaucgcccuguccaaggccgacagccggcgcuucgagaacgccgugugggaccagugcaaggaccugugccacaugcacaccggggucgugguggagaagaagaagcggggcgggaaggaggagaucacgccccacugcgcccucauggacugcaucauguacgacgcggccgucuccggcggccugaacaucccggugcugcgcgccgugcucccccgggacauggucuuccgcaccagcucccccaagguggugcugugaggacuaguaauaaggaaacuguaugaaugucugugggcaggaagugaagagauccuucuguaaagguuuuuggaauuaugucugcugaauaauaaacuuuuuugaaauaauaaaucugguagaaaaaugagaucucaaaggcucuuuucagagccaccaaaaaaaaaaaaaaaaaaaaaaaaaaaaaaaaaaaaaaaaaaaaaaaaaaaaaaaaaaaaaaaaaaaaaaaaaaaaaaaaaaaaaaaaaaaaaaaaaaaaa

SEQ ID NO: 20188 - RNA, 2097 nt, Artificial Sequence
  mRNA product Design b-4 (hSL-A100) comprising derived and/or modified sequence from LASV(Lassa virus/H.sapiens-wt/NGA/2015/ISTH_0543;Clade II)__AVO03640__SP-HsALB_NP(2-569) (opt1)
aggagagucccgcagucggcguccagcggcucugcuuguucgugugugugucguugcaggccuuauucaagcuuaccaugaagugggugaccuucaucagccugcucuuccuguucuccagcgccuacuccagcgccuccaaggaggugaaguccuuccuguggacccagagccuccgccgggagcugagcggcuacugcuccaacaucaagcugcaggucgugaaggacgcccaggcgcuccugcacgggcuggacuucagcgagguguccaacguccagcgccucaugcggaagcagaagcgcgacgacagcgaccugaagcggcugcgcgaccucaaccaggccgugaacaaccugguggagcugaaguccacccagcagaaguccauccuccgggucggcacgcugaccagcgacgaccugcucacccuggccgccgaccuggagaagcucaagagcaaggugauccgcaccgagcggccccuguccagcgggguguacaugggcaaccuguccacgcagcagcucgagcagcgccgggcccugcugaacaugaucgggauggucggcggcgcgcaggggacccagccgggccgcgacgggguggugcgggucugggacgugaagaaccccgaccuccugaacaaccaguucggcaccaugcccagccugacccucgccugccugacgaagcagggccagguggaccugaacgacgccguccucgcccugaccgaccuggggcucaucuacaccgcgaaguaccccaacuccagcgaccuggaccgccugucccagagccacccgauccucaacaugguggacaccaagaaguccagccugaacaucagcggcuacaacuucucccugggggccgccgugaaggccggcgccugcaugcucgacgggggcaacaugcuggagacgaucaaggucacgccccagaccauggacggcauccucaagagcauccugaaggugaagaagucccuggggauguucgugagcgacacccccggcgagcggaaccccuacgagaacauccuguacaagaucugccucuccggggacggcuggccguacaucgcgagccgcaccuccaucgucgggcgggccugggagaacaccaccguggaccuggagagcgacggcaagccccagaaggugggcuccgccgggagcaacaagucccugcagagcgccggcuuccccaccgggcucacguacucccagcugaugacccugaaggacagcaugaugcagcuggaccccuccgccaagaccuggaucgacaucgagggccgcccggaggaccccgucgagaucgcgcucuaccagcccaugagcgggugcuacauccacuucuuccgggagcccaccgaccugaagcaguucaagcaggacgccaaguacucccacggcaucgacguggccgaccuguucccggcccagcccggccucacgagcgccgucaucgaggcgcugccccgcaacauggugcugaccugccaggggagcgacgacaucaagcggcuccuggacucccagggccgcaaggacaucaagcugaucgacaucgcccucagcaaggccgacucccgccgguucgagaacgccgugugggaccagugcaaggaccugugccacaugcacaccggggucgugguggagaagaagaagcgcggcgggaaggaggagaucacgccccacugcgcccugauggacugcaucauguacgacgcggccgucagcggcggccucaacaucccggugcugcgggccgugcugccccgcgacauggucuuccggaccuccagccccaagguggugcucugaggacuaguaauaaggaaacuguaugaaugucugugggcaggaagugaagagauccuucuguaaagguuuuuggaauuaugucugcugaauaauaaacuuuuuugaaauaauaaaucugguagaaaaaugagaucucaaaggcucuuuucagagccaccaaaaaaaaaaaaaaaaaaaaaaaaaaaaaaaaaaaaaaaaaaaaaaaaaaaaaaaaaaaaaaaaaaaaaaaaaaaaaaaaaaaaaaaaaaaaaaaaaaaaa

SEQ ID NO: 20189 - RNA, 2097 nt, Artificial Sequence
  mRNA product Design b-4 (hSL-A100) comprising derived and/or modified sequence from LASV(Lassa virus/H.sapiens-wt/NGA/2016/ISTH_0009;Clade II)__AVO03572__SP-HsALB_NP(2-569) (opt1)
aggagagucccgcagucggcguccagcggcucugcuuguucgugugugugucguugcaggccuuauucaagcuuaccaugaagugggugaccuucaucagccugcucuuccuguucuccagcgccuacuccagcgccuccaaggaggugaaguccuuccuguggacccagagccuccgccgggagcugagcggcuacugcuccaacaucaagcugcaggucgugaaggacgcccaggcgcuccugcacgggcuggacuucagcgagguguccaacguccagcgccucaugcggaagcagaagcgcgacgacagcgaccugaagcggcugcgcgaccucaaccaggccgugaacaaccugguggagcugaaguccacccagcagaaguccauccuccgggucggcacgcugaccagcgacgaccugcucacccuggccgccgaccuggagaagcucaagagcaaggugauccgcaccgagcggccccuguccagcgggguguacaugggcaaccuguccacgcagcagcucgagcagcgccgggcccugcugaacaugaucgggauggucggcggcgcgcaggggacccagccgggccgcgacgggguggugcgggucugggacgugaagaaccccgaccuccugaacaaccaguucggcaccaugcccagccugacccucgccugccugacgaagcagggccagguggaccugaacgacgccguccucgcccugaccgaccuggggcucaucuacaccgcgaaguaccccaacuccagcgaccuggaccgccugucccagagccacccgauccucaacaugguggacaccaagaaguccagccugaacaucagcggcuacaacuucucccugggggccgccgugaaggccggcgccugcaugcucgacgggggcaacaugcuggagacgaucaaggucacgccccagaccauggacggcauccucaagagcauccugaaggugaagaagucccuggggauguucgugagcgacacccccggcgagcggaaccccuacgagaacauccuguacaagaucugccucuccggggacggcuggccguacaucgcgagccgcaccuccaucgucgggcgggccugggagaacaccaccguggaccuggagagcgacggcaagccccagaaggugggcuccgccgggagcaacaagucccugcagagcgccggcuuccccaccgggcucacguacucccagcugaugacccugaaggacagcaugaugcagcuggaccccuccgccaagaccuggaucgacaucgagggccgcccggaggaccccgucgagaucgcgcucuaccagcccaugagcgggugcuacauccacuucuuccgggagcccaccgaccugaagcaguucaagcaggacgccaaguacucccacggcaucgacguggccgaccuguucccggcccagcccggccucacgagcgccgucaucgaggcgcugccccgcaacauggugcugaccugccaggggagcgacgacaucaagcggcuccuggacucccagggccgccgcgacaucaagcugaucgacaucgcccucagcaaggccgacucccggcgcuucgagaacgccgugugggaccagugcaaggaccugugccacaugcacaccggggucgugguggagaagaagaagcggggcgggaaggaggagaucacgccccacugcgcccugauggacugcaucauguacgacgcggccgucagcggcggccucaacaucccggugcugcgcgccgugcugccccgggacauggucuuccgcaccuccagccccaagguggugcucugaggacuaguaauaaggaaacuguaugaaugucugugggcaggaagugaagagauccuucuguaaagguuuuuggaauuaugucugcugaauaauaaacuuuuuugaaauaauaaaucugguagaaaaaugagaucucaaaggcucuuuucagagccaccaaaaaaaaaaaaaaaaaaaaaaaaaaaaaaaaaaaaaaaaaaaaaaaaaaaaaaaaaaaaaaaaaaaaaaaaaaaaaaaaaaaaaaaaaaaaaaaaaaaaa

SEQ ID NO: 20190 - RNA, 2097 nt, Artificial Sequence
  mRNA product Design b-4 (hSL-A100) comprising derived and/or modified sequence from LASV(Lassa virus/H.sapiens-wt/NGA/2016/ISTH_0017;Clade II)__AVO03568__SP-HsALB_NP(2-569) (opt1)
aggagagucccgcagucggcguccagcggcucugcuuguucgugugugugucguugcaggccuuauucaagcuuaccaugaagugggugaccuucaucagccugcucuuccuguucuccagcgccuacuccagcgccuccaaggaggugaaguccuuccuguggacccagagccuccgccgggagcugagcggcuacugcuccagcaucaagcugcaggucgugaaggacgcccaggcgcuccugcacgggcuggacuucuccgaggugagcaacguccagcgccucaugcggaagcagaagcgcgacgacuccgaccugaagcggcugcgcgaccucaaccaggccgugaacaaccugguggagcucaagagcacccagcagaaguccauccugcgggucggcacgcugaccagcgacgaccugcucacccuggccgccgaccuggagaagcucaaguccaaggugauccgcaccgagcggccccugagcuccgggguguacaugggcaaccugagcacgcagcagcucgagcagcgccgggcccugcugaacaugaucgggauggcgggcggcgcccaggggacccagccgggccgcgacggggucgugcgggugugggacgucaagaaccccgaccuccugaacaaccaguucggcaccaugcccucccugacccucgccugccugacgaagcagggccagguggaccugaacgacgccgugcucgcgcugaccgaccuggggcucaucuacaccgccaaguaccccaacagcuccgaccuggaccgccugagccagagccacccgauccucaacauggucgacaccaagaaguccagccugaacaucuccggcuacaacuucagccugggggccgccgugaaggccggcgcgugcaugcucgacgggggcaacaugcuggagacgaucaaggugacgccccagaccauggacggcauccugaaguccauccucaaggucaagcggagccuggggauguucguguccgacgcccccggcgagcgcaaccccuacgagaacauccuguacaagaucugccucagcggggacggcuggccguacaucgccucccggaccagcaucguggggcgcgccugggagaacaccaccgucgaccuggaguccgacggcaagccccagaaggugggcgccaccgggagcaacaagucccugcagagcgcgggcuuccccaccgggcucacguacucccagcugaugacccugaaggacagcaugaugcagcuggaccccuccgccaagaccuggaucgacaucgagggccggccggaggaccccguggaggucgcccucuaccagcccgugagcgggugcuacauccacuucuuccgcgagcccaccgaccugaagcaguucaagcaggacgccaaguacucccacggcaucgacgucgccgaccuguucccggcgcagcccggccucacgagcgccgugaucgaggcccugccccggaacauggugcugaccugccaggggagcgacgacaucaagaagcuccuggacucccagggccgcaaggacaucaagcugaucgacaucgcccucagcaaggccgacucccgccgguucgagaacgcggucugggaccagugcaaggaccugugccacaugcacaccggggugguggucgagaagaagaagcgcggcgggaaggaggagaucacgccccacugcgcccugauggacugcaucauguacgacgccgccgugagcggcggccucaacaucccggugcugcgggcgguccugccccgcgacaugguguuccggaccuccagccccaaggugguccucugaggacuaguaauaaggaaacuguaugaaugucugugggcaggaagugaagagauccuucuguaaagguuuuuggaauuaugucugcugaauaauaaacuuuuuugaaauaauaaaucugguagaaaaaugagaucucaaaggcucuuuucagagccaccaaaaaaaaaaaaaaaaaaaaaaaaaaaaaaaaaaaaaaaaaaaaaaaaaaaaaaaaaaaaaaaaaaaaaaaaaaaaaaaaaaaaaaaaaaaaaaaaaaaaa

SEQ ID NO: 20191 - RNA, 2097 nt, Artificial Sequence
  mRNA product Design b-4 (hSL-A100) comprising derived and/or modified sequence from LASV(Lassa virus/H.sapiens-wt/NGA/2018/ISTH_0959;Clade II)__AVV65100__SP-HsALB_NP(2-569) (opt1)
aggagagucccgcagucggcguccagcggcucugcuuguucgugugugugucguugcaggccuuauucaagcuuaccaugaagugggugaccuucaucagccugcucuuccuguucuccagcgccuacuccagcgccuccaaggaggugaaguccuuccuguggacccagagccuccgccgggagcugagcggcuacugcuccaacaucaagcugcaggucgugaaggacgcccaggcgcuccugcacgggcuggacuucagcgagguguccaacguccagcgccucaugcggaagcagaagcgcgacgacagcgaccugaagcggcugcgcgaccucaaccaggccgugaacaaccugguggagcugaaguccacccagcagaaguccauccuccgggucggcacccugaccagcgacgaccugcucacccuggccgccgaccuggagaagcucaagagcaaggugauccgcaccgagcggccccuguccagcgggguguacaugggcaaccuguccacgcagcagcucgagcagcgccgggcccugcugaaccucaucgggauggucggcggcgcgcaggggacccagccgggccgcgacgggguggugcgggucugggacgugaagaaccccgaccugcugaacaaccaguucggcaccaugcccagccucacccuggccugccugacgaagcagggccagguggaccucaacgacgucgugcuggcccugaccgaccucgggcugaucuacaccgccaaguaccccaacuccagcgaccuggaccgccucucccagagccacccgauccugaacaugguggacaccaagaaguccagccugaacaucagcggcuucaacuucucccucggggcggccgucaaggccggcgccugcaugcuggacgggggcaacaugcuggagacgaucaaggugacgccccagaccauggacggcauccucaagagcauccugaaggugaagaagucccuggggauguucgucagcgacacccccggcgagcggaaccccuacgagaacauccucuacaagaucugccuguccggggacggcuggccguacaucgccagccgcaccuccaucguggggcgggcgugggagaacaccaccguggaccuggagagcgacggcaagccccacaaggucggcaccgccggguccaacaagagccuccaguccgccggcuuccccacggggcugaccuacagccagcugaugacccugaaggacuccaugaugcagcucgaccccagcgccaagaccuggaucgacaucgagggccgcccggaggaccccguggagaucgcccuguaccagcccauguccgggugcuacauccacuucuuccgggagcccacggaccugaagcaguucaagcaggacgcgaaguacagccacggcaucgacgucgccgaccucuucccggcccagcccggccugaccuccgccgugaucgaggcccugccccgcaacauggugcugaccugccaggggagcgacgacaucaagcggcuccuggacagccagggccgcaaggacaucaagcucaucgacaucgcgcuguccaagaccgacagccgccgguucgagaacgccgucugggaccagugcaaggaccugugccacaugcacacgggggugguggucgagaagaagaagcgcggcgggaaggaggagaucacgccccacugcgcccucauggacugcaucauguacgacgccgccguguccggcggccugaacaucccggugcugcgggcgguccucccccgcgacaugguguuccggaccagcucccccaaggugguccugugaggacuaguaauaaggaaacuguaugaaugucugugggcaggaagugaagagauccuucuguaaagguuuuuggaauuaugucugcugaauaauaaacuuuuuugaaauaauaaaucugguagaaaaaugagaucucaaaggcucuuuucagagccaccaaaaaaaaaaaaaaaaaaaaaaaaaaaaaaaaaaaaaaaaaaaaaaaaaaaaaaaaaaaaaaaaaaaaaaaaaaaaaaaaaaaaaaaaaaaaaaaaaaaaa

SEQ ID NO: 20192 - RNA, 2097 nt, Artificial Sequence
  mRNA product Design b-4 (hSL-A100) comprising derived and/or modified sequence from LASV(LASV003-NIG-2008;Clade II)__AIT17581__SP-HsALB_NP(2-569) (opt1)
aggagagucccgcagucggcguccagcggcucugcuuguucgugugugugucguugcaggccuuauucaagcuuaccaugaagugggugaccuucaucagccugcucuuccuguucuccagcgccuacuccagcgccuccaaggaggugaaguccuuccuguggacccagagccuccgccgggagcugagcggcuacugcuccagcaucaagcugcaggucgugaaggacgcccaggcgcuccugcacgggcuggacuucuccgaggugagcaacguccagcgccucaugcggaagcagaagcgcgacgacuccgaccugaagcggcugcgcgaccucaaccaggccgugaacaaccugguggagcucaagagcacccagcagaaguccguccugcgggugggcacccugaccagcgacgaccugcucacccuggccgccgaccuggagaagcucaaguccaaggugauccgcaccgagcggccccugagcuccggggucuacaugggcaaccugagcgcccagcagcucgagcagcgccggacgcugcugaacaugaucgggauggugggcggcgcgcaggggacccagccgggccgcgacggggugguccgggugugggacgugaagaaccccgaccuccugaacaaccaguucggcaccaugcccucccugacccucgccugccugacgaagcaggggcaggucgaccugaacgacguggugcucgcccugaccgaccugggccucaucuacaccgccaaguaccccaacagcuccgaccuggaccgccugagccagagccacccgauccucuccauggucgacaccaagaaguccagccugaacaucagcggcuacaacuucucccugggggcggccgugaaggccggcgccugcaugcucgacgggggcaacaugcuggagacgaucaaggugacgccccagaccauggacggcauccucaagagcauccugaaggucaagaagucccuggggauguucgugagcgacacccccggcgagcggaaccccuacgagaacauccuguacaagaucugccucuccggggacggcuggccguacaucgccagccgcaccuccaucguggggcgggcgugggagaacaccaccgucgaccuggagagcgacggcaagccccagaaggugggcaccgccggguccaacaagagccugcaguccgccggcuuccccacggggcucaccuacagccagcugaugacccugaaggacuccaugaugcagcuggaccccagcgccaagaccuggaucgacaucgagggccgcccggaggaccccgucgagaucgcccucuaccagcccauguccgggugcuacauccacuucuuccgggagcccacggaccugaagcaguucaagcaggacgcgaaguacagccacggcaucgacgugaccgaccuguucccggcccagcccggccucaccagcgccgugaucgaggcccugccccgcaacaugguccugaccugccagggguccgacgacaucaagcggcuccuggacagccagggccgccgcgacaucaagcugaucgacaucgcccucuccaaggcggacagccggcgcuucgagaacgccgugugggaccagugcaaggaccugugccacaugcacacggggguggucguggagaagaagaagcggggcgggaaggaggagaucacgccccacugcgcccugauggacugcaucauguacgacgccgccguguccggcggccucaacaucccgguccugcgcgcggugcugccccgggacaugguguuccgcaccagcucccccaaggucgugcucugaggacuaguaauaaggaaacuguaugaaugucugugggcaggaagugaagagauccuucuguaaagguuuuuggaauuaugucugcugaauaauaaacuuuuuugaaauaauaaaucugguagaaaaaugagaucucaaaggcucuuuucagagccaccaaaaaaaaaaaaaaaaaaaaaaaaaaaaaaaaaaaaaaaaaaaaaaaaaaaaaaaaaaaaaaaaaaaaaaaaaaaaaaaaaaaaaaaaaaaaaaaaaaaaa

SEQ ID NO: 20193 - RNA, 2097 nt, Artificial Sequence
  mRNA product Design b-4 (hSL-A100) comprising derived and/or modified sequence from LASV(LASV035-NIG-2009;Clade II)__AIT17589__SP-HsALB_NP(2-569) (opt1)
aggagagucccgcagucggcguccagcggcucugcuuguucgugugugugucguugcaggccuuauucaagcuuaccaugaagugggugaccuucaucagccugcucuuccuguucuccagcgccuacuccagcgccuccaaggaggugaaguccuuccuguggacccagagccuccgccgggagcugagcggcuacugcuccagcaucaagcugcaggucgugaaggacgcccaggcgcuccugcacgggcuggacuucuccgaggugagcaacguccagcgccucaugcggaagcagaagcgcgacgacuccgaccugaagcggcugcgcgaccucaaccaggccgugaacaaccugguggagcucaagagcacccagcagaaguccauccugcgggucggcacgcugaccagcgacgaccugcucacccuggccgccgaccuggagaagcucaaguccaaggugauccgcaccgagcggccccugagcuccgggguguacaugggcaaccugagcgcccagcagcucgagcagcgccgggcgcugcugaacaugaucgggauggucggcggcgcccaggggacgcagccgggccgcgacgggguggugcgggucugggacgugaagaaccccgaccuccugaacaaccaguucggcaccaugcccucccugacccucgccugccugaccaagcagggccagguggaccugaacgacgccguccucgcgcugacggaccuggggcucaucuacaccgccaaguaccccaacagcuccgaccuggaccgccugagccagagccacccgauccucaacaugguggacaccaagaaguccagccugaacaucuccggcuacaacuucagccugggggccgccgugaaggccggcgcgugcaugcucgacgggggcaacaugcuggagaccaucaaggucacgccccagaccauggacggcauccugaaguccauccucaaggugaagcggagccuggggauguucguguccgacacccccggcgagcgcaaccccuacgagaacauccuguacaagaucugccucagcggggacggcuggccguacaucgccucccggaccagcaucgucgggcgcgccugggagaacacgaccguggaccuggaguccgacggcaagccccagaaggugggcaccaccgggagcaacaagucccugcagagcgccggcuuccccacggggcucaccuacucccagcugaugacccugaaggacagcaugaugcagcuggaccccuccgccaagaccuggaucgacaucgagggccggccggaggaccccgucgagaucgcgcucuaccagcccaugagcgggugcuacauccacuucuuccgcgagcccacggaccugaagcaguucaagcaggacgccaaguacucccacggcaucgacguggccgaccuguucccggcccagcccggccucaccagcgccgucaucgaggcgcugccccggaacauggugcugaccugccaggggagcgacgacaucaagaagcuccuggacucccagggccgccgcgacaucaagcugaucgacaucgcccucagcaaggccgacucccggaaguucgagaacgccgugugggaccagugcaaggaccugugccacaugcacaccggggucgugguggagaagaagaagcgcggcgggaaggaggagaucacgccccacugcgcccugauggacugcaucauguacgacgcggccgucagcggcggccucaacaucccggugcugcgggccgugcugccccgcgacauggucuuccggaccuccagccccaagguggugcucugaggacuaguaauaaggaaacuguaugaaugucugugggcaggaagugaagagauccuucuguaaagguuuuuggaauuaugucugcugaauaauaaacuuuuuugaaauaauaaaucugguagaaaaaugagaucucaaaggcucuuuucagagccaccaaaaaaaaaaaaaaaaaaaaaaaaaaaaaaaaaaaaaaaaaaaaaaaaaaaaaaaaaaaaaaaaaaaaaaaaaaaaaaaaaaaaaaaaaaaaaaaaaaaaa

SEQ ID NO: 20194 - RNA, 2097 nt, Artificial Sequence
  mRNA product Design b-4 (hSL-A100) comprising derived and/or modified sequence from LASV(LASV1000-NIG-2009;Clade II)__AIT17783__SP-HsALB_NP(2-569) (opt1)
aggagagucccgcagucggcguccagcggcucugcuuguucgugugugugucguugcaggccuuauucaagcuuaccaugaagugggugaccuucaucagccugcucuuccuguucuccagcgccuacuccagcgccuccaaggaggugaaguccuuccuguggacccagagccuccgccgggagcugagcggcuacugcuccaacaucaagcugcaggucgugaaggacgcccaggcgcuccugcacgggcuggacuucagcgagguguccaacguccagcgccucaugcggaagcagaagcgcgacgacagcgaccugaagcggcugcgcgaccucaaccaggccgugaacaaccugguggagcugaaguccacccagcagaaguccauccuccgggucggcacgcugaccagcgacgaccugcucacccuggccgccgaccuggagaagcucaagagcaaggugauccgcaccgagcggccccuguccagcgggguguacaugggcaaccuguccacgcagcagcucgagcagcgccgggcccugcugaacaugaucgggauggucggcggcgcgcaggggacccagccgggccgcgacgggguggugcgggucugggacgugaagaaccccgaccuccugaacaaccaguucggcaccaugcccagccugacccucgccugccugacgaagcagggccagguggaccugaacgacgucgugcucgcccugaccgaccuggggcucaucuacaccgccaaguaccccaacuccagcgaccuggaccgccugucccagagccacccgauccucaacaugguggacaccaagaaguccagccugaacaucagcggcuacaacuucucccugggggcggccgucaaggccggcgccugcaugcucgacgggggcaacaugcuggagacgaucaaggugacgccccagaccauggacggcauccucaagagcauccugaaggugaagaagucccuggggauguucgucagcgacacccccggcgagcggaaccccuacgagaacauccuguacaagaucugccucuccggggacggcuggccguacaucgccagccgcaccuccaucguggggcgggcgugggagaacaccaccguggaccuggagagcgacggcaagccccagaaggucggcaccgccggguccaacaagagccugcaguccgccggcuuccccacggggcucaccuacagccagcugaugacccugaaggacuccaugaugcagcuggaccccagcgccaagaccuggaucgacaucgagggccgcccggaggaccccguggagaucgcccucuaccagcccgucuccgggugcuacauccacuucuuccgggagcccacggaccugaagcaguucaagcaggacgcgaaguacagccacggcaucgacguggccgaccuguucccggcccagcccggccucaccuccgccgugaucgaggcccugccccgcaacaugguccugaccugccaggggagcgacgacaucaagcggcuccuggacagccagggccgccgcgacaucaagcugaucgacaucgcgcucuccaaggccgacagccggcgcuucgagaacgccgugugggaccagugcaaggaccugugccacaugcacaccgggguggucguggagaagaagaagcggggcgggaaggaggagaucacgccccacugcgcccugauggacugcaucauguacgacgccgcgguguccggcggccucaacaucccgguccugcgcgccgugcugccccgggacaugguguuccgcaccagcucccccaaggucgugcucugaggacuaguaauaaggaaacuguaugaaugucugugggcaggaagugaagagauccuucuguaaagguuuuuggaauuaugucugcugaauaauaaacuuuuuugaaauaauaaaucugguagaaaaaugagaucucaaaggcucuuuucagagccaccaaaaaaaaaaaaaaaaaaaaaaaaaaaaaaaaaaaaaaaaaaaaaaaaaaaaaaaaaaaaaaaaaaaaaaaaaaaaaaaaaaaaaaaaaaaaaaaaaaaaa

SEQ ID NO: 20195 - RNA, 2097 nt, Artificial Sequence
  mRNA product Design b-4 (hSL-A100) comprising derived and/or modified sequence from LASV(LASV221-NIG-2010;Clade II)__AIT17625__SP-HsALB_NP(2-569) (opt1)
aggagagucccgcagucggcguccagcggcucugcuuguucgugugugugucguugcaggccuuauucaagcuuaccaugaagugggugaccuucaucagccugcucuuccuguucuccagcgccuacuccagcgccuccaaggaggugaaguccuuccuguggacccagagccuccgccgggagcugagcggcuacugcuccagcaucaagcugcaggucgugaaggacgcccaggcgcuccugcacgggcuggacuucuccgaggugagcaacguccagcgccucaugcggaagcagcgccgggacgacuccgaccugaagcgccugcgggaccucaaccaggccgugaacaaccugguggagcucaagagcacccagcagaaguccauccugcgcgucggcacgcugaccagcgacgaccugcucacccuggccgccgaccuggagaagcucaaguccaaggugauccggaccgagcgcccccugagcuccgggguguacaugggcaaccugagcacgcagcagcucgagcagcggcgcgcccugcugaacaugaucgggauggucggcggcgcgcaggggacccagccgggccgggacgggguggugcgcgucugggacgugaagaaccccgaccuccugaacaaccaguucggcaccaugcccucccugacccucgccugccugacgaagcagggccagguggaccugaacgacgccguccucgcccugaccgaccuggggcucaucuacaccgcgaaguaccccaacagcuccgaccuggaccggcugagccagagccacccgauccucaacaugguggacaccaagaaguccagccugaacaucuccggcuacaacuucagccugggggccgccgugaaggccggcgccugcaugcucgacgggggcaacaugcuggagacgaucaaggucacgccccagaccguggacggcauccugaaguccauccucaaggugaagcgcagccuggggauguucgucuccgacacccccggcgagcggaaccccuacgagaacauccuguacaagaucugccucagcggggacggcuggccguacaucgcgucccgcaccagcaucguggggcgggccugggagaacaccaccguggaccuggaguccgacggcaagccccagaaggucggcaccgccgggagcaacaagucccugcagagcgccggcuuccccacggggcucaccuacucccagcugaugacccugaaggacagcaugaugcagcuggaccccuccgccaagaccuggaucgacaucgagggccgcccggaggaccccguggagaucgcgcucuaccagcccaugagcgggugcuacauccacuucuuccgggagcccacggaccugaagcaguucaagcaggacgccaaguacucccacggcaucgacgucgccgaccuguucccggcccagcccggccucaccagcgccgugaucgaggcgcugccccgcaacauggugcugaccugccaggggagcgacgacaucaagcgccuccuggacucccagggccggcgcgacaucaagcugaucgacaucgcccucagcaaggccgacucccggaaguucgagaacgccgucugggaccagugcaaggaccugugccacaugcacaccggggugguggucgagaagaagaagcgcggcgggaaggaggagaucacgccccacugcgcccugauggacugcaucauguacgacgcggccgugagcggcggccucaacaucccggugcugcgggccguccugccccgcgacaugguguuccggaccuccagccccaaggugguccucugaggacuaguaauaaggaaacuguaugaaugucugugggcaggaagugaagagauccuucuguaaagguuuuuggaauuaugucugcugaauaauaaacuuuuuugaaauaauaaaucugguagaaaaaugagaucucaaaggcucuuuucagagccaccaaaaaaaaaaaaaaaaaaaaaaaaaaaaaaaaaaaaaaaaaaaaaaaaaaaaaaaaaaaaaaaaaaaaaaaaaaaaaaaaaaaaaaaaaaaaaaaaaaaaa

SEQ ID NO: 20196 - RNA, 2097 nt, Artificial Sequence
  mRNA product Design b-4 (hSL-A100) comprising derived and/or modified sequence from LASV(LASV237-NIG-2010;Clade II)__AIT17639__SP-HsALB_NP(2-569) (opt1)
aggagagucccgcagucggcguccagcggcucugcuuguucgugugugugucguugcaggccuuauucaagcuuaccaugaagugggugaccuucaucagccugcucuuccuguucuccagcgccuacuccagcgccuccaaggaggugaaguccuuccuguggacccagagccuccgccgggagcugagcggcuacugcuccaacaucaagcugcaggucgugaaggacgcccaggcgcuccugcacgggcuggacuucagcgagguguccaacguccagcgccucaugcggaagcagaagcgcgacgacagcgaccugaagcggcugcgcgaccucaaccaggccgugaacaaccugguggagcugaaguccacccagcagaaguccauccuccgggucggcacccugaccagcgacgaccugcucacccuggccgccgaccuggagaagcucaagagcaaggugauccgcaccgagcggccccuguccagcgggguguacaugggcaaccuguccacgcagcagcucgagcagcgccgggcccugcugaacaugaucgggauggucggcggcgcgcaggggacccagccgggccgcgacgggguggugcgggucugggacgugaagaaccccgaccuccugaacaaccaguucggcaccaugcccagccugacccucgccugccugacgaagcagggccagguggaccugaacgacgccguccucgcccugaccgaccuggggcucaucuacaccgcgaaguaccccaacuccagcgaccuggaccgccugucccagagccacccgauccucaacaugguggacaucaagaaguccagccugaacaucagcggcuacaacuucucccugggggccgccgugaaggccggcgccugcaugcucgacgggggcaacaugcuggagaccaucaaggucacgccccagaccauggacggcauccucaagagcauccugaaggugaagcggucccuggggauguucgugagcgacacccccggcgagcgcaaccccuacgagaacauccuguacaagaucugccucuccggggacggcuggccguacaucgcgagccggaccuccaucgucgggcgcgccugggagaacacgaccguggaccuggagagcgacggcaagccccagaaggugggcuccgccgggagcaacaagucccugcagagcgccggcuuccccaccgggcucaccuacucccagcugaugacgcugaaggacagcaugaugcagcuggaccccuccgccaagaccuggaucgacaucgagggccggccggaggaccccgucgagaucgcgcucuaccagcccaugagcgggugcuacauccacuucuuccgcgagcccaccgaccugaagcaguucaagcaggacgccaaguacucccacggcaucgacguggccgaccuguucccggcccagcccggccucaccagcgccgucaucgaggcgcugccccggaacauggugcugacgugccaggggagcgacgacaucaagcgccuccuggacucccagggccgccgggacaucaagcugaucgacaucgcccucagcaaggccgacucccgccgguucgagaacgccgugugggaccagugcaaggaccugugccacaugcacaccggggucgugguggagaagaagaagcgcggcgggaaggaggagaucacgccccacugcgcccugauggacugcaucauguacgacgcggccgucagcggcggccucaacaucccggugcugcgggccgugcugccccgcgacauggucuuccggaccuccagccccaagguggugcucugaggacuaguaauaaggaaacuguaugaaugucugugggcaggaagugaagagauccuucuguaaagguuuuuggaauuaugucugcugaauaauaaacuuuuuugaaauaauaaaucugguagaaaaaugagaucucaaaggcucuuuucagagccaccaaaaaaaaaaaaaaaaaaaaaaaaaaaaaaaaaaaaaaaaaaaaaaaaaaaaaaaaaaaaaaaaaaaaaaaaaaaaaaaaaaaaaaaaaaaaaaaaaaaaa

SEQ ID NO: 20197 - RNA, 2097 nt, Artificial Sequence
  mRNA product Design b-4 (hSL-A100) comprising derived and/or modified sequence from LASV(LASV253-NIG-2011;Clade II)__AIT17671__SP-HsALB_NP(2-569) (opt1)
aggagagucccgcagucggcguccagcggcucugcuuguucgugugugugucguugcaggccuuauucaagcuuaccaugaagugggugaccuucaucagccugcucuuccuguucuccagcgccuacuccagcgccuccaaggaggugaaguccuuccuguggacccagagccuccgccgggagcugagcggcuacugcuccagcaucaagcugcaggucgugaaggacgcccaggcgcuccugcacgggcuggacuucuccgaggugagcaacguccagcgccucaugcggaagcagaagcgcgacgacuccgaccugaagcggcugcgcgaccucaaccaggccgugaacaaccugguggagcucaagagcacccagcagaaguccguccugcgggugggcacccugaccagcgacgaccugcucacccuggccgccgaccuggagaagcucaaguccaaggugauccgcaccgagcggccccugagcuccggggucuacaugggcaaccugagcacgcagcagcucgagcagcgccgggcccugcugaacaugaucgggauggugggcggcgcgcaggggacccagccgggccgcgacggggugguccgggugugggacgugaagaaccccgaccuccugaacaaccaguucggcaccaugcccucccugacccucgccugccugacgaagcaggggcaggucgaccugaacgacguggugcucgcccugaccgaccugggccucaucuacaccgccaaguaccccaacagcuccgaccuggaccgccugagccagagccacccgauccucaacauggucgacaccaagaaguccagccugaacaucuccggcuacaacuucagccugggggcggccgugaaggccggcgccugcaugcucgacgggggcaacaugcuggagacgaucaaggugacgccccagaccauggacggcauccugaaguccauccucaaggucaagaagucccuggggauguucgugagcgacacccccggcgagcggaaccccuacgagaacauccuguacaagaucugccucagcggggacggcuggccguacaucgccucccgcaccagcaucguggggcgggcgugggagaacaccaccgucgaccuggaguccgacggcaagccccagaaggugggcaccgccgggagcaacaagucccugcagagcgccggcuuccccacggggcucaccuacucccagcugaugacccugaaggacagcaugaugcagcuggaccccuccgccaagaccuggaucgacaucgagggccgcccggaggaccccgucgagaucgcccucuaccagcccaugagcgggugcuacauccacuucuuccgggagcccacggaccugaagcaguucaagcaggacgcgaaguacucccacggcaucgacgugaccgaccuguucccggcccagcccggccucaccagcgccgugaucgaggcccugccccgcaacaugguccugaccugccaggggagcgacgacaucaagcggcuccuggacucccagggccgccgcgacaucaagcugaucgacaucgcccucagcaaggcggacucccggcgcuucgagaacgccgugugggaccagugcaaggaccugugccacaugcacacggggguggucguggagaagaagaagcggggcgggaaggaggagaucacgccccacugcgcccugauggacugcaucauguacgacgccgccgugagcggcggccucaacaucccgguccugcgcgcggugcugccccgggacaugguguuccgcaccuccagccccaaggucgugcucugaggacuaguaauaaggaaacuguaugaaugucugugggcaggaagugaagagauccuucuguaaagguuuuuggaauuaugucugcugaauaauaaacuuuuuugaaauaauaaaucugguagaaaaaugagaucucaaaggcucuuuucagagccaccaaaaaaaaaaaaaaaaaaaaaaaaaaaaaaaaaaaaaaaaaaaaaaaaaaaaaaaaaaaaaaaaaaaaaaaaaaaaaaaaaaaaaaaaaaaaaaaaaaaaa

SEQ ID NO: 20198 - RNA, 2097 nt, Artificial Sequence
  mRNA product Design b-4 (hSL-A100) comprising derived and/or modified sequence from LASV(LASV254-NIG-2011;Clade II)__AIT17675__SP-HsALB_NP(2-569) (opt1)
aggagagucccgcagucggcguccagcggcucugcuuguucgugugugugucguugcaggccuuauucaagcuuaccaugaagugggugaccuucaucagccugcucuuccuguucuccagcgccuacuccagcgccuccaaggaggugaaguccuuccuguggacccagagccuccgccgggagcugagcggcuacugcuccagcaucaagcugcaggucgugaaggacgcccaggcgcuccugcacgggcuggacuucuccgaggugagcaacguccagcgccucaugcggaagcagaagcgcgacgacuccgaccugaagcggcugcgcgaccucaaccaggccgugaacaaccugguggagcucaagagcacccagcagaaguccguccugcgggugggcacgcugaccagcgacgaccugcucacccuggccgccgaccuggagaagcucaaguccaaggugauccgcaccgagcggccccugagcuccggggucuacaugggcaaccugagcacgcagcagcucgagcagcgccgggcccugcugaacaugaucgggauggugggcggcgcgcaggggacccagccgggccgcgacggggugguccgggugugggacgugaagaaccccgaccuccugaacaaccaguucggcaccaugcccucccugacccucgccugccugacgaagcaggggcaggucgaccugaacgacgccgugcucgcccugaccgaccugggccucaucuacaccgcgaaguaccccaacagcuccgaccuggaccgccugagccagagccacccgauccucaacaugguggacaccaagaaguccagccugaacaucuccggcuacaacuucagccugggggccgccgucaaggccggcgccugcaugcucgacgggggcaacaugcuggagacgaucaaggugacgccccagaccauggacggcauccugaaguccauccucaaggugaagaagucccuggggauguucgucagcgacacccccggcgagcggaaccccuacgagaacauccuguacaagaucugccucagcggggacggcuggccguacaucgcgucccgcaccagcaucguggggcgggccugggagaacaccaucguggaccuggaguccgacggcaagccccagaaggucggcaccgccgggagcaacaagucccugcagagcgccggcuuccccaccgggcucacguacucccagcugaugacccugaaggacagcaugaugcagcuggaccccuccgccaagaccuggaucgacaucgagggccgcccggaggaccccguggagaucgcgcucuaccagcccaugagcgggugcuacauccacuucuuccgggagcccaccgaccugaagcaguucaagcaggacgccaaguacucccacggcaucgacgucgccgaccuguucccggcccagcccggccucacgagcgccgugaucgaggcgcugccccgcaacauggugcugaccugccaggggagcgacgacaucaagcggcuccuggacucccagggccgccgcgacaucaagcugaucgacaucgcccucagcaaggccgacucccggcgcuucgagaacgccgucugggaccagugcaaggaccugugccacaugcacaccggggugguggucgagaagaagaagcggggcgggaaggaggagaucacgccccacugcgcccugauggacugcaucauguacgacgcggccgugagcggcggccucaacaucccggugcugcgcgccguccugccccgggacaugguguuccgcaccuccagccccaaggugguccucugaggacuaguaauaaggaaacuguaugaaugucugugggcaggaagugaagagauccuucuguaaagguuuuuggaauuaugucugcugaauaauaaacuuuuuugaaauaauaaaucugguagaaaaaugagaucucaaaggcucuuuucagagccaccaaaaaaaaaaaaaaaaaaaaaaaaaaaaaaaaaaaaaaaaaaaaaaaaaaaaaaaaaaaaaaaaaaaaaaaaaaaaaaaaaaaaaaaaaaaaaaaaaaaaa

SEQ ID NO: 20199 - RNA, 2097 nt, Artificial Sequence
  mRNA product Design b-4 (hSL-A100) comprising derived and/or modified sequence from LASV(Nig08-04;Clade II)__ADU56611__SP-HsALB_NP(2-569) (opt1)
aggagagucccgcagucggcguccagcggcucugcuuguucgugugugugucguugcaggccuuauucaagcuuaccaugaagugggugaccuucaucagccugcucuuccuguucuccagcgccuacuccagcgccuccaaggaggugaaguccuuccuguggacccagagccuccgccgggagcugagcggcuacugcuccaacaucaagcugcaggucgugaaggacgcccaggcgcuccugcacgggcuggacuucagcgagguguccaacguccagcgccucaugcggaagcagaagcgcgacgacggcgaccugaagcggcugcgcgaccucaaccaggccgugaacaaccugguggagcucaagagcacccagcagaaguccguccugcggguggggacccugaccagcgacgaccugcucacccuggccgccgaccuggagaagcucaaguccaaggugauccgcaccgagcggccccugagcuccggcgucuacauggggaaccugagcacgcagcagcucgagcagcgcaaggcccugcuguccaugaucggcauggugggcggggcgcagggcacccagccggggcgggacggcgugguccgcgugugggacgugaagaaccccgaccuccugaacaaccaguucgggaccaugcccagccugacccucgccugccugacgaagcagggccaggucgaccugaacgacgccgugcucgcccugaccgaccugggccucaucuacaccgcgaaguaccccaacuccagcgaccuggaccggcugucccagagccacccgauccucaacaugguggacaccaagaaguccagccugaacaucagcggguacaacuucucccugggcgccgccgucaaggccggggccugcaugcucgacggcggcaacaugcuggagacgaucaaggugacgccccagaccauggacgggauccucaagagcauccugaaggugaagcgcucccugggcauguucgucagcgacacccccggggagcggaaccccuacgagaacauccuguacaagaucugccucuccggcgacggguggccguacaucgcgagccgcaccuccaucgugggccgggccugggagaacaccaccguggaccuggagagcgacggcaagccccagaaggucgggaccgccggcuccaacaagagccugcaguccgccggguuccccacgggccucaccuacagccagcugaugacccugaaggacuccaugaugcagcuggaccccagcgccaagaccuggaucgacaucgaggggcgcccggaggaccccguggagaucgcgcucuaccagcccauguccggcugcuacauccacuucuuccgggagcccacggaccugaagcaguucaagcaggacgccaaguacagccacggcaucgacgucaccgaccuguucuccgcccagccggggcucaccagcgccgugaucgaggcccugccccgcaacauggugcugaccugccagggcagcgacgacaucaagaagcuccuggacucccaggggcggcgcgacaucaagcugaucgacaucagccucaacaaggcggacucccgccgguucgagaacgccgucugggaccagugcaaggaccugugccacaugcacacgggcgugguggucgagaagaagaagcgcgggggcaaggaggagaucacgccccacugcgcccugauggacugcaucauguucgacgccgccgugagcggcgggcucaacauccccauccugcgggcggugcugccgcgcgacauggucuuccggaccuccagccccaagguggugcucugaggacuaguaauaaggaaacuguaugaaugucugugggcaggaagugaagagauccuucuguaaagguuuuuggaauuaugucugcugaauaauaaacuuuuuugaaauaauaaaucugguagaaaaaugagaucucaaaggcucuuuucagagccaccaaaaaaaaaaaaaaaaaaaaaaaaaaaaaaaaaaaaaaaaaaaaaaaaaaaaaaaaaaaaaaaaaaaaaaaaaaaaaaaaaaaaaaaaaaaaaaaaaaaaa

SEQ ID NO: 20200 - RNA, 2100 nt, Artificial Sequence
  mRNA product Design b-4 (hSL-A100) comprising derived and/or modified sequence from LASV(GA391;Clade III)__AAA46284__SP-HsALB_NP(2-570) (opt1)
aggagagucccgcagucggcguccagcggcucugcuuguucgugugugugucguugcaggccuuauucaagcuuaccaugaagugggugaccuucaucagccugcucuuccuguucuccagcgccuacuccagcgccuccaaggaggugcgcagcugccuguggacccagucccuccggcgcgagcugagcggcuacugcuccaacaucaagcugcaggucgugaaggacgcccaggcgcuccugcacgggcuggacuucagcgagguguccaacguccagcggcucaugcgcaagcagaagcgggacgacggcgaccugaagcgccugcgggaccucaaccaggccgugaacaaccugguggagcugaaguccacccagcagaaguccguccuccgcguggggacgcugagcuccgacgaccugcucauccuggccgccgaccuggagaagcucaagagcaaggugacccggaccgagcgcccccuguccagcggcgucuacauggggaaccuguccagccagcagcucgaccagcggcgcgcccugcugaacaugaucggcaugaccggcguguccgggggcgggaagggcgcgagcaacgggaucgugcgggucugggacgugaagaacgccgagcuccugaacaaccaguucggcacgaugccgucccugacccucgccugccugaccaagcagggccagguggaccugaacgacgccguccaggcgcucaccgaccuggggcugaucuacacggccaaguaccccaacagcagcgaccucgaccgccugucccagagccaccccauccugaacaugaucgacaccaagaaguccagccucaacaucuccggcuacaacuucagccugggggccgccgugaaggccggcgcgugcaugcuggacggcgggaacaugcucgagaccaucaaggugagcccccagaccauggacggcauccucaagagcauccugaaggucaagaagucccuggggauguucgugagcgacacgccgggcgagcggaaccccuacgagaacauccuguacaagaucugccuguccggggacggcuggagcuacaucgccucccgcaccagcaucgugggccgggccugggagaacaccgucguggaccucgagcaggacaacaagccccagaagaucgggaacggcggguccaacaagagccugcaguccgccggcuucgccgcggggcugaucuacagccagcucaugacccugaaggacuucaagugcuucaaccugauccccaacgccaagacguggauggacaucgagggccgcccggaggaccccguggagaucgcccuguaccagcccuccagcggcugcuacguccacuucuuccgggagcccaccgaccucaagcaguucaagcaggacgccaaguacagccacgggcgcgacgugaccgaccuguucgccgcgcagccgggccugaccuccgccgucaucgaggcccucccccggaacauggugaucacgugccaggggagcgaggacauccgcaagcugcuggagucccagggccgccgggacaucaagcucaucgacaucacccugagcaaggccgacucccgcaaguucgagaacgccgugugggaccaguucaaggaccugugccacaugcacaccggggucgugguggagaagaagaagcggggcggcaaggaggagaucacgccccacugcgcgcucauggacugcaucauguucgacgccgccgucagcgggggccuggacgccaaggugcugcgcgugguccucccccgggacaugguguuccgcaccuccaccccgaaggugguccugugaggacuaguaauaaggaaacuguaugaaugucugugggcaggaagugaagagauccuucuguaaagguuuuuggaauuaugucugcugaauaauaaacuuuuuugaaauaauaaaucugguagaaaaaugagaucucaaaggcucuuuucagagccaccaaaaaaaaaaaaaaaaaaaaaaaaaaaaaaaaaaaaaaaaaaaaaaaaaaaaaaaaaaaaaaaaaaaaaaaaaaaaaaaaaaaaaaaaaaaaaaaaaaaaa

SEQ ID NO: 20201 - RNA, 2097 nt, Artificial Sequence
  mRNA product Design b-4 (hSL-A100) comprising derived and/or modified sequence from LASV(Nig08-A19;Clade III)__ADU56619__SP-HsALB_NP(2-569) (opt1)
aggagagucccgcagucggcguccagcggcucugcuuguucgugugugugucguugcaggccuuauucaagcuuaccaugaagugggugaccuucaucagccugcucuuccuguucuccagcgccuacuccagcgccuccaaggaggugaaguccuuccuguggacccagucccuccgccgggagcugagcggcuacugcuccaacaucaagcugcaggucgugaaggacgcccaggcgcuccugcacgggcuggacuucagcgagguguccaacguccagcgccucaugcggaagcagaagcgcgacgacggcgaccugaagcggcugcgcgaccucaaccaggccgugaacaaccugguggagcucaagagcacccagcagaaguccguccugcggguggggacccugagcuccgacgaccugcucgugcuggccgccgaccuggagaagcucaagagcaaggucgugcgcaccgagcggccccuguccagcggcaucuacauggggaaccuguccagccagcagcucgaccagcgcaaggcccugcugaacaugaucggcaugaccggcgggaacggcgggcggaacaccacguccgacggcaucgugcgcgucugggacgugaagaacgcggagcuccugaacaaccaguucgggaccaugccgagccugacccucgccugccugaccaagcagggccagguggaccugaacgacgccguccaggcccucacggaccugggccugaucuacaccgcgaaguaccccaacuccagcgaccucgaccggcuggcccagagccaccccauccugaacaugaucgacaccaagaaguccagccucaacaucuccggguacaacuucagccugggcgccgccgugaaggccggggcgugcaugcuggacggcggcaacaugcucgagaccaucaaggugagcccccagacgauggacgggauccucaagagcauccugaaggucaagcgcucccugggcauguucaucagcgacaccccgggggagcggaaccccuacgagaacauccuguacaagaucugccuguccggcgacggguggcccuacaucgccagccgcaccuccaucgugggccgggccugggagaacaccguggucgaccucgagagcgacaacaagccccagaagacgggcaacgggggcuccaacaagagccugcaguccgccggguucgccgcgggccugaccuacagccagcucaugacccugaaggacuccaugcugcagcuggacccgaacgccaagaccuggauggacaucgaggggcgccccgaggaccccguggagaucgcccucuaccagcccagcuccggcugcuacauccacuucuuccgggagccgacggaccugaagcaguucaagcaggacgccaaguacagccacggcaucgacgugaccgaccuguucgccgcgcagcccgggcucaccagcgccgucaucgaggcccugccccgcaacauggugaucacgugccagggcuccgaggacauccggaagcugcucgagagccaggggcgccgcgacaucaagcugaucgacaucucccugagcaaggucgacucccggaaguucgagaacgccgugugggaccaguucaaggaccucugccacaugcacaccggcaucguggucgagaagaagaagcgcgggggcaaggaggagaucacgccccacugcgcccugauggacugcaucauguucgacgcggccgugagcggcgggguggacgccaagguccugcgggccgugcucccgcgcgacaugguguuccggaccuccacccccaaggucgugcugugaggacuaguaauaaggaaacuguaugaaugucugugggcaggaagugaagagauccuucuguaaagguuuuuggaauuaugucugcugaauaauaaacuuuuuugaaauaauaaaucugguagaaaaaugagaucucaaaggcucuuuucagagccaccaaaaaaaaaaaaaaaaaaaaaaaaaaaaaaaaaaaaaaaaaaaaaaaaaaaaaaaaaaaaaaaaaaaaaaaaaaaaaaaaaaaaaaaaaaaaaaaaaaaaa

SEQ ID NO: 20202 - RNA, 2097 nt, Artificial Sequence
  mRNA product Design b-4 (hSL-A100) comprising derived and/or modified sequence from LASV(G1180-SLE-2010;Clade IV)__AIT17169__SP-HsALB_NP(2-569) (opt1)
aggagagucccgcagucggcguccagcggcucugcuuguucgugugugugucguugcaggccuuauucaagcuuaccaugaagugggugaccuucaucagccugcucuuccuguucuccagcgccuacuccagcgccuccaaggagaucaagagcuuccuguggacccagucccuccgccgggagcugagcggcuacugcuccaacaucaagcuccagguggucaaggacgcccaggcgcugcugcacgggcuggacuucagcgagguguccaacgugcagcgccucaugcggaaggagcgccgggacgacaacgaccugaagcgccugcgggaccucaaccaggccgucaacaaccugguggagcucaagagcacccagcagaaguccauccugcgcgugggcacccugaccagcgacgaccugcucauccuggccgccgaccuggagaagcucaaguccaaggucauccggaccgagcgcccccugagcgccgggguguacaugggcaaccuguccagccagcagcucgaccagcggcgcgcgcugcuguccaugaucgggaugagcuccggcaaccagcgggcccaggccggccgcgacggggugguccgggugugggacgugaagaacgucgagcuccugaacaaccaguucggcaccaugccgagccugacgcucgccugccugaccaagcagggccagguggaccugaacgacgcggugcaggcccucaccgaccuggggcugaucuacaccgccaaguaccccaacacguccgaccucgaccgccugacccagagccaccccauccugaacaugaucgacaccaagaaguccagccucaacaucagcggguacaacuucucccugggcgccgccgucaaggcgggcgccugcaugcuggacgggggcaacaugcucgagaccaucaaggugagcccccagacgauggacgggauccugaaguccauccugaaggugaagaaggcccucggcauguucaucagcgacaccccgggcgagcggaaccccuacgagaacauccuguacaagaucugccuguccggggacggcuggcccuacaucgccagccgcaccuccaucaccgggcgggccugggagaacacggucguggaccucgagagcgacggcaagccccagaaggcgggguccaacaacagcaacaagucccugcagagcgugggcuucaccgccggccugaccuacucccagcucaugacccugaaggacgccaugcugcagcuggacccgaacgccaagacguggauggacaucgaggggcgccccgaggaccccgucgagaucgcccucuaccagcccagcuccggcugcuacauccacuucuuccgggagccgaccgaccugaagcaguucaagcaggacgcgaaguacagccacgggaucgacgugaccgaccuguucgccgcccagcccggccucaccuccgccgugaucgacgcccugccccgcaacauggucaucacgugccaggggagcgacgacauccgcaagcugcucgagagccagggccggaaggacaucaagcugaucgacaucgcgcuguccaagaccgacagccgcaaguacgagaacgccgugugggaccaguacaaggaccucugccacaugcacaccggcgucgugguggagaagaagaagcgcgggggcaaggaggagaucacgccccacugcgcccugauggacugcaucauguucgacgccgcggucuccgggggccugaacaccagcgugcuccgggccgugcugccgcgggacauggucuuccgcaccuccacgccccggguggugcugugaggacuaguaauaaggaaacuguaugaaugucugugggcaggaagugaagagauccuucuguaaagguuuuuggaauuaugucugcugaauaauaaacuuuuuugaaauaauaaaucugguagaaaaaugagaucucaaaggcucuuuucagagccaccaaaaaaaaaaaaaaaaaaaaaaaaaaaaaaaaaaaaaaaaaaaaaaaaaaaaaaaaaaaaaaaaaaaaaaaaaaaaaaaaaaaaaaaaaaaaaaaaaaaaa

SEQ ID NO: 20203 - RNA, 2097 nt, Artificial Sequence
  mRNA product Design b-4 (hSL-A100) comprising derived and/or modified sequence from LASV(G1442-SLE-2011;Clade IV)__AIT17181__SP-HsALB_NP(2-569) (opt1)
aggagagucccgcagucggcguccagcggcucugcuuguucgugugugugucguugcaggccuuauucaagcuuaccaugaagugggugaccuucaucagccugcucuuccuguucuccagcgccuacuccagcgccuccaaggaggugaaguccuuccuguggacccagagccuccgccgggagcugagcggcuacugcuccaacaucaagcugcaggucgugaaggacgcccaggcgcuccugcacgggcuggacuucagcgagguguccaacguccagcgccucaugcggaagcagcgccgggacgacaacgaccugaagcgccugcgggaccucaaccaggccgugaacaaccugguggagcucaagagcacccagcagaaguccguccugcgcgugggcacccugaccagcgacgaccugcucgugcuggccgccgaccuggagaagcucaaguccaaggucauccggaccgagcgcccccugagcgccgggguguacaugggcaaccuguccagccagcagcucgaccagcggcgcgcgcugcugaacaugaucgggauguccggcggcauccaggggacccggacgggccgcgacggggugguccgggugugggacgugaagaacgccgaccuccugaacaaccaguucggcaccaugccgagccugacccucgccugccugaccaagcaggggcaggucgaccugaacgacguggugcaggcccucacggaccugggccugaucuacaccgcgaaguaccccaacgccuccgaccucgaccgccugacccagagccaccccauccugaacaugaucgacaccaagaaguccagccucaacaucagcggcuacaacuucucccugggggccgccgucaaggccggcgcgugcaugcuggacgggggcaacaugcucgagacgaucaaggugagcccccagaccauggacggcauccugaaguccauccugaaggugaagaagacccucgggauguucaucagcgacaccccgggcgagcggaaccccuacgagaacauccuguacaagaucugccuguccggggacggcuggcccuacaucgccagccgcacguccaucaccgggcgggccugggagaacaccgucguggaccucgagagcgacggcaagccccagaaggccggcuccaacaacagcaacaagucccugcagagcgccggguucgcggccggccugaccuacucccagcucaugacgcugaaggacgccaugcugcagcuggacccgaacgccaagaccuggauggacaucgaggggcgccccgaggaccccguggagaucgcccucuaccagcccagcuccggcugcuacauccacuucuuccgggagccgaccgaccugaagcaguucaagcaggacgcgaaguacagccacgggaucgacgucaccgaccuguucgccgcccagcccggccucacguccgccgugaucgaggcccugccccgcaacauggucaucacgugccagggcagcgacgacaucaagaagcugcucgagucccaggggcgcaaggacaucaagcugaucgacaucgcgcugagcaagaccgacagccggaaguacgagaacgccgugugggaccaguacaaggaccucugccacaugcacaccggcguggucguggagaagaagaagcgcgggggcaaggaggagaucaccccgcacugcgcccugauggacugcaucauguucgacgccgcgguguccgggggccugaacacccucguccugcgggccgugcugccccgcgacaugguguuccggaccagcacgccccgcgucgugcucugaggacuaguaauaaggaaacuguaugaaugucugugggcaggaagugaagagauccuucuguaaagguuuuuggaauuaugucugcugaauaauaaacuuuuuugaaauaauaaaucugguagaaaaaugagaucucaaaggcucuuuucagagccaccaaaaaaaaaaaaaaaaaaaaaaaaaaaaaaaaaaaaaaaaaaaaaaaaaaaaaaaaaaaaaaaaaaaaaaaaaaaaaaaaaaaaaaaaaaaaaaaaaaaaa

SEQ ID NO: 20204 - RNA, 2097 nt, Artificial Sequence
  mRNA product Design b-4 (hSL-A100) comprising derived and/or modified sequence from LASV(G3010-SLE-2013;Clade IV)__AIT17345__SP-HsALB_NP(2-569) (opt1)
aggagagucccgcagucggcguccagcggcucugcuuguucgugugugugucguugcaggccuuauucaagcuuaccaugaagugggugaccuucaucagccugcucuuccuguucuccagcgccuacuccagcgccuccaaggagaucaagagcuuccuguggacccagucccuccgccgggagcugagcggcuacugcuccaacaucaagcuccagguggucaaggacgcccaggcgcugcugcacgggcuggacuucagcgagguguccaacgugcagcgccucaugcggaaggagcgccgggacgacaacgaccugaagcgccugcgggaccucaaccaggccgucaacaaccugguggagcucaagagcacccagcagaaguccauccugcgcgugggcacccugaccagcgacgaccugcucauccuggccgccgaccuggagaagcucaaguccaaggucacccggaccgagcgcccccugagcgccgggguguacaugggcaaccuguccagccagcagcucgaccagcggcgcgcgcugcuguccaugaucgggaugagcuccggcgugcagggcgcccgggccgggcgcgacggcgucgugcgggugugggacgucaagaacgccgagcuccugaacaaccaguucgggacgaugccgagccugacccucgcgugccugaccaagcagggccagguggaccugaacgacgugguccaggcccucaccgaccuggggcugaucuacacggccaaguaccccaacaccuccgaccucgaccgccugacccagagccaccccauccugaacaugaucgacaccaagaaguccagccucaacaucagcggcuacaacuucucccugggcgccgccgugaaggcgggggccugcaugcuggacggcgggaacaugcucgagacgaucaaggugagcccccagaccauggacggcauccugaaguccauccugaaggucaagaaggcccucggcauguucaucagcgagaccccgggggagcggaaccccuacgagaacauccuguacaagaucugccuguccggcgacggguggcccuacaucgccagccgcaccuccaucacgggccgggccugggagaacaccgugguggaccucgagagcgacgggaagccccagaaggcgggcuccaacaacagcaacaagucccugcagagcgccggcuucaccgccgggcugaccuacucccagcucaugacgcugaaggacgccaugcugcagcuggacccgaacgccaagaccuggauggacaucgagggccgccccgaggaccccgucgagguggcgcucuaccagcccagcuccgggugcuacauccacuucuuccgggagccgaccgaccugaagcaguucaagcaggacgccaaguacagccacggcaucgacgugaccgaccuguucgccgcccagcccgggcucacguccgccgucaucgacgcgcugccccgcaacauggugaucacgugccagggcagcgacgacaucaagaagcugcucgagagccagggccgcaaggacaucaagcugaucgacaucgcccuguccaagaccgacagccggaaguacgagaacgccgucugggaccaguacaaggaccucugccacaugcacaccggggugguggucgagaagaagaagcgcggcgggaaggaggagaucaccccgcacugcgcccugauggacugcaucauguucgacgcggccguguccggcgggcugaacaccagcgugcuccgggccguccugccccgcgacaugguguuccggaccuccacgccccgcgugguccugugaggacuaguaauaaggaaacuguaugaaugucugugggcaggaagugaagagauccuucuguaaagguuuuuggaauuaugucugcugaauaauaaacuuuuuugaaauaauaaaucugguagaaaaaugagaucucaaaggcucuuuucagagccaccaaaaaaaaaaaaaaaaaaaaaaaaaaaaaaaaaaaaaaaaaaaaaaaaaaaaaaaaaaaaaaaaaaaaaaaaaaaaaaaaaaaaaaaaaaaaaaaaaaaaa

SEQ ID NO: 20205 - RNA, 2097 nt, Artificial Sequence
  mRNA product Design b-4 (hSL-A100) comprising derived and/or modified sequence from LASV(G502-SLE-2009;Clade IV)__AIT17127__SP-HsALB_NP(2-569) (opt1)
aggagagucccgcagucggcguccagcggcucugcuuguucgugugugugucguugcaggccuuauucaagcuuaccaugaagugggugaccuucaucagccugcucuuccuguucuccagcgccuacuccagcgccuccaaggagaucaagagcuuccuguggacccagucccuccgccgggagcugagcggcuacugcuccaacaucaagcuccagguggucaaggacgcccaggcgcugcugcacgggcuggacuucagcgagguguccaacgugcagcgccucaugcggaaggagcgccgggacgacaacgaccugaagcgccugcgggaccucaaccaggccgucaacaaccugguggagcucaagagcacccagcagaaguccauccugcgcgugggcacccugaccagcgacgaccugcucauccuggccgccgaccuggagaagcucaaguccaaggucauccggaccgagcgcccccugagcgccgggguguacaugggcaaccuguccagccagcagcucgaccagcggcgcgcgcugcuguccaugaucgggaugagcggcggcaaccagggggugcgggccggcaaggacggggucgugcgcgugugggacgucaagaacgccgagcuccugaacaaccaguucggcaccaugccgucccugacgcucgccugccugaccaagcagggccagguggaccugaacgacgcggugcaggcccucaccgaccuggggcugaucuacaccgccaaguaccccaacacgagcgaccucgaccggcugacccagucccaccccauccugaacaugaucgacaccaagaaguccagccucaacaucuccggcuacaacuucagccugggggccgccgucaaggcgggcgccugcaugcuggacgggggcaacaugcucgagaccaucaaggugagcccccagacgauggacggcauccucaagagcauccugaaggugaagaaggcccuggggauguucaucuccgacaccccgggcgagcgcaaccccuacgagaacauccuguacaagaucugccugagcggggacggcuggcccuacaucgccucccggaccagcaucaccgggcgcgccugggagaacacggucguggaccucgaguccgacggcaagccccagaaggcgggcagcaacaacuccaacaagagccugcaguccgccggguucaccgccggccugaccuacagccagcucaugacccugaaggacgccaugcugcagcuggacccgaacacgaagaccuggauggacaucgaggggcggcccgaggaccccguggagaucgcccucuaccagcccuccagcggcugcuacauccacuucuuccgcgagccgaccgaccugaagcaguucaagcaggacgcgaaguacucccacgggaucgacgucaccgaccuguucgccgcccagcccggccucacgagcgccgugaucgacgcccugccccggaacauggugaucacgugccagggcuccgacgacauccgcaagcugcucgagagccaggggcgcaaggacaucaagcugaucgacaucgcgcugaacaagaccgacagccggaaguacgagaacgccgucugggaccaguacaaggaccucugccacaugcacaccggcguggucguggagaagaagaagcgcgggggcaaggaggagaucaccccgcacugcgcccugauggacugcaucauguucgacgccgcgguguccgggggccugaacaccagcguccuccgggccgugcugccccgcgacaugguguuccggaccuccacgccccgcgucgugcugugaggacuaguaauaaggaaacuguaugaaugucugugggcaggaagugaagagauccuucuguaaagguuuuuggaauuaugucugcugaauaauaaacuuuuuugaaauaauaaaucugguagaaaaaugagaucucaaaggcucuuuucagagccaccaaaaaaaaaaaaaaaaaaaaaaaaaaaaaaaaaaaaaaaaaaaaaaaaaaaaaaaaaaaaaaaaaaaaaaaaaaaaaaaaaaaaaaaaaaaaaaaaaaaaa

SEQ ID NO: 20206 - RNA, 2097 nt, Artificial Sequence
  mRNA product Design b-4 (hSL-A100) comprising derived and/or modified sequence from LASV(G733-SLE-2010;Clade IV)__AIT17155__SP-HsALB_NP(2-569) (opt1)
aggagagucccgcagucggcguccagcggcucugcuuguucgugugugugucguugcaggccuuauucaagcuuaccaugaagugggugaccuucaucagccugcucuuccuguucuccagcgccuacuccagcgccuccaaggagaucaagagcuuccuguggacccagucccuccgccgggagcugagcggcuacugcuccaacaucaagcuccagguggucaaggacgcccaggcgcugcugcacgggcuggacuucagcgagguguccaacgugcagcgccucaugcggaaggagcgccgggacgacaacgaccugaagcgccugcgggaccucaaccaggccgucaacaaccugguggagcucaagagcacccagcagaaguccgugcugcgcgucggcacccugaccagcgacgagcugcucgugcuggccgccgaccuggagaagcucaaguccaaggugauccggaccgagcgcccccugagcgccggggucuacaugggcaaccuguccagccagcagcucgaccagcggcgcgcgcugcuguccaugaucgggaugagcggcggcaaccagggggcccggaccggccgcgacgggguggugcgggucugggacgugaagaacgccgagcuccugaacaaccaguucggcaccaugccgucccugacccucgccugccugaccaagcagggccagguggaccugaacgacgcgguccaggcccucaccgaccuggggcugaucuacacggccaaguaccccaacaccagcgaccucgaccgccugacccagucccaccccauccugaacaugaucgacaccaagaaguccagccucaacaucuccggcuacaacuucagccugggggccgccgugaaggcgggcgccugcaugcuggacgggggcaacaugcucgagacgaucaaggugagcccccagaccauggacggcauccucaagagcauccugaaggucaagaaggcccuggggauguucaucuccgacaccccgggcgagcggaaccccuacgagaacauccuguacaagaucugccugagcggggacggcuggcccuacaucgccucccgcaccagcaucacggggcgggccugggagaacaccgugguggaccucgaguccgacggcaagccccagaaggcgggcagcaacaacuccaacaagagccugcaguccgccggguucaccgccggccugaccuacagccagcucaugacgcugaaggacgccaugcugcagcuggacccgaacgccaagaccuggauggacaucgaggggcgccccgaggaccccgucgagaucgcgcucuaccagcccuccagcggcugcuacauccacuucuuccgggagccgaccgaccugaagcaguucaagcaggacgccaaguacucccacgggaucgacgugaccgaccuguucgccgcccagcccggccucacgagcgccgugaucgacgcgcugccccgcaacauggucaucacgugccagggcuccgacgacauccgcaagcugcucgagagccaggggcggaaggacaucaagcugaucgacaucgcccugagcaagaucgacucccgcaaguacgagaacgccgugugggaccaguacaaggaccucugccacaugcacaccggcgucgugguggagaagaagaagcgcgggggcaaggaggagaucacgccccacugcgcccugauggacugcaucauguucgacgcggccgucagcgggggccugaacucccucgugcugcgggccgugcugccgcgggacauggucuuccgcaccagcacgccccggguggugcucugaggacuaguaauaaggaaacuguaugaaugucugugggcaggaagugaagagauccuucuguaaagguuuuuggaauuaugucugcugaauaauaaacuuuuuugaaauaauaaaucugguagaaaaaugagaucucaaaggcucuuuucagagccaccaaaaaaaaaaaaaaaaaaaaaaaaaaaaaaaaaaaaaaaaaaaaaaaaaaaaaaaaaaaaaaaaaaaaaaaaaaaaaaaaaaaaaaaaaaaaaaaaaaaaa

SEQ ID NO: 20207 - RNA, 2097 nt, Artificial Sequence
  mRNA product Design b-4 (hSL-A100) comprising derived and/or modified sequence from MOPV/LASV reassortant(IGS-1;Clade IV)__AFY05578__SP-HsALB_NP(2-569) (opt1)
aggagagucccgcagucggcguccagcggcucugcuuguucgugugugugucguugcaggccuuauucaagcuuaccaugaagugggugaccuucaucagccugcucuuccuguucuccagcgccuacuccagcgccuccaaggagaucaagagcuuccuguggacccagucccuccgccgggagcugagcggcuacugcuccaacaucaagcuccagguggucaaggacgcccaggcgcugcugcacgggcuggacuucagcgagguguccaacgugcagcgccucaugcggaaggagcgccgggacgacaacgaccugaagcgccugcgggaccucaaccaggccgucaacaaccugguggagcucaagagcacccagcagaaguccauccugcgcgugggcacccugaccagcgacgaccugcucauccuggccgccgaccuggagaagcuccgguccaaggucauccgcaccgagcggccccugagcgccgggguguacaugggcaaccuguccagccagcagcucgaccagcgccgggcgcugcugaacaugaucgggauguccggcggcaaccagggggcccgcgccggccgggacggggugguccgcgugugggacgugaagaacgccgagcuccugagcaaccaguucggcaccaugccgucccugacgcucgcgugccugaccaagcaggggcaggucgaccugaacgacgccgugcaggcccucaccgaccugggccugaucuacaccgccaaguaccccaacacgagcgaccucgaccggcugacccagucccaccccauccugaacaugaucgacaccaagaaguccagccucaacaucuccggcuacaacuucagccugggggccgcggugaaggccggcgccugcaugcuggacgggggcaacaugcucgagaccaucaaggucagcccccagacgauggacggcauccucaagagcauccugaaggugaagaaggcccuggggauguucaucuccgacaccccgggcgagcgcaaccccuacgagaacauccuguacaagaucugccugagcggggacggcuggcccuacaucgccucccggaccagcaucaccgggcgcgcgugggagaacacgguggucgaccucgaguccgacggcaagccccagaaggccgacagcaacaacuccagcaagucccugcagagcgccggcuucaccgccgggcugaccuacucccagcucaugacccugaaggacgccaugcugcagcuggacccgaacgcgaagacguggauggacaucgagggccggcccgaggaccccguggagaucgcccucuaccagcccagcuccgggugcuacauccacuucuuccgcgagccgaccgaccugaagcaguucaagcaggacgccaaguacagccacggcaucgacgugaccgaccuguucgccacccagcccgggcucacguccgccgucaucgacgcgcugccccgcaacauggugaucacgugccagggcagcgacgacauccggaagcugcucgagagccagggccgcaaggacaucaagcugaucgacaucgaccuguccaagaccgacagccggaaguacgagaacgccgugugggaccaguacaaggaccucugccacaugcacaccggggucguggucgagaagaagaagcgcggcgggaaggaggagaucaccccgcacugcgcccugauggacugcaucauguucgacgccgcgguguccggcgggcugaacaccagcgugcuccgggccguccugccccgcgacaugguguuccggaccuccacgccccgcgugguccugugaggacuaguaauaaggaaacuguaugaaugucugugggcaggaagugaagagauccuucuguaaagguuuuuggaauuaugucugcugaauaauaaacuuuuuugaaauaauaaaucugguagaaaaaugagaucucaaaggcucuuuucagagccaccaaaaaaaaaaaaaaaaaaaaaaaaaaaaaaaaaaaaaaaaaaaaaaaaaaaaaaaaaaaaaaaaaaaaaaaaaaaaaaaaaaaaaaaaaaaaaaaaaaaaa

SEQ ID NO: 20208 - RNA, 2097 nt, Artificial Sequence
  mRNA product Design b-4 (hSL-A100) comprising derived and/or modified sequence from LASV(LM765-SLE-2012;Clade IV)__AIT17815__SP-HsALB_NP(2-569) (opt1)
aggagagucccgcagucggcguccagcggcucugcuuguucgugugugugucguugcaggccuuauucaagcuuaccaugaagugggugaccuucaucagccugcucuuccuguucuccagcgccuacuccagcgccuccaaggagaucaagagcuuccuguggacccagucccuccgccgggagcugagcggcuacugcuccaacaucaagcuccagguggucaaggacgcccaggcgcugcugcacgggcuggacuucagcgagguguccaacgugcagcgccucaugcggaaggagcgccgggacgacaacgaccugaagcgccugcgggaccucaaccaggccgucaacaaccugguggagcucaagagcacccagcagaaguccauccugcgcgugggcacccugaccagcgacgaccugcucauccuggccgccgaccuggagaagcucaaguccaaggucacccggaccgagcgcccccugagcgccgggguguacaugggcaaccuguccagccagcagcucgaccagcggcgcgcgcugcuggacaugaucgggauguccggcagcaaccagggcgcccgggccgggcgcgacggcgugguccgggugugggacgugaagaacgccgagcuccugaacaaccaguucgggacgaugccgucccugacccucgcgugccugaccaagcagggccaggucgaccugaacgacgccgugcaggcccucaccgaccuggggcugaucuacacggccaaguaccccaacaccagcgaccucgaccgccugacccagucccaccccauccugaacaugaucgacaccaagaaguccagccucaacaucuccggcuacaacuucagccugggcgccgcggugaaggccggggccugcaugcuggacggcgggaacaugcucgagacgaucaaggucagcccccagaccauggacggcauccucaagagcauccugaaggugaagaaggcccugggcauguucaucuccgacgccccgggggagcggaaccccuacgagaacauccuguacaagaucugccugagcggcgacggguggcccuacaucgcgucccgcaccagcaucaccggccgggccugggagaacacgguggucgaccucgaguccgacgggaagccccagaaggccggcagcaacggcuccaacaagagccugcaguccgccggguucaccgccggccugaccuacagccagcucaugacccugaaggacgcgaugcugcagcuggacccgaacgccaagacguggauggacaucgaggggcgccccgaggaccccguggagaucgcccucuaccagcccuccagcggcugcuacauccacuucuuccgggagccgaccgaccugaagcaguucaagcaggacgccaaguacucccacgggaucgacgugaccgaccuguucgccgcgcagcccggccucaccagcgccgucaucgacgcccugccccgcaacauggugaucacgugccagggcuccgacgacauccgcaagcuguucgagagccaggggcggaaggacaucaagcucaucgacaucgcccugagcaagaccgacucccgcaaguacgagaacgcggugugggaccaguacaaggaccugugccacaugcacaccggcaucgucguggagaagaagaagcgcgggggcaaggaggagaucacgccccacugcgcccucauggacugcaucauguucgacgccgccgucagcgggggccugaacaccuccgugcugcgggccgugcucccgcgggacauggucuuccgcaccagcacgccccggguggugcugugaggacuaguaauaaggaaacuguaugaaugucugugggcaggaagugaagagauccuucuguaaagguuuuuggaauuaugucugcugaauaauaaacuuuuuugaaauaauaaaucugguagaaaaaugagaucucaaaggcucuuuucagagccaccaaaaaaaaaaaaaaaaaaaaaaaaaaaaaaaaaaaaaaaaaaaaaaaaaaaaaaaaaaaaaaaaaaaaaaaaaaaaaaaaaaaaaaaaaaaaaaaaaaaaa

SEQ ID NO: 20209 - RNA, 2097 nt, Artificial Sequence
  mRNA product Design b-4 (hSL-A100) comprising derived and/or modified sequence from LASV(LM776-SLE-2012;Clade IV)__AIT17825__SP-HsALB_NP(2-569) (opt1)
aggagagucccgcagucggcguccagcggcucugcuuguucgugugugugucguugcaggccuuauucaagcuuaccaugaagugggugaccuucaucagccugcucuuccuguucuccagcgccuacuccagcgccuccaaggagaucaagagcuuccuguggacccagucccuccgccgggagcugagcuccuacugcagcaacaucaagcuccagguggucaaggacgcccaggcgcugcugcacggccuggacuucuccgaggugagcaacgugcagcgccucaugcggaaggagcgccgggacgacaacgaccugaagcgccugcgggaccucaaccaggccgucaacaaccugguggagcugaaguccacccagcagaaguccauccuccgcguggggacccugaccuccgacgaccugcucauccuggccgccgaccuggagaagcucaagagcaaggucacccggaccgagcgcccccuguccgccggcguguacauggggaaccugagcucccagcagcucgaccagcggcgcgcgcugcugagcaugaucggcauguccgggagcaaccagggcgcccgggccggccgcgacggggugguccgggugugggacgugaagaacgccgagcuccugaacaaccaguucggcacgaugccgucccugacccucgcgugccugaccaagcaggggcaggucgaccugaacgacgccgugcaggcccucaccgaccugggccugaucuacacggccaaguaccccaacaccagcgaccucgaccgccugacccagagccaccccauccugaacaugaucgacaccaagaaguccagccucaacaucuccggguacaacuucagccugggcgccgcggugaaggccggcgccugcaugcuggacgggggcaacaugcucgagacgaucaaggucagcccccagaccauggacgggauccucaagagcauccugaaggugaagaaggcccugggcauguucaucuccgacaccccgggcgagcggaaccccuacgagaacauccuguacaagaucugccugagcggggacggcuggcccuacaucgccucccgcaccagcaucacggggcgggcgugggagaacaccguggucgaccucgaguccgacggcaagccccagaaggccgggagcaacaacuccaacaagagccugcaguccgccggcuucaccgccggccugaccuacagccagcucaugacgcugaaggacgccaugcugcagcuggacccgaacgcgaagaccuggauggacaucgaggggcgccccgaggaccccguggagguggcccucuaccagcccuccagcggcugcuacauccacuucuuccgggagccgaccgaccugaagcaguucaagcaggacgccaaguacucccacgggaucgacgucaccgaccuguucgccgcccagcccggccucacgagcgcggugaucgacgcccugccccgcaacauggugaucacgugccaggggagcgacgacauccgcaagcugcucgagucccagggccggaaggacaucaagcugaucgacaucgcccugagcaagaccgacucccgcaaguacgagaacgccgucugggaccaguacaaggaccucugccacaugcacaccggcguggucguggagaagaagaagcgcgggggcaaggaggagaucaccccgcacugcgcgcugauggacugcaucauguucgacgccgccgugagcgggggccugaacaccuccguccuccgggccgugcugccccgggacaugguguuccgcaccagcacgccccgggucgugcugugaggacuaguaauaaggaaacuguaugaaugucugugggcaggaagugaagagauccuucuguaaagguuuuuggaauuaugucugcugaauaauaaacuuuuuugaaauaauaaaucugguagaaaaaugagaucucaaaggcucuuuucagagccaccaaaaaaaaaaaaaaaaaaaaaaaaaaaaaaaaaaaaaaaaaaaaaaaaaaaaaaaaaaaaaaaaaaaaaaaaaaaaaaaaaaaaaaaaaaaaaaaaaaaaa

SEQ ID NO: 20210 - RNA, 2097 nt, Artificial Sequence
  mRNA product Design b-4 (hSL-A100) comprising derived and/or modified sequence from LASV(Mad39;Clade IV)__ANH09723__SP-HsALB_NP(2-569) (opt1)
aggagagucccgcagucggcguccagcggcucugcuuguucgugugugugucguugcaggccuuauucaagcuuaccaugaagugggugaccuucaucagccugcucuuccuguucuccagcgccuacuccagcgccuccaaggagaucaagagcuuccuguggacccagucccuccgccgggagcugagcggcuacugcuccaacaucaagcuccagguggucaaggacgcccaggcgcugcugcacgggcuggacuucagcgagguguccaacgugcagcgccucaugcggaagcagcgccgggacgacaacgaccugaagcgccugcgggaccucaaccaggccgucaacaaccugguggagcugaaguccacccagcagaaguccgugcuccgcgucggcacgcugaccagcgacgaccugcucacccuggccgccgaccuggagaagcucaaguccaaggugacccggacggagcgcccccugaccgccgggguguacaugggcaaccugagcucccagcagcucgaccagcggcgcgcgcugcugaacaugaucgggaugagcggcggcaaccagggggcccggaccggccgcgacggggucgugcgggugugggacgucaagaacgccgagcuccugaacaaccaguucggcaccaugccgucccugacgcucgccugccugaccaagcagggccagguggaccugaacgacgugguccaggcgcucaccgaccuggggcugaucuacaccgccaaguaccccaacacgagcgaccucgaccgccugacccagucccaccccauccugaacaugaucgacaccaacaagagcucccucaacaucagcggcuacaacuucagccugggggccgccgugaaggccggcgcgugcaugcuggacgggggcaacaugcucgagaccaucaaggugagcccccagacgauggacggcauccucaagagcauccugaaggucaagaagucccuggggauguucaucagcgacaccccgggcgagcggaaccccuacgagaacauccuguacaagaucugccuguccggggacggcuggcccuacaucgccagccgcaccuccaucaccgggcgggccugggagaacacggugguggaccucgagagcggcggcaagccccagaaggccggguccaacaacagcaacaagucccugcagagcgccggcuucgcggccgggcugaccuacucccagcucaugacccugaaggacgccaugcugcagcuggacccgaacgccaagaccuggauggacaucgagggccgccccgaggaccccgucgagaucgcccucuaccagcccaucagcgggugcuacauccacuucuuccgggagccgacggaccugaagcaguucaagcaggacgcgaaguacucccacggcaucgacgugaccgaccuguucgccgcccagcccggccucaccagcgccgugaucgaggcccugccccgcaacauggucaucacgugccagggguccgacgacauccgcaagcuguucgagagccagggccggaaggacaucaagcucaucgacaucgcgcuguccaagaccgacagccgcaaguacgagaacgccgugugggaccaguacaaggaccugugccacaugcacaccggggucgugguggagaagaagaagaagggcgggaaggaggagaucacgccccacugcgcccucauggacugcaucauguucgacgccgcggucagcggcggccugaacacccuggugcuccgggccgugcugccgcgcgacauggucuuccggaccuccacccccaagguggugcugugaggacuaguaauaaggaaacuguaugaaugucugugggcaggaagugaagagauccuucuguaaagguuuuuggaauuaugucugcugaauaauaaacuuuuuugaaauaauaaaucugguagaaaaaugagaucucaaaggcucuuuucagagccaccaaaaaaaaaaaaaaaaaaaaaaaaaaaaaaaaaaaaaaaaaaaaaaaaaaaaaaaaaaaaaaaaaaaaaaaaaaaaaaaaaaaaaaaaaaaaaaaaaaaaa

SEQ ID NO: 20211 - RNA, 2097 nt, Artificial Sequence
  mRNA product Design b-4 (hSL-A100) comprising derived and/or modified sequence from LASV(Z0947-SLE-2011;Clade IV)__AIT17841__SP-HsALB_NP(2-569) (opt1)
aggagagucccgcagucggcguccagcggcucugcuuguucgugugugugucguugcaggccuuauucaagcuuaccaugaagugggugaccuucaucagccugcucuuccuguucuccagcgccuacuccagcgccuccaaggagaucaagagcuuccuguggacccagucccuccgccgggagcugagcggcuacugcuccaacaucaagcuccagguggucaaggacgcccaggcgcugcugcacgggcuggacuucagcgagguguccaacgugcagcgccucaugcggaaggagcgccgggacgacaacgaccugaagcgccugcgggaccucaaccaggccgucaacaaccugguggagcucaagagcacccagcagaaguccauccugcgcgugggcacccugaccagcgacgaccugcucauccuggccgccgaccuggagaagcucaaguccaaggucacccggaccgagcgcccccugagcgccgggguguacaugggcaaccuguccagccagcagcucgaccagcggcgcgcgcugcugaacaugaucgggauguccggcagcaaccagggcgcccggacggggcgcgacggcgugguccgggugugggacgugaagaacgccgagcuccugaacaaccaguucgggaccaugccgucccugacccucgccugccugaccaagcagggccaggucgaccugaacgacgcggugcaggcccucacggaccuggggcugaucuacaccgccaaguaccccaacaccagcgaccucgaccgccugacccagucccaccccauccugaacaugaucgacacgaagaaguccagccucaacaucuccggcuacaacuucagccugggcgccgccgugaaggcgggggccugcaugcuggacggcgggaacaugcucgagaccaucaaggucagcccccagaccauggacggcauccucaagagcauccugaaggugaagaaggcccugggcauguucaucuccgacgccccgggggagcggaaccccuacgagaacauccuguacaagaucugccugagcggcgacggguggcccuacaucgccucccgcaccagcaucacgggccgggcgugggagaacaccguggucgaccucgaguccgacgggaagccccagaaggccggcagcaacggcuccaacaagagccugcaguccgccggguucaccgccggccugaccuacagccagcucaugacgcugaaggacgccaugcugcagcuggacccgaacgcgaagaccuggauggacaucgaggggcgccccgaggaccccguggagaucgcccucuaccagcccuccagcggcugcuacauccacuucuuccgggagccgaccgaccugaagcaguucaagcaggacgccaaguacucccacgggaucgacgugaccgaccuguucgccgcccagcccggccucacgagcgcggucaucgacgcccugccccgcaacauggugaucacgugccagggcuccgacgacauccgcaagcuguucgagagccaggggcggaaggacaucaagcucaucgacaucgcccugagcaagaccgacucccgcaaguacgagaacgccgugugggaccaguacaaggaccugugccacaugcacaccggcaucgucguggagaagaagaagcgcgggggcaaggaggagaucaccccgcacugcgcgcucauggacugcaucauguucgacgccgccgucagcgggggccugaacaccuccgugcugcgggccgugcucccccgggacauggucuuccgcaccagcacgccccggguggugcugugaggacuaguaauaaggaaacuguaugaaugucugugggcaggaagugaagagauccuucuguaaagguuuuuggaauuaugucugcugaauaauaaacuuuuuugaaauaauaaaucugguagaaaaaugagaucucaaaggcucuuuucagagccaccaaaaaaaaaaaaaaaaaaaaaaaaaaaaaaaaaaaaaaaaaaaaaaaaaaaaaaaaaaaaaaaaaaaaaaaaaaaaaaaaaaaaaaaaaaaaaaaaaaaaa

SEQ ID NO: 20212 - RNA, 2097 nt, Artificial Sequence
  mRNA product Design b-4 (hSL-A100) comprising derived and/or modified sequence from LASV(Josiah;Clade IV)__NP_694869__SP-HsALB_NP(2-569) (opt4)
aggagagucccgcagucggcguccagcggcucugcuuguucgugugugugucguugcaggccuuauucaagcuuaccaugaagugggugaccuucaucagccugcuguuccuguucagcagcgccuacagcagcgccagcaaggagaucaagagcuuccuguggacccagagccugagaagagagcugagcggcuacugcagcaacaucaagcugcagguggugaaggacgcccaggcccugcugcacggccuggacuucagcgaggugagcaacgugcagagacugaugagaaaggagagaagagacgacaacgaccugaagagacugagagaccugaaccaggccgugaacaaccugguggagcugaagagcacccagcagaagagcauccugagagugggcacccugaccagcgacgaccugcugauccuggccgccgaccuggagaagcugaagagcaaggugaucagaaccgagagaccccugagcgccggcguguacaugggcaaccugagcagccagcagcuggaccagagaagagcccugcugaacaugaucggcaugagcggcggcaaccagggcgccagagccggcagagacggcguggugagagugugggacgugaagaacgccgagcugcugaacaaccaguucggcaccaugcccagccugacccuggccugccugaccaagcagggccagguggaccugaacgacgccgugcaggcccugaccgaccugggccugaucuacaccgccaaguaccccaacaccagcgaccuggacagacugacccagagccaccccauccugaacaugaucgacaccaagaagagcagccugaacaucagcggcuacaacuucagccugggcgccgccgugaaggccggcgccugcaugcuggacggcggcaacaugcuggagaccaucaaggugagcccccagaccauggacggcauccugaagagcauccugaaggugaagaaggcccugggcauguucaucagcgacacccccggcgagagaaaccccuacgagaacauccuguacaagaucugccugagcggcgacggcuggcccuacaucgccagcagaaccagcaucaccggcagagccugggagaacaccgugguggaccuggagagcgacggcaagccccagaaggccgacagcaacaacagcagcaagagccugcagagcgccggcuucaccgccggccugaccuacagccagcugaugacccugaaggacgccaugcugcagcuggaccccaacgccaagaccuggauggacaucgagggcagacccgaggaccccguggagaucgcccuguaccagcccagcagcggcugcuacauccacuucuucagagagcccaccgaccugaagcaguucaagcaggacgccaaguacagccacggcaucgacgugaccgaccuguucgccacccagcccggccugaccagcgccgugaucgacgcccugcccagaaacauggugaucaccugccagggcagcgacgacaucagaaagcugcuggagagccagggcagaaaggacaucaagcugaucgacaucgcccugagcaagaccgacagcagaaaguacgagaacgccgugugggaccaguacaaggaccugugccacaugcacaccggcguggugguggagaagaagaagagaggcggcaaggaggagaucaccccccacugcgcccugauggacugcaucauguucgacgccgccgugagcggcggccugaacaccagcgugcugagagccgugcugcccagagacaugguguucagaaccagcacccccagaguggugcugugaggacuaguaauaaggaaacuguaugaaugucugugggcaggaagugaagagauccuucuguaaagguuuuuggaauuaugucugcugaauaauaaacuuuuuugaaauaauaaaucugguagaaaaaugagaucucaaaggcucuuuucagagccaccaaaaaaaaaaaaaaaaaaaaaaaaaaaaaaaaaaaaaaaaaaaaaaaaaaaaaaaaaaaaaaaaaaaaaaaaaaaaaaaaaaaaaaaaaaaaaaaaaaaaa

SEQ ID NO: 20213 - RNA, 2097 nt, Artificial Sequence
  mRNA product Design b-4 (hSL-A100) comprising derived and/or modified sequence from LASV(LP;Clade I)__AAF86702__SP-HsALB_NP(2-569) (opt4)
aggagagucccgcagucggcguccagcggcucugcuuguucgugugugugucguugcaggccuuauucaagcuuaccaugaagugggugaccuucaucagccugcuguuccuguucagcagcgccuacagcagcaacagcaaggagaucaagagcuuccuguggacccagagccugagaagagagcugagcggcuacugcagcaacaucaagcugcagguggugaaggacgcccaggcccugcugcacggccuggacuucagcgaggugagcaacgugcagagacugaugagaaagcagaagagagacgacgccgaccugaagagacugagagaccugaaccaggccgugaacaaccugguggagcugaagagcacccagcagaagaacgugcugagagugggcacccugagcagcgacgaccugaucacccuggccgccgaccuggagaagcugaagagcaaggugaucagaaccgagagaccccugagcagcggcguguacaugggcaaccugagcagccagcagcuggaccagagaagagcccugcugagcaugaucggcaugagcggcggcccccagggcaacagaaccggcggcgacggcguggugagagugugggacgugaagaacgccgagcugcugaacaaccaguucggcaccaugcccagccugacccuggccugccugaccaagcagggccagguggaccugaacgacgccgugcaggcccugaccgaccugggccugaucuacaccgccaaguaccccaacagcagcgaccuggacaugcugacccagagccaccccauccugggcaugguggacaccaagaagagcagccugaacaucagcggcuacaacuucagccugggcgccgccgugaaggccggcgccugcaugcuggacggcggcaacaugcuggagaccaucaaggugagcccccagaccauggacggcauccugaagagcauccugaaggugaagagaagccugggcauguucaucagcgacacccccggcgagagaaaccccuacgagaacauccuguacaagaucugccugagcggcgagggcuggcccuacaucgccagcagaaccagcaucaccggcagagccugggagaacacccugguggaccuggagagcgacaacaagccccccaagcugaacagcgccggcagcaacaagagccugcaggccgccggccugaacgccggccugaccuacagccagcugaugacccugaaggacugcaugcugcagcuggaccccagcagcaagaccuggaucgacaucgagggcagacccgaggaccccguggagaucgcccuguuccagcccagcagcggcugcuacauccacuucuucagagagcccaccgaccugaagcaguucaagcaggacgccaaguacagccacggcaucgacgugaccgaccuguucagcacccagcccggccugaccagcgccgugaucgaggcccugcccagaaacauggugcugaccugccagggcagcgacgacaucaagaagcugcuggagagccagggcagaagagacaucaagcugaucgacaucagccugagcaaggccgacagcagaaaguucgagaacgccgugugggaccaguacaaggaccugugccacaugcacaccggcguggugguggagaagaagaagagaggcggcaaggaggagaucaccccccacugcgcccugcuggacugcaucauguucgacgccgccaccaccggcagccugaacaucaccacccugagagccgugcugcccagagacaugguguucagaaccagcacccccaagguggugcugugaggacuaguaauaaggaaacuguaugaaugucugugggcaggaagugaagagauccuucuguaaagguuuuuggaauuaugucugcugaauaauaaacuuuuuugaaauaauaaaucugguagaaaaaugagaucucaaaggcucuuuucagagccaccaaaaaaaaaaaaaaaaaaaaaaaaaaaaaaaaaaaaaaaaaaaaaaaaaaaaaaaaaaaaaaaaaaaaaaaaaaaaaaaaaaaaaaaaaaaaaaaaaaaaa

SEQ ID NO: 20214 - RNA, 2097 nt, Artificial Sequence
  mRNA product Design b-4 (hSL-A100) comprising derived and/or modified sequence from LASV(803213;Clade II)__AAF86704__SP-HsALB_NP(2-569) (opt4)
aggagagucccgcagucggcguccagcggcucugcuuguucgugugugugucguugcaggccuuauucaagcuuaccaugaagugggugaccuucaucagccugcuguuccuguucagcagcgccuacagcagcgccagcaaggaggugaagagcuuccuguggacccagagccugagaagagagcugagcggcuacugcagcaacaucaagcugcagguggugaaggacgcccaggcccugcugcacggccuggacuucagcgaggugaacaacgugcagagacugaugagaaagcagaagagagacgacggcgaccugaagagacugagagaccugaaccaggccgugaacaaccugguggagcugaagagcacccagcagaagagcauccugagagugggcacccugaccagcgacgaccugcugacccuggccgccgaccuggagaagcugaagagcaaggugaucagaaccgagagaccccugagcagcggcguguacaugggcaaccugagcacccagcagcuggagcagagaagagcccugcugaacaugaucggcauggugggcggcgcccagggcacccagcccggcagagacggcguggugagagugugggacgugaagaaccccgaccugcugaacaaccaguucggcaccaugcccagccugacccuggccugccugaccaagcagggccagguggaccugaacgacgccgugcuggcccugaccgaccugggccugaucuacaccgccaaguaccccaacagcagcgaccuggacagacugagccagagccaccccauccugaacaugguggacaccaagaagagcagccugaacaucagcggcuacaacuucagccugggcgccgccgugaaggccggcgccugcaugcuggacggcggcaacaugcuggagaccaucaaggugaccccccagaccauggacggcauccugaagagcauccugaaggugaagagaagccugggcauguucgugagcgacacccccggcgagagaaaccccuacgagaacauccuguacaagaucugccugagcggcgacggcuggcccuacaucgccagcagaaccagcaucgugggcagagccugggagaacaccaccguggaccuggagagcgacggcaagccccagaaggugggcaccgccggcagcaacaagagccugcagagcgccggcuuccccaccggccugaccuacagccagcugaugacccugaaggacagcaugaugcagcuggaccccagcgccaagaccuggaucgacaucgagggcagacccgaggaccccguggagaucgcccuguaccagcccaugagcggcugcuacauccacuucuucagagagcccaccgaccugaagcaguucaagcaggacgccaaguacagccacggcaucgacguggccgaccuguuccccgcccagcccggccugaccagcgccgugaucgaggcccugcccagaaacauggugcugaccugccagggcagcgacgacaucaagaagcugcuggacagccagggcagaagagacaucaagcugaucgacaucagccugagcaagguggacagcagaaaguucgagaacgccgugugggaccagugcaaggaccugugccacaugcacaccggcguggugguggagaagaagaagagaggcggcaaggaggagaucaccccccacugcgcccugauggacugcaucauguucgacgccgccgugagcggcggccugaacauccccgugcugagagccgugcugcccagagacaugguguucagaaccagcagccccaagguggugcugugaggacuaguaauaaggaaacuguaugaaugucugugggcaggaagugaagagauccuucuguaaagguuuuuggaauuaugucugcugaauaauaaacuuuuuugaaauaauaaaucugguagaaaaaugagaucucaaaggcucuuuucagagccaccaaaaaaaaaaaaaaaaaaaaaaaaaaaaaaaaaaaaaaaaaaaaaaaaaaaaaaaaaaaaaaaaaaaaaaaaaaaaaaaaaaaaaaaaaaaaaaaaaaaaa

SEQ ID NO: 20215 - RNA, 2100 nt, Artificial Sequence
  mRNA product Design b-4 (hSL-A100) comprising derived and/or modified sequence from LASV(GA391;Clade III)__CAA36646__SP-HsALB_NP(2-570) (opt4)
aggagagucccgcagucggcguccagcggcucugcuuguucgugugugugucguugcaggccuuauucaagcuuaccaugaagugggugaccuucaucagccugcuguuccuguucagcagcgccuacagcagcgccagcaaggaggugagaagcuuccuguggacccagagccugagaagagagcugagcggcuacugcagcaacaucaagcugcagguggugaaggacgcccaggcccugcugcacggccuggacuucagcgaggugagcaacgugcagagacugaugagaaagcagaagagagacgacggcgaccugaagagacugagagaccugaaccaggccgugaacaaccugguggagcugaagagcacccagcagaagagcgugcugagagugggcacccugagcagcgacgaccugcugauccuggccgccgaccuggagaagcugaagagcaaggugaccagaaccgagagaccccugagcagcggcguguacaugggcaaccugagcagccagcagcuggaccagagaagagcccugcugaacaugaucggcaugaccggcgugagcggcggcggcaagggcgccagcgacggcaucgugagagugugggacgugaagaacgccgagcugcugaacaaccaguucggcaccaugcccagccugacccuggccugccugaccaagcagggccagguggaccugaacgacgccgugcaggcccugaccgaccugggccugaucuacaccgccaaguaccccaacagcagcgaccuggacagacugagccagagccaccccauccugaacaugaucgacaccaagaagagcagccugaacaucagcggcuacaacuucagccugggcgccgccgugaaggccggcgccugcaugcuggacggcggcaacaugcuggagaccaucaaggugagcccccagaccauggacggcauccugaagagcauccugaaggugaagaagagccugggcauguucgugagcgacacccccggcgagagaaaccccuacgagaacauccuguacaagaucugccugagcggcgacggcuggcccuacaucgccagcagaaccagcaucgugggcagagccugggagaacaccgugguggaccuggagcaggacaacaagccccagaagaucggcaacggcggcagcaacaagagccugcagagcgccggcuucgccgccggccugaccuacagccagcugaugacccugaaggacuucaagugcuucaaccugauccccaacgccaagaccuggauggacaucgagggcagacccgaggaccccguggagaucgcccuguaccagcccagcagcggcugcuacgugcacuucuucagagagcccaccgaccugaagcaguucaagcaggacgccaaguacagccacggcaucgacgugaccgaccuguucgccgcccagcccggccugaccagcgccgugaucgaggcccugcccagaaacauggugaucaccugccagggcagcgaggacaucagaaagcugcuggagagccagggcagaagagacaucaagcugaucgacaucacccugagcaaggccgacagcagaaaguucgagaacgccgugugggaccaguucaaggaccugugccacaugcacaccggcguggugguggagaagaagaagagaggcggcaaggaggagaucaccccccacugcgcccugauggacugcaucauguucgacgccgccgugagcggcggccuggacgccaaggugcugagaguggugcugcccagagacaugguguucagaaccagcacccccaagguggugcugugaggacuaguaauaaggaaacuguaugaaugucugugggcaggaagugaagagauccuucuguaaagguuuuuggaauuaugucugcugaauaauaaacuuuuuugaaauaauaaaucugguagaaaaaugagaucucaaaggcucuuuucagagccaccaaaaaaaaaaaaaaaaaaaaaaaaaaaaaaaaaaaaaaaaaaaaaaaaaaaaaaaaaaaaaaaaaaaaaaaaaaaaaaaaaaaaaaaaaaaaaaaaaaaaa

SEQ ID NO: 20216 - RNA, 2097 nt, Artificial Sequence
  mRNA product Design b-4 (hSL-A100) comprising derived and/or modified sequence from LASV(AV;Clade V)__CCA30315__SP-HsALB_NP(2-569) (opt4)
aggagagucccgcagucggcguccagcggcucugcuuguucgugugugugucguugcaggccuuauucaagcuuaccaugaagugggugaccuucaucagccugcuguuccuguucagcagcgccuacagcagcgccagcaaggaggugaagagcuuccuguggacccagagccugagaagagagcugagcggcuacugcagcaacaucaagcugcagguggugaaggacgcccaggcccugcugcacggccuggacuucagcgaggugagcaacgugcagagacugaugagaaagcagagaagagacgacagcgaccugaagagacugagagaccugaaccaggccgugaacaaccugguggagcugaagagcacccagcagaagagcgugcugagagugggcacccugagcagcgacgaccugcugacccuggccgccgaccuggagaagcugaagagcaaggugaccagaaccgagagaccccugagcagcggcguguacaugggcaaccugagcagccagcagcuggaccagagaagagcccugcugaaccugaucggcaugaccaacggcagccagggcagccaggccggcagagacggcguggugagagugugggacgugaagaacgccgagcugcugaacaaccaguucggcaccaugcccagccugacccuggccugccugaccaagcagggccagguggaccugaacgacguggugcaggcccugaccgaccugggccugaucuacaccgccaaguaccccaacaccagcgaccuggacagacugacccagagccaccccauccugaacaugaucgacaccaagaagagcagccugaacaucagcggcuacaacuucagccugggcgccgccgugaaggccggcgccugcaugcuggacggcggcaacaugcuggagaccaucaaggugagcccccagagcauggacggcauccugaagagcauccugaaggugaagagagcccugggcauguucgugagcgacacccccggcgagagaaaccccuacgagaacauccuguacaagaucugccugagcggcgacggcuggcccuacaucgccagcagaaccagcaucgugggcagagccugggagaacaccgugguggaccuggagaccgacggcaagccccagaagaucggcagcggcaacagcaacaagagccugcagagcgccggcuucagcgccggccugaccuacagccagcugaugacccugaaggacgccaugcugcagcuggaccccaacgccaagaccuggauggacaucgagggcagacccgaggaccccguggagguggcccuguaccagcccaucagcggcugcuacauccacuucuucagagagcccaccgaccugaagcaguucaagcaggacgccaaguacagccacggcaucgacaucgccgaccuguucgccgcccagcccggccugaccagcgccgugaucgaggcccugcccagaaacauggugaucaccugccagggcagcgaggacaucaagaagcugcuggagagccagggcagaaaggacaucaagcugaucgacaucgcccugagcaagaucgacagcagaaaguucgagaacgccgugugggaccaguacaaggaccugugccacaugcacaccggcguggugguggagaagaagaagagaggcggcaaggaggagaucaccccccacugcgcccugauggacugcaucauguucgacgccgccgugagcggcggccugaacacccuggugcugagagccgugcugcccagagacaugguguucagaaccagcacccccagaguggugcugugaggacuaguaauaaggaaacuguaugaaugucugugggcaggaagugaagagauccuucuguaaagguuuuuggaauuaugucugcugaauaauaaacuuuuuugaaauaauaaaucugguagaaaaaugagaucucaaaggcucuuuucagagccaccaaaaaaaaaaaaaaaaaaaaaaaaaaaaaaaaaaaaaaaaaaaaaaaaaaaaaaaaaaaaaaaaaaaaaaaaaaaaaaaaaaaaaaaaaaaaaaaaaaaaa

SEQ ID NO: 20217 - RNA, 2097 nt, Artificial Sequence
  mRNA product Design b-4 (hSL-A100) comprising derived and/or modified sequence from LASV(Togo/2016/7082;Clade VI)__AMR44578__SP-HsALB_NP(2-569) (opt4)
aggagagucccgcagucggcguccagcggcucugcuuguucgugugugugucguugcaggccuuauucaagcuuaccaugaagugggugaccuucaucagccugcuguuccuguucagcagcgccuacagcagcaacagcaaggaggugaagagcuuccuguggacccagagccugagaagagagcugagcggcuacugcagcaacaucaagcugcagguggugaaggacgcccaggcccugcugcacggccuggacuucagcgaggugagcaacgugcagagacugaugagaaagcagaagagagacgacggcgaccugaagagacugagagaccugaaccaggccgugaacaaccugguggagcugaagagcgugcagcagaagagcauccugagagugggcacccugaccagcgacgaccugcugacccuggccgccgaccuggagaagcugaagagcaaggugaccagaaccgagagaccccugagcagcggcguguacaugggcaaccugagcagccagcagcuggaccagagaagagcccugcugagcaugaucggcaugagcggcggcaaccagaacagccagcccaagggcgacggcguggugagagugugggacgugaagaacgccgaccugcugaacaaccaguucggcaccaugcccagccugacccuggccugccugaccaagcagggccagguggaccugaacgacgccgugcaggcccugaccgaccugggccugaucuacaccgccaaguaccccaacagcagcgaccuggacagacugagccagagccaccccauccugaacaugaucgacaccaagaagagcagccugaacaucagcggcuacaacuucagccugggcgccgccaucaagaccggcgccugcaugcuggacggcggcaacaugcuggagaccaucaaggugaccccccagaccauggacggcauccugaagagcauccugaaggugaagagaagccugggcauguucaucagcgacacccccggcgagagaaaccccuacgagaacauccuguacaagaucugccugagcggcgacggcuggcccuacaucgccagcagaaccgccaucaucggcagagccugggagaacaccgugguggaccuggagagcgacagcaagccccagaagaucggcagcaacggcagcaacaagagccugcagagcgccggcuucgcccccggccugaccuacagccagcugaugacccugaaggacagcaugcugcagcuggaccccaacgccaagaccuggaucgacaucgagggcagacccgaggaccccguggagguggcccuguuccagcccaucagcggcugcuacauccacuucuucagagagcccaccgaccugaagcaguucaagcaggacgccaaguacagccacggcaucgacgugaccgaccuguucgccgcccagcccggccugaccagcgccgugaucgaggcccugcccagaaacauggugcugaccugccagggcagcgacgacaucaagaagcugcuggacagccagggcagaagagacaucaagcugaucgacgugagccugaacaagaucgacagcagaaaguucgagaacgccgugugggaccaguacaaggaccugugccacaugcacaccggcguggugguggagaagaagaagaagggcggcaaggaggagaucaccccccacugcgcccugcuggacugcaucauguucgacgccgccgugagcggcggccugaacgccaccgugcugagagccgugcugcccagagacaugguguucagaaccagcagccccaagguggugcugugaggacuaguaauaaggaaacuguaugaaugucugugggcaggaagugaagagauccuucuguaaagguuuuuggaauuaugucugcugaauaauaaacuuuuuugaaauaauaaaucugguagaaaaaugagaucucaaaggcucuuuucagagccaccaaaaaaaaaaaaaaaaaaaaaaaaaaaaaaaaaaaaaaaaaaaaaaaaaaaaaaaaaaaaaaaaaaaaaaaaaaaaaaaaaaaaaaaaaaaaaaaaaaaaa

SEQ ID NO: 20218 - RNA, 2097 nt, Artificial Sequence
  mRNA product Design b-4 (hSL-A100) comprising derived and/or modified sequence from LASV(KAK-428;Clade n.d. (VII))__ANH09741__SP-HsALB_NP(2-569) (opt4)
aggagagucccgcagucggcguccagcggcucugcuuguucgugugugugucguugcaggccuuauucaagcuuaccaugaagugggugaccuucaucagccugcuguuccuguucagcagcgccuacagcagcaacagcaaggaggugaagagcuuccuguggacccagagccugagaagagagcugagcggcuacugcaccaacaucaagcugcagguggugaaggacgcccaggcccugcugcacggccuggacuucagcgaggugagcaacgugcagagacugaugagaaagcagaagagagacgacaacgaccugaagagacugagagaccugaaccaggccgugaacaaccugguggagcugaagagcgugcagcagaagagcgugcugaaggugggcacccugaacagcgacgaccugcugacccuggccgccgaccuggagaagcugaagagcaagguggugagaaccgagagaccccugagcagcggcguguacaugggcaaccugagcagccagcagcuggaccagagaagagcccugcugaacaugaucggcauggccggcggcagccagggcaaccagcccagcagagacggcguggugagagugugggacgugaagaacgccgaccugcugaacaaccaguucggcaccaugcccagccugacccuggccugccugaccaagcagggccagguggaccugaacgacguggugcuggcccugaccgaccugggccugaucuacaccgccaaguaccccaacagcagcgaccuggacagacugagccagaaccaccccgugcugaacaugaucgacgugaacaagagcagccugaacaucagcggcuacaacuucagccugggcgccgccgugaaggccggcgccugcaugcuggacggcggcaacaugcuggagaccaucaagaucagcccccagaccguggacggcauccugaagagcauccugaaggugaagagagcccugggcauguucgugagcgacacccccggcgagagaaaccccuacgagaacauccuguacaaggugugccugagcggcaacggcuggcccuacaucgccagcagaaccagcaucgugggcagagccugggagaacaccgugguggaccuggagagcaacaagaaccagcccaaggugggcaacaacggcagcaacaagaugcugcagagcagcggcuucgccaccggccugaccuacagccagcugaugacccugagagacagcaugcugcagcuggaccccaccgccaagaccuggaucgacaucgagggcagacccgaggaccccguggagcuggcccuguuccagcccagcagcggcugcuacauccacuucuucagagagcccaccgaccugaagcaguucaagcaggacgccaaguacagccacggcaucgacgugaacgaccuguucagcgcccagcccggccugaccagcgccgugcuggaggcccugcccagaaacauggugcugaccugccagggcagcgacgacaucagaaagcugcuggacagccaggacagaaaggacaucaagcugaucgacaucagccugagcaaggccgacgccagaaaguucgagaacgacgugugggaccaguucaaggaccugugccacaugcacaccggcaucgugguggagaagaagaagaagggcggcaagcaggagaugaccccccacugcgcccugcuggacugcaucauguucgacgccgccgugagcggcggccugaacgugcccacccugagagccgugcugcccaccgacaugguguucagaaccaucaccaccaagguggugcugugaggacuaguaauaaggaaacuguaugaaugucugugggcaggaagugaagagauccuucuguaaagguuuuuggaauuaugucugcugaauaauaaacuuuuuugaaauaauaaaucugguagaaaaaugagaucucaaaggcucuuuucagagccaccaaaaaaaaaaaaaaaaaaaaaaaaaaaaaaaaaaaaaaaaaaaaaaaaaaaaaaaaaaaaaaaaaaaaaaaaaaaaaaaaaaaaaaaaaaaaaaaaaaaaa

SEQ ID NO: 20219 - RNA, 2097 nt, Artificial Sequence; identical to SEQ ID NO: 20213
  mRNA product Design b-4 (hSL-A100) comprising derived and/or modified sequence from LASV(Pinneo-NIG-1969;Clade I)__AIT17837__SP-HsALB_NP(2-569) (opt4)

SEQ ID NO: 20220 - RNA, 2097 nt, Artificial Sequence
  mRNA product Design b-4 (hSL-A100) comprising derived and/or modified sequence from LASV(ISTH0009-NIG-2011;Clade II)__AIT17405__SP-HsALB_NP(2-569) (opt4)
aggagagucccgcagucggcguccagcggcucugcuuguucgugugugugucguugcaggccuuauucaagcuuaccaugaagugggugaccuucaucagccugcuguuccuguucagcagcgccuacagcagcgugagcaaggaggugaagagcuuccuguggacccagagccugagaagagagcugagcggcuacugcagcaacaucaagcugcagguggugaaggacgcccaggcccugcugcacggccuggacuucagcgaggugagcaacgugcagagacugaugagaaagcagaagagagacgacagcgaccugaagagacugagagaccugaaccaggccgugaacaaccugguggagcugaagagcacccagcagaagagcauccugagagugggcacccugaccagcgacgaccugcugacccuggccgccgaccuggagaagcugaagagcaaggugaucagaaccgagagaccccugagcagcggcguguacaugggcaaccugagcacccagcagcuggagcagagaagagcccugcugaacaugaucggcauggugggcggcgcccagggcacccagcccggcagagacggcguggugagagugugggacgugaagaaccccgaccugcugaacaaccaguucggcaccaugcccagccugacccuggccugccugaccaagcagggccagguggaccugaacgacgccgugcuggcccugaccgaccugggccugaucuacaccgccaaguaccccaacagcagcgaccuggacagacugagccagagccaccccauccugaacaugguggacaucaagaagagcagccugaacaucagcggcuacaacuucagccugggcgccgccgugaaggccggcgccugcaugcuggacggcggcaacaugcuggagaccaucaaggugaccccccagaccauggacggcauccugaagagcauccugaaggugaagagaagccugggcauguucgugagcgacacccccggcgagagaaaccccuacgagaacauccuguacaagaucugccugagcggcgacggcuggcccuacaucgccagcagaaccagcaucgugggcagagccugggagaacaccaccguggaccuggagagcgacggcaagccccagaaggugggcagcgccggcagcaacaagagccugcagagcgccggcuuccccaccggccugaccuacagccagcugaugacccugaaggacagcaugaugcagcuggaccccagcgccaagaccuggaucgacaucgagggcagacccgaggaccccguggagaucgcccuguaccagcccaugagcggcugcuacauccacuucuucagagagcccaccgaccugaagcaguucaagcaggacgccaaguacagccacggcaucgacguggccgaccuguuccccgcccagcccggccugaccagcgccgugaucgaggcccugcccagaaacauggugcugaccugccagggcagcgacgacaucaagagacugcuggacagccagggcagaagagacaucaagcugaucgacaucgcccugagcaaggccgacagcagaagauucgagaacgccgugugggaccagugcaaggaccugugccacaugcacaccggcguggugguggagaagaagaagagaggcggcaaggaggagaucaccccccacugcgcccugauggacugcaucauguacgacgccgccgugagcggcggccugaacauccccgugcugagagccgugcugcccagagacaugguguucagaaccagcagccccaagguggugcugugaggacuaguaauaaggaaacuguaugaaugucugugggcaggaagugaagagauccuucuguaaagguuuuuggaauuaugucugcugaauaauaaacuuuuuugaaauaauaaaucugguagaaaaaugagaucucaaaggcucuuuucagagccaccaaaaaaaaaaaaaaaaaaaaaaaaaaaaaaaaaaaaaaaaaaaaaaaaaaaaaaaaaaaaaaaaaaaaaaaaaaaaaaaaaaaaaaaaaaaaaaaaaaaaa

SEQ ID NO: 20221 - RNA, 2097 nt, Artificial Sequence
  mRNA product Design b-4 (hSL-A100) comprising derived and/or modified sequence from LASV(ISTH2010-NIG-2012;Clade II)__AIT17483__SP-HsALB_NP(2-569) (opt4)
aggagagucccgcagucggcguccagcggcucugcuuguucgugugugugucguugcaggccuuauucaagcuuaccaugaagugggugaccuucaucagccugcuguuccuguucagcagcgccuacagcagcgccagcaaggaggugaagagcuuccuguggacccagagccugagaagagagcugagcggcuacugcagcaacaucaagcugcagguggugaaggacgcccaggcccugcugcacggccuggacuucagcgaggugagcaacgugcagagacugaugagaaagcagaagagagacgacagcgaccugaagagacugagagaccugaaccaggccgugaacaaccugguggagcugaagagcacccagcagaagagcauccugagagugggcacccugaccagcgacgaccugcugacccuggccgccgaccuggagaagcugaagagcaaggugaucagaaccgagagaccccugagcagcggcguguacaugggcaaccugagcacccagcagcuggagcagagaagagcccugcugaaccugaucggcauggugggcggcgcccagggcacccagcccggcagagacggcguggugagagugugggacgugaagaaccccgaccugcugaacaaccaguucggcaccaugcccagccugacccuggccugccugaccaagcagggccagguggaccugaacgacgccgugcuggcccugaccgaccugggccugaucuacaccgccaaguaccccaacagcagcgaccuggacagacugagccagagccaccccauccugaacaugguggacaccaagaagagcagccugaacaucagcggcuucaacuucagccugggcgccgccgugaaggccggcgccugcaugcuggacggcggcaacaugcuggagaccaucaaggugaccccccagaccauggacggcauccugaagagcauccugaaggugaagaagagccugggcauguucgugagcgacacccccggcgagagaaaccccuacgagaacauccuguacaagaucugccugagcggcgacggcuggcccuacaucgccagcagaaccagcaucgugggcagagccugggagaacaccaccguggaccuggagagcgacggcaagccccacaaggugggcaccgccggcagcaacaagagccugcagagcgccggcuuccccaccggccugaccuacagccagcugaugacccugaaggacagcaugaugcagcuggaccccagcgccaagaccuggaucgacaucgagggcagacccgaggaccccguggagaucgcccuguaccagcccaugagcggcugcuacauccacuucuucagagagcccaccgaccugaagcaguucaagcaggacgccaaguacagccacggcaucgacguggccgaccuguuccccgcccagcccggccugaccagcgccgugaucgaggcccugcccagaaacauggugcugaccugccagggcagcgacgacaucaagagacugcuggacagccagggcagaagagacaucaagcugaucgacaucgcccugagcaaggccgacagcagaagauucgagaacgccgugugggaccagugcaaggaccugugccacaugcacaccggcguggugguggagaagaagaagagaggcggcaaggaggagaucaccccccacugcgcccugauggacugcaucauguacgacgccgccgugagcggcggccugaacauccccgugcugagagccgugcugcccagagacaugguguucagaaccagcagccccaagguggugcugugaggacuaguaauaaggaaacuguaugaaugucugugggcaggaagugaagagauccuucuguaaagguuuuuggaauuaugucugcugaauaauaaacuuuuuugaaauaauaaaucugguagaaaaaugagaucucaaaggcucuuuucagagccaccaaaaaaaaaaaaaaaaaaaaaaaaaaaaaaaaaaaaaaaaaaaaaaaaaaaaaaaaaaaaaaaaaaaaaaaaaaaaaaaaaaaaaaaaaaaaaaaaaaaaa

SEQ ID NO: 20222 - RNA, 2097 nt, Artificial Sequence
  mRNA product Design b-4 (hSL-A100) comprising derived and/or modified sequence from LASV(Lassa virus/H.sapiens-wt/NGA/2015/ISTH_0543;Clade II)__AVO03640__SP-HsALB_NP(2-569) (opt4)
aggagagucccgcagucggcguccagcggcucugcuuguucgugugugugucguugcaggccuuauucaagcuuaccaugaagugggugaccuucaucagccugcuguuccuguucagcagcgccuacagcagcgccagcaaggaggugaagagcuuccuguggacccagagccugagaagagagcugagcggcuacugcagcaacaucaagcugcagguggugaaggacgcccaggcccugcugcacggccuggacuucagcgaggugagcaacgugcagagacugaugagaaagcagaagagagacgacagcgaccugaagagacugagagaccugaaccaggccgugaacaaccugguggagcugaagagcacccagcagaagagcauccugagagugggcacccugaccagcgacgaccugcugacccuggccgccgaccuggagaagcugaagagcaaggugaucagaaccgagagaccccugagcagcggcguguacaugggcaaccugagcacccagcagcuggagcagagaagagcccugcugaacaugaucggcauggugggcggcgcccagggcacccagcccggcagagacggcguggugagagugugggacgugaagaaccccgaccugcugaacaaccaguucggcaccaugcccagccugacccuggccugccugaccaagcagggccagguggaccugaacgacgccgugcuggcccugaccgaccugggccugaucuacaccgccaaguaccccaacagcagcgaccuggacagacugagccagagccaccccauccugaacaugguggacaccaagaagagcagccugaacaucagcggcuacaacuucagccugggcgccgccgugaaggccggcgccugcaugcuggacggcggcaacaugcuggagaccaucaaggugaccccccagaccauggacggcauccugaagagcauccugaaggugaagaagagccugggcauguucgugagcgacacccccggcgagagaaaccccuacgagaacauccuguacaagaucugccugagcggcgacggcuggcccuacaucgccagcagaaccagcaucgugggcagagccugggagaacaccaccguggaccuggagagcgacggcaagccccagaaggugggcagcgccggcagcaacaagagccugcagagcgccggcuuccccaccggccugaccuacagccagcugaugacccugaaggacagcaugaugcagcuggaccccagcgccaagaccuggaucgacaucgagggcagacccgaggaccccguggagaucgcccuguaccagcccaugagcggcugcuacauccacuucuucagagagcccaccgaccugaagcaguucaagcaggacgccaaguacagccacggcaucgacguggccgaccuguuccccgcccagcccggccugaccagcgccgugaucgaggcccugcccagaaacauggugcugaccugccagggcagcgacgacaucaagagacugcuggacagccagggcagaaaggacaucaagcugaucgacaucgcccugagcaaggccgacagcagaagauucgagaacgccgugugggaccagugcaaggaccugugccacaugcacaccggcguggugguggagaagaagaagagaggcggcaaggaggagaucaccccccacugcgcccugauggacugcaucauguacgacgccgccgugagcggcggccugaacauccccgugcugagagccgugcugcccagagacaugguguucagaaccagcagccccaagguggugcugugaggacuaguaauaaggaaacuguaugaaugucugugggcaggaagugaagagauccuucuguaaagguuuuuggaauuaugucugcugaauaauaaacuuuuuugaaauaauaaaucugguagaaaaaugagaucucaaaggcucuuuucagagccaccaaaaaaaaaaaaaaaaaaaaaaaaaaaaaaaaaaaaaaaaaaaaaaaaaaaaaaaaaaaaaaaaaaaaaaaaaaaaaaaaaaaaaaaaaaaaaaaaaaaaa

SEQ ID NO: 20223 - RNA, 2097 nt, Artificial Sequence
  mRNA product Design b-4 (hSL-A100) comprising derived and/or modified sequence from LASV(Lassa virus/H.sapiens-wt/NGA/2016/ISTH_0009;Clade II)__AVO03572__SP-HsALB_NP(2-569) (opt4)
aggagagucccgcagucggcguccagcggcucugcuuguucgugugugugucguugcaggccuuauucaagcuuaccaugaagugggugaccuucaucagccugcuguuccuguucagcagcgccuacagcagcgccagcaaggaggugaagagcuuccuguggacccagagccugagaagagagcugagcggcuacugcagcaacaucaagcugcagguggugaaggacgcccaggcccugcugcacggccuggacuucagcgaggugagcaacgugcagagacugaugagaaagcagaagagagacgacagcgaccugaagagacugagagaccugaaccaggccgugaacaaccugguggagcugaagagcacccagcagaagagcauccugagagugggcacccugaccagcgacgaccugcugacccuggccgccgaccuggagaagcugaagagcaaggugaucagaaccgagagaccccugagcagcggcguguacaugggcaaccugagcacccagcagcuggagcagagaagagcccugcugaacaugaucggcauggugggcggcgcccagggcacccagcccggcagagacggcguggugagagugugggacgugaagaaccccgaccugcugaacaaccaguucggcaccaugcccagccugacccuggccugccugaccaagcagggccagguggaccugaacgacgccgugcuggcccugaccgaccugggccugaucuacaccgccaaguaccccaacagcagcgaccuggacagacugagccagagccaccccauccugaacaugguggacaccaagaagagcagccugaacaucagcggcuacaacuucagccugggcgccgccgugaaggccggcgccugcaugcuggacggcggcaacaugcuggagaccaucaaggugaccccccagaccauggacggcauccugaagagcauccugaaggugaagaagagccugggcauguucgugagcgacacccccggcgagagaaaccccuacgagaacauccuguacaagaucugccugagcggcgacggcuggcccuacaucgccagcagaaccagcaucgugggcagagccugggagaacaccaccguggaccuggagagcgacggcaagccccagaaggugggcagcgccggcagcaacaagagccugcagagcgccggcuuccccaccggccugaccuacagccagcugaugacccugaaggacagcaugaugcagcuggaccccagcgccaagaccuggaucgacaucgagggcagacccgaggaccccguggagaucgcccuguaccagcccaugagcggcugcuacauccacuucuucagagagcccaccgaccugaagcaguucaagcaggacgccaaguacagccacggcaucgacguggccgaccuguuccccgcccagcccggccugaccagcgccgugaucgaggcccugcccagaaacauggugcugaccugccagggcagcgacgacaucaagagacugcuggacagccagggcagaagagacaucaagcugaucgacaucgcccugagcaaggccgacagcagaagauucgagaacgccgugugggaccagugcaaggaccugugccacaugcacaccggcguggugguggagaagaagaagagaggcggcaaggaggagaucaccccccacugcgcccugauggacugcaucauguacgacgccgccgugagcggcggccugaacauccccgugcugagagccgugcugcccagagacaugguguucagaaccagcagccccaagguggugcugugaggacuaguaauaaggaaacuguaugaaugucugugggcaggaagugaagagauccuucuguaaagguuuuuggaauuaugucugcugaauaauaaacuuuuuugaaauaauaaaucugguagaaaaaugagaucucaaaggcucuuuucagagccaccaaaaaaaaaaaaaaaaaaaaaaaaaaaaaaaaaaaaaaaaaaaaaaaaaaaaaaaaaaaaaaaaaaaaaaaaaaaaaaaaaaaaaaaaaaaaaaaaaaaaa

SEQ ID NO: 20224 - RNA, 2097 nt, Artificial Sequence
  mRNA product Design b-4 (hSL-A100) comprising derived and/or modified sequence from LASV(Lassa virus/H.sapiens-wt/NGA/2016/ISTH_0017;Clade II)__AVO03568__SP-HsALB_NP(2-569) (opt4)
aggagagucccgcagucggcguccagcggcucugcuuguucgugugugugucguugcaggccuuauucaagcuuaccaugaagugggugaccuucaucagccugcuguuccuguucagcagcgccuacagcagcgccagcaaggaggugaagagcuuccuguggacccagagccugagaagagagcugagcggcuacugcagcagcaucaagcugcagguggugaaggacgcccaggcccugcugcacggccuggacuucagcgaggugagcaacgugcagagacugaugagaaagcagaagagagacgacagcgaccugaagagacugagagaccugaaccaggccgugaacaaccugguggagcugaagagcacccagcagaagagcauccugagagugggcacccugaccagcgacgaccugcugacccuggccgccgaccuggagaagcugaagagcaaggugaucagaaccgagagaccccugagcagcggcguguacaugggcaaccugagcacccagcagcuggagcagagaagagcccugcugaacaugaucggcauggccggcggcgcccagggcacccagcccggcagagacggcguggugagagugugggacgugaagaaccccgaccugcugaacaaccaguucggcaccaugcccagccugacccuggccugccugaccaagcagggccagguggaccugaacgacgccgugcuggcccugaccgaccugggccugaucuacaccgccaaguaccccaacagcagcgaccuggacagacugagccagagccaccccauccugaacaugguggacaccaagaagagcagccugaacaucagcggcuacaacuucagccugggcgccgccgugaaggccggcgccugcaugcuggacggcggcaacaugcuggagaccaucaaggugaccccccagaccauggacggcauccugaagagcauccugaaggugaagagaagccugggcauguucgugagcgacgcccccggcgagagaaaccccuacgagaacauccuguacaagaucugccugagcggcgacggcuggcccuacaucgccagcagaaccagcaucgugggcagagccugggagaacaccaccguggaccuggagagcgacggcaagccccagaaggugggcgccaccggcagcaacaagagccugcagagcgccggcuuccccaccggccugaccuacagccagcugaugacccugaaggacagcaugaugcagcuggaccccagcgccaagaccuggaucgacaucgagggcagacccgaggaccccguggagguggcccuguaccagcccgugagcggcugcuacauccacuucuucagagagcccaccgaccugaagcaguucaagcaggacgccaaguacagccacggcaucgacguggccgaccuguuccccgcccagcccggccugaccagcgccgugaucgaggcccugcccagaaacauggugcugaccugccagggcagcgacgacaucaagaagcugcuggacagccagggcagaaaggacaucaagcugaucgacaucgcccugagcaaggccgacagcagaagauucgagaacgccgugugggaccagugcaaggaccugugccacaugcacaccggcguggugguggagaagaagaagagaggcggcaaggaggagaucaccccccacugcgcccugauggacugcaucauguacgacgccgccgugagcggcggccugaacauccccgugcugagagccgugcugcccagagacaugguguucagaaccagcagccccaagguggugcugugaggacuaguaauaaggaaacuguaugaaugucugugggcaggaagugaagagauccuucuguaaagguuuuuggaauuaugucugcugaauaauaaacuuuuuugaaauaauaaaucugguagaaaaaugagaucucaaaggcucuuuucagagccaccaaaaaaaaaaaaaaaaaaaaaaaaaaaaaaaaaaaaaaaaaaaaaaaaaaaaaaaaaaaaaaaaaaaaaaaaaaaaaaaaaaaaaaaaaaaaaaaaaaaaa

SEQ ID NO: 20225 - RNA, 2097 nt, Artificial Sequence
  mRNA product Design b-4 (hSL-A100) comprising derived and/or modified sequence from LASV(Lassa virus/H.sapiens-wt/NGA/2018/ISTH_0959;Clade II)__AVV65100__SP-HsALB_NP(2-569) (opt4)
aggagagucccgcagucggcguccagcggcucugcuuguucgugugugugucguugcaggccuuauucaagcuuaccaugaagugggugaccuucaucagccugcuguuccuguucagcagcgccuacagcagcgccagcaaggaggugaagagcuuccuguggacccagagccugagaagagagcugagcggcuacugcagcaacaucaagcugcagguggugaaggacgcccaggcccugcugcacggccuggacuucagcgaggugagcaacgugcagagacugaugagaaagcagaagagagacgacagcgaccugaagagacugagagaccugaaccaggccgugaacaaccugguggagcugaagagcacccagcagaagagcauccugagagugggcacccugaccagcgacgaccugcugacccuggccgccgaccuggagaagcugaagagcaaggugaucagaaccgagagaccccugagcagcggcguguacaugggcaaccugagcacccagcagcuggagcagagaagagcccugcugaaccugaucggcauggugggcggcgcccagggcacccagcccggcagagacggcguggugagagugugggacgugaagaaccccgaccugcugaacaaccaguucggcaccaugcccagccugacccuggccugccugaccaagcagggccagguggaccugaacgacguggugcuggcccugaccgaccugggccugaucuacaccgccaaguaccccaacagcagcgaccuggacagacugagccagagccaccccauccugaacaugguggacaccaagaagagcagccugaacaucagcggcuucaacuucagccugggcgccgccgugaaggccggcgccugcaugcuggacggcggcaacaugcuggagaccaucaaggugaccccccagaccauggacggcauccugaagagcauccugaaggugaagaagagccugggcauguucgugagcgacacccccggcgagagaaaccccuacgagaacauccuguacaagaucugccugagcggcgacggcuggcccuacaucgccagcagaaccagcaucgugggcagagccugggagaacaccaccguggaccuggagagcgacggcaagccccacaaggugggcaccgccggcagcaacaagagccugcagagcgccggcuuccccaccggccugaccuacagccagcugaugacccugaaggacagcaugaugcagcuggaccccagcgccaagaccuggaucgacaucgagggcagacccgaggaccccguggagaucgcccuguaccagcccaugagcggcugcuacauccacuucuucagagagcccaccgaccugaagcaguucaagcaggacgccaaguacagccacggcaucgacguggccgaccuguuccccgcccagcccggccugaccagcgccgugaucgaggcccugcccagaaacauggugcugaccugccagggcagcgacgacaucaagagacugcuggacagccagggcagaaaggacaucaagcugaucgacaucgcccugagcaagaccgacagcagaagauucgagaacgccgugugggaccagugcaaggaccugugccacaugcacaccggcguggugguggagaagaagaagagaggcggcaaggaggagaucaccccccacugcgcccugauggacugcaucauguacgacgccgccgugagcggcggccugaacauccccgugcugagagccgugcugcccagagacaugguguucagaaccagcagccccaagguggugcugugaggacuaguaauaaggaaacuguaugaaugucugugggcaggaagugaagagauccuucuguaaagguuuuuggaauuaugucugcugaauaauaaacuuuuuugaaauaauaaaucugguagaaaaaugagaucucaaaggcucuuuucagagccaccaaaaaaaaaaaaaaaaaaaaaaaaaaaaaaaaaaaaaaaaaaaaaaaaaaaaaaaaaaaaaaaaaaaaaaaaaaaaaaaaaaaaaaaaaaaaaaaaaaaaa

SEQ ID NO: 20226 - RNA, 2097 nt, Artificial Sequence
  mRNA product Design b-4 (hSL-A100) comprising derived and/or modified sequence from LASV(LASV003-NIG-2008;Clade II)__AIT17581__SP-HsALB_NP(2-569) (opt4)
aggagagucccgcagucggcguccagcggcucugcuuguucgugugugugucguugcaggccuuauucaagcuuaccaugaagugggugaccuucaucagccugcuguuccuguucagcagcgccuacagcagcgccagcaaggaggugaagagcuuccuguggacccagagccugagaagagagcugagcggcuacugcagcagcaucaagcugcagguggugaaggacgcccaggcccugcugcacggccuggacuucagcgaggugagcaacgugcagagacugaugagaaagcagaagagagacgacagcgaccugaagagacugagagaccugaaccaggccgugaacaaccugguggagcugaagagcacccagcagaagagcgugcugagagugggcacccugaccagcgacgaccugcugacccuggccgccgaccuggagaagcugaagagcaaggugaucagaaccgagagaccccugagcagcggcguguacaugggcaaccugagcgcccagcagcuggagcagagaagaacccugcugaacaugaucggcauggugggcggcgcccagggcacccagcccggcagagacggcguggugagagugugggacgugaagaaccccgaccugcugaacaaccaguucggcaccaugcccagccugacccuggccugccugaccaagcagggccagguggaccugaacgacguggugcuggcccugaccgaccugggccugaucuacaccgccaaguaccccaacagcagcgaccuggacagacugagccagagccaccccauccugagcaugguggacaccaagaagagcagccugaacaucagcggcuacaacuucagccugggcgccgccgugaaggccggcgccugcaugcuggacggcggcaacaugcuggagaccaucaaggugaccccccagaccauggacggcauccugaagagcauccugaaggugaagaagagccugggcauguucgugagcgacacccccggcgagagaaaccccuacgagaacauccuguacaagaucugccugagcggcgacggcuggcccuacaucgccagcagaaccagcaucgugggcagagccugggagaacaccaccguggaccuggagagcgacggcaagccccagaaggugggcaccgccggcagcaacaagagccugcagagcgccggcuuccccaccggccugaccuacagccagcugaugacccugaaggacagcaugaugcagcuggaccccagcgccaagaccuggaucgacaucgagggcagacccgaggaccccguggagaucgcccuguaccagcccaugagcggcugcuacauccacuucuucagagagcccaccgaccugaagcaguucaagcaggacgccaaguacagccacggcaucgacgugaccgaccuguuccccgcccagcccggccugaccagcgccgugaucgaggcccugcccagaaacauggugcugaccugccagggcagcgacgacaucaagagacugcuggacagccagggcagaagagacaucaagcugaucgacaucgcccugagcaaggccgacagcagaagauucgagaacgccgugugggaccagugcaaggaccugugccacaugcacaccggcguggugguggagaagaagaagagaggcggcaaggaggagaucaccccccacugcgcccugauggacugcaucauguacgacgccgccgugagcggcggccugaacauccccgugcugagagccgugcugcccagagacaugguguucagaaccagcagccccaagguggugcugugaggacuaguaauaaggaaacuguaugaaugucugugggcaggaagugaagagauccuucuguaaagguuuuuggaauuaugucugcugaauaauaaacuuuuuugaaauaauaaaucugguagaaaaaugagaucucaaaggcucuuuucagagccaccaaaaaaaaaaaaaaaaaaaaaaaaaaaaaaaaaaaaaaaaaaaaaaaaaaaaaaaaaaaaaaaaaaaaaaaaaaaaaaaaaaaaaaaaaaaaaaaaaaaaa

SEQ ID NO: 20227 - RNA, 2097 nt, Artificial Sequence
  mRNA product Design b-4 (hSL-A100) comprising derived and/or modified sequence from LASV(LASV035-NIG-2009;Clade II)__AIT17589__SP-HsALB_NP(2-569) (opt4)
aggagagucccgcagucggcguccagcggcucugcuuguucgugugugugucguugcaggccuuauucaagcuuaccaugaagugggugaccuucaucagccugcuguuccuguucagcagcgccuacagcagcgccagcaaggaggugaagagcuuccuguggacccagagccugagaagagagcugagcggcuacugcagcagcaucaagcugcagguggugaaggacgcccaggcccugcugcacggccuggacuucagcgaggugagcaacgugcagagacugaugagaaagcagaagagagacgacagcgaccugaagagacugagagaccugaaccaggccgugaacaaccugguggagcugaagagcacccagcagaagagcauccugagagugggcacccugaccagcgacgaccugcugacccuggccgccgaccuggagaagcugaagagcaaggugaucagaaccgagagaccccugagcagcggcguguacaugggcaaccugagcgcccagcagcuggagcagagaagagcccugcugaacaugaucggcauggugggcggcgcccagggcacccagcccggcagagacggcguggugagagugugggacgugaagaaccccgaccugcugaacaaccaguucggcaccaugcccagccugacccuggccugccugaccaagcagggccagguggaccugaacgacgccgugcuggcccugaccgaccugggccugaucuacaccgccaaguaccccaacagcagcgaccuggacagacugagccagagccaccccauccugaacaugguggacaccaagaagagcagccugaacaucagcggcuacaacuucagccugggcgccgccgugaaggccggcgccugcaugcuggacggcggcaacaugcuggagaccaucaaggugaccccccagaccauggacggcauccugaagagcauccugaaggugaagagaagccugggcauguucgugagcgacacccccggcgagagaaaccccuacgagaacauccuguacaagaucugccugagcggcgacggcuggcccuacaucgccagcagaaccagcaucgugggcagagccugggagaacaccaccguggaccuggagagcgacggcaagccccagaaggugggcaccaccggcagcaacaagagccugcagagcgccggcuuccccaccggccugaccuacagccagcugaugacccugaaggacagcaugaugcagcuggaccccagcgccaagaccuggaucgacaucgagggcagacccgaggaccccguggagaucgcccuguaccagcccaugagcggcugcuacauccacuucuucagagagcccaccgaccugaagcaguucaagcaggacgccaaguacagccacggcaucgacguggccgaccuguuccccgcccagcccggccugaccagcgccgugaucgaggcccugcccagaaacauggugcugaccugccagggcagcgacgacaucaagaagcugcuggacagccagggcagaagagacaucaagcugaucgacaucgcccugagcaaggccgacagcagaaaguucgagaacgccgugugggaccagugcaaggaccugugccacaugcacaccggcguggugguggagaagaagaagagaggcggcaaggaggagaucaccccccacugcgcccugauggacugcaucauguacgacgccgccgugagcggcggccugaacauccccgugcugagagccgugcugcccagagacaugguguucagaaccagcagccccaagguggugcugugaggacuaguaauaaggaaacuguaugaaugucugugggcaggaagugaagagauccuucuguaaagguuuuuggaauuaugucugcugaauaauaaacuuuuuugaaauaauaaaucugguagaaaaaugagaucucaaaggcucuuuucagagccaccaaaaaaaaaaaaaaaaaaaaaaaaaaaaaaaaaaaaaaaaaaaaaaaaaaaaaaaaaaaaaaaaaaaaaaaaaaaaaaaaaaaaaaaaaaaaaaaaaaaaa

SEQ ID NO: 20228 - RNA, 2097 nt, Artificial Sequence
  mRNA product Design b-4 (hSL-A100) comprising derived and/or modified sequence from LASV(LASV1000-NIG-2009;Clade II)__AIT17783__SP-HsALB_NP(2-569) (opt4)
aggagagucccgcagucggcguccagcggcucugcuuguucgugugugugucguugcaggccuuauucaagcuuaccaugaagugggugaccuucaucagccugcuguuccuguucagcagcgccuacagcagcgccagcaaggaggugaagagcuuccuguggacccagagccugagaagagagcugagcggcuacugcagcaacaucaagcugcagguggugaaggacgcccaggcccugcugcacggccuggacuucagcgaggugagcaacgugcagagacugaugagaaagcagaagagagacgacagcgaccugaagagacugagagaccugaaccaggccgugaacaaccugguggagcugaagagcacccagcagaagagcauccugagagugggcacccugaccagcgacgaccugcugacccuggccgccgaccuggagaagcugaagagcaaggugaucagaaccgagagaccccugagcagcggcguguacaugggcaaccugagcacccagcagcuggagcagagaagagcccugcugaacaugaucggcauggugggcggcgcccagggcacccagcccggcagagacggcguggugagagugugggacgugaagaaccccgaccugcugaacaaccaguucggcaccaugcccagccugacccuggccugccugaccaagcagggccagguggaccugaacgacguggugcuggcccugaccgaccugggccugaucuacaccgccaaguaccccaacagcagcgaccuggacagacugagccagagccaccccauccugaacaugguggacaccaagaagagcagccugaacaucagcggcuacaacuucagccugggcgccgccgugaaggccggcgccugcaugcuggacggcggcaacaugcuggagaccaucaaggugaccccccagaccauggacggcauccugaagagcauccugaaggugaagaagagccugggcauguucgugagcgacacccccggcgagagaaaccccuacgagaacauccuguacaagaucugccugagcggcgacggcuggcccuacaucgccagcagaaccagcaucgugggcagagccugggagaacaccaccguggaccuggagagcgacggcaagccccagaaggugggcaccgccggcagcaacaagagccugcagagcgccggcuuccccaccggccugaccuacagccagcugaugacccugaaggacagcaugaugcagcuggaccccagcgccaagaccuggaucgacaucgagggcagacccgaggaccccguggagaucgcccuguaccagcccgugagcggcugcuacauccacuucuucagagagcccaccgaccugaagcaguucaagcaggacgccaaguacagccacggcaucgacguggccgaccuguuccccgcccagcccggccugaccagcgccgugaucgaggcccugcccagaaacauggugcugaccugccagggcagcgacgacaucaagagacugcuggacagccagggcagaagagacaucaagcugaucgacaucgcccugagcaaggccgacagcagaagauucgagaacgccgugugggaccagugcaaggaccugugccacaugcacaccggcguggugguggagaagaagaagagaggcggcaaggaggagaucaccccccacugcgcccugauggacugcaucauguacgacgccgccgugagcggcggccugaacauccccgugcugagagccgugcugcccagagacaugguguucagaaccagcagccccaagguggugcugugaggacuaguaauaaggaaacuguaugaaugucugugggcaggaagugaagagauccuucuguaaagguuuuuggaauuaugucugcugaauaauaaacuuuuuugaaauaauaaaucugguagaaaaaugagaucucaaaggcucuuuucagagccaccaaaaaaaaaaaaaaaaaaaaaaaaaaaaaaaaaaaaaaaaaaaaaaaaaaaaaaaaaaaaaaaaaaaaaaaaaaaaaaaaaaaaaaaaaaaaaaaaaaaaa

SEQ ID NO: 20229 - RNA, 2097 nt, Artificial Sequence
  mRNA product Design b-4 (hSL-A100) comprising derived and/or modified sequence from LASV(LASV221-NIG-2010;Clade II)__AIT17625__SP-HsALB_NP(2-569) (opt4)
aggagagucccgcagucggcguccagcggcucugcuuguucgugugugugucguugcaggccuuauucaagcuuaccaugaagugggugaccuucaucagccugcuguuccuguucagcagcgccuacagcagcgccagcaaggaggugaagagcuuccuguggacccagagccugagaagagagcugagcggcuacugcagcagcaucaagcugcagguggugaaggacgcccaggcccugcugcacggccuggacuucagcgaggugagcaacgugcagagacugaugagaaagcagagaagagacgacagcgaccugaagagacugagagaccugaaccaggccgugaacaaccugguggagcugaagagcacccagcagaagagcauccugagagugggcacccugaccagcgacgaccugcugacccuggccgccgaccuggagaagcugaagagcaaggugaucagaaccgagagaccccugagcagcggcguguacaugggcaaccugagcacccagcagcuggagcagagaagagcccugcugaacaugaucggcauggugggcggcgcccagggcacccagcccggcagagacggcguggugagagugugggacgugaagaaccccgaccugcugaacaaccaguucggcaccaugcccagccugacccuggccugccugaccaagcagggccagguggaccugaacgacgccgugcuggcccugaccgaccugggccugaucuacaccgccaaguaccccaacagcagcgaccuggacagacugagccagagccaccccauccugaacaugguggacaccaagaagagcagccugaacaucagcggcuacaacuucagccugggcgccgccgugaaggccggcgccugcaugcuggacggcggcaacaugcuggagaccaucaaggugaccccccagaccguggacggcauccugaagagcauccugaaggugaagagaagccugggcauguucgugagcgacacccccggcgagagaaaccccuacgagaacauccuguacaagaucugccugagcggcgacggcuggcccuacaucgccagcagaaccagcaucgugggcagagccugggagaacaccaccguggaccuggagagcgacggcaagccccagaaggugggcaccgccggcagcaacaagagccugcagagcgccggcuuccccaccggccugaccuacagccagcugaugacccugaaggacagcaugaugcagcuggaccccagcgccaagaccuggaucgacaucgagggcagacccgaggaccccguggagaucgcccuguaccagcccaugagcggcugcuacauccacuucuucagagagcccaccgaccugaagcaguucaagcaggacgccaaguacagccacggcaucgacguggccgaccuguuccccgcccagcccggccugaccagcgccgugaucgaggcccugcccagaaacauggugcugaccugccagggcagcgacgacaucaagagacugcuggacagccagggcagaagagacaucaagcugaucgacaucgcccugagcaaggccgacagcagaaaguucgagaacgccgugugggaccagugcaaggaccugugccacaugcacaccggcguggugguggagaagaagaagagaggcggcaaggaggagaucaccccccacugcgcccugauggacugcaucauguacgacgccgccgugagcggcggccugaacauccccgugcugagagccgugcugcccagagacaugguguucagaaccagcagccccaagguggugcugugaggacuaguaauaaggaaacuguaugaaugucugugggcaggaagugaagagauccuucuguaaagguuuuuggaauuaugucugcugaauaauaaacuuuuuugaaauaauaaaucugguagaaaaaugagaucucaaaggcucuuuucagagccaccaaaaaaaaaaaaaaaaaaaaaaaaaaaaaaaaaaaaaaaaaaaaaaaaaaaaaaaaaaaaaaaaaaaaaaaaaaaaaaaaaaaaaaaaaaaaaaaaaaaaa

SEQ ID NO: 20230 - RNA, 2097 nt, Artificial Sequence
  mRNA product Design b-4 (hSL-A100) comprising derived and/or modified sequence from LASV(LASV237-NIG-2010;Clade II)__AIT17639__SP-HsALB_NP(2-569) (opt4)
aggagagucccgcagucggcguccagcggcucugcuuguucgugugugugucguugcaggccuuauucaagcuuaccaugaagugggugaccuucaucagccugcuguuccuguucagcagcgccuacagcagcgccagcaaggaggugaagagcuuccuguggacccagagccugagaagagagcugagcggcuacugcagcaacaucaagcugcagguggugaaggacgcccaggcccugcugcacggccuggacuucagcgaggugagcaacgugcagagacugaugagaaagcagaagagagacgacagcgaccugaagagacugagagaccugaaccaggccgugaacaaccugguggagcugaagagcacccagcagaagagcauccugagagugggcacccugaccagcgacgaccugcugacccuggccgccgaccuggagaagcugaagagcaaggugaucagaaccgagagaccccugagcagcggcguguacaugggcaaccugagcacccagcagcuggagcagagaagagcccugcugaacaugaucggcauggugggcggcgcccagggcacccagcccggcagagacggcguggugagagugugggacgugaagaaccccgaccugcugaacaaccaguucggcaccaugcccagccugacccuggccugccugaccaagcagggccagguggaccugaacgacgccgugcuggcccugaccgaccugggccugaucuacaccgccaaguaccccaacagcagcgaccuggacagacugagccagagccaccccauccugaacaugguggacaucaagaagagcagccugaacaucagcggcuacaacuucagccugggcgccgccgugaaggccggcgccugcaugcuggacggcggcaacaugcuggagaccaucaaggugaccccccagaccauggacggcauccugaagagcauccugaaggugaagagaagccugggcauguucgugagcgacacccccggcgagagaaaccccuacgagaacauccuguacaagaucugccugagcggcgacggcuggcccuacaucgccagcagaaccagcaucgugggcagagccugggagaacaccaccguggaccuggagagcgacggcaagccccagaaggugggcagcgccggcagcaacaagagccugcagagcgccggcuuccccaccggccugaccuacagccagcugaugacccugaaggacagcaugaugcagcuggaccccagcgccaagaccuggaucgacaucgagggcagacccgaggaccccguggagaucgcccuguaccagcccaugagcggcugcuacauccacuucuucagagagcccaccgaccugaagcaguucaagcaggacgccaaguacagccacggcaucgacguggccgaccuguuccccgcccagcccggccugaccagcgccgugaucgaggcccugcccagaaacauggugcugaccugccagggcagcgacgacaucaagagacugcuggacagccagggcagaagagacaucaagcugaucgacaucgcccugagcaaggccgacagcagaagauucgagaacgccgugugggaccagugcaaggaccugugccacaugcacaccggcguggugguggagaagaagaagagaggcggcaaggaggagaucaccccccacugcgcccugauggacugcaucauguacgacgccgccgugagcggcggccugaacauccccgugcugagagccgugcugcccagagacaugguguucagaaccagcagccccaagguggugcugugaggacuaguaauaaggaaacuguaugaaugucugugggcaggaagugaagagauccuucuguaaagguuuuuggaauuaugucugcugaauaauaaacuuuuuugaaauaauaaaucugguagaaaaaugagaucucaaaggcucuuuucagagccaccaaaaaaaaaaaaaaaaaaaaaaaaaaaaaaaaaaaaaaaaaaaaaaaaaaaaaaaaaaaaaaaaaaaaaaaaaaaaaaaaaaaaaaaaaaaaaaaaaaaaa

SEQ ID NO: 20231 - RNA, 2097 nt, Artificial Sequence
  mRNA product Design b-4 (hSL-A100) comprising derived and/or modified sequence from LASV(LASV253-NIG-2011;Clade II)__AIT17671__SP-HsALB_NP(2-569) (opt4)
aggagagucccgcagucggcguccagcggcucugcuuguucgugugugugucguugcaggccuuauucaagcuuaccaugaagugggugaccuucaucagccugcuguuccuguucagcagcgccuacagcagcgccagcaaggaggugaagagcuuccuguggacccagagccugagaagagagcugagcggcuacugcagcagcaucaagcugcagguggugaaggacgcccaggcccugcugcacggccuggacuucagcgaggugagcaacgugcagagacugaugagaaagcagaagagagacgacagcgaccugaagagacugagagaccugaaccaggccgugaacaaccugguggagcugaagagcacccagcagaagagcgugcugagagugggcacccugaccagcgacgaccugcugacccuggccgccgaccuggagaagcugaagagcaaggugaucagaaccgagagaccccugagcagcggcguguacaugggcaaccugagcacccagcagcuggagcagagaagagcccugcugaacaugaucggcauggugggcggcgcccagggcacccagcccggcagagacggcguggugagagugugggacgugaagaaccccgaccugcugaacaaccaguucggcaccaugcccagccugacccuggccugccugaccaagcagggccagguggaccugaacgacguggugcuggcccugaccgaccugggccugaucuacaccgccaaguaccccaacagcagcgaccuggacagacugagccagagccaccccauccugaacaugguggacaccaagaagagcagccugaacaucagcggcuacaacuucagccugggcgccgccgugaaggccggcgccugcaugcuggacggcggcaacaugcuggagaccaucaaggugaccccccagaccauggacggcauccugaagagcauccugaaggugaagaagagccugggcauguucgugagcgacacccccggcgagagaaaccccuacgagaacauccuguacaagaucugccugagcggcgacggcuggcccuacaucgccagcagaaccagcaucgugggcagagccugggagaacaccaccguggaccuggagagcgacggcaagccccagaaggugggcaccgccggcagcaacaagagccugcagagcgccggcuuccccaccggccugaccuacagccagcugaugacccugaaggacagcaugaugcagcuggaccccagcgccaagaccuggaucgacaucgagggcagacccgaggaccccguggagaucgcccuguaccagcccaugagcggcugcuacauccacuucuucagagagcccaccgaccugaagcaguucaagcaggacgccaaguacagccacggcaucgacgugaccgaccuguuccccgcccagcccggccugaccagcgccgugaucgaggcccugcccagaaacauggugcugaccugccagggcagcgacgacaucaagagacugcuggacagccagggcagaagagacaucaagcugaucgacaucgcccugagcaaggccgacagcagaagauucgagaacgccgugugggaccagugcaaggaccugugccacaugcacaccggcguggugguggagaagaagaagagaggcggcaaggaggagaucaccccccacugcgcccugauggacugcaucauguacgacgccgccgugagcggcggccugaacauccccgugcugagagccgugcugcccagagacaugguguucagaaccagcagccccaagguggugcugugaggacuaguaauaaggaaacuguaugaaugucugugggcaggaagugaagagauccuucuguaaagguuuuuggaauuaugucugcugaauaauaaacuuuuuugaaauaauaaaucugguagaaaaaugagaucucaaaggcucuuuucagagccaccaaaaaaaaaaaaaaaaaaaaaaaaaaaaaaaaaaaaaaaaaaaaaaaaaaaaaaaaaaaaaaaaaaaaaaaaaaaaaaaaaaaaaaaaaaaaaaaaaaaaa

SEQ ID NO: 20232 - RNA, 2097 nt, Artificial Sequence
  mRNA product Design b-4 (hSL-A100) comprising derived and/or modified sequence from LASV(LASV254-NIG-2011;Clade II)__AIT17675__SP-HsALB_NP(2-569) (opt4)
aggagagucccgcagucggcguccagcggcucugcuuguucgugugugugucguugcaggccuuauucaagcuuaccaugaagugggugaccuucaucagccugcuguuccuguucagcagcgccuacagcagcgccagcaaggaggugaagagcuuccuguggacccagagccugagaagagagcugagcggcuacugcagcagcaucaagcugcagguggugaaggacgcccaggcccugcugcacggccuggacuucagcgaggugagcaacgugcagagacugaugagaaagcagaagagagacgacagcgaccugaagagacugagagaccugaaccaggccgugaacaaccugguggagcugaagagcacccagcagaagagcgugcugagagugggcacccugaccagcgacgaccugcugacccuggccgccgaccuggagaagcugaagagcaaggugaucagaaccgagagaccccugagcagcggcguguacaugggcaaccugagcacccagcagcuggagcagagaagagcccugcugaacaugaucggcauggugggcggcgcccagggcacccagcccggcagagacggcguggugagagugugggacgugaagaaccccgaccugcugaacaaccaguucggcaccaugcccagccugacccuggccugccugaccaagcagggccagguggaccugaacgacgccgugcuggcccugaccgaccugggccugaucuacaccgccaaguaccccaacagcagcgaccuggacagacugagccagagccaccccauccugaacaugguggacaccaagaagagcagccugaacaucagcggcuacaacuucagccugggcgccgccgugaaggccggcgccugcaugcuggacggcggcaacaugcuggagaccaucaaggugaccccccagaccauggacggcauccugaagagcauccugaaggugaagaagagccugggcauguucgugagcgacacccccggcgagagaaaccccuacgagaacauccuguacaagaucugccugagcggcgacggcuggcccuacaucgccagcagaaccagcaucgugggcagagccugggagaacaccaucguggaccuggagagcgacggcaagccccagaaggugggcaccgccggcagcaacaagagccugcagagcgccggcuuccccaccggccugaccuacagccagcugaugacccugaaggacagcaugaugcagcuggaccccagcgccaagaccuggaucgacaucgagggcagacccgaggaccccguggagaucgcccuguaccagcccaugagcggcugcuacauccacuucuucagagagcccaccgaccugaagcaguucaagcaggacgccaaguacagccacggcaucgacguggccgaccuguuccccgcccagcccggccugaccagcgccgugaucgaggcccugcccagaaacauggugcugaccugccagggcagcgacgacaucaagagacugcuggacagccagggcagaagagacaucaagcugaucgacaucgcccugagcaaggccgacagcagaagauucgagaacgccgugugggaccagugcaaggaccugugccacaugcacaccggcguggugguggagaagaagaagagaggcggcaaggaggagaucaccccccacugcgcccugauggacugcaucauguacgacgccgccgugagcggcggccugaacauccccgugcugagagccgugcugcccagagacaugguguucagaaccagcagccccaagguggugcugugaggacuaguaauaaggaaacuguaugaaugucugugggcaggaagugaagagauccuucuguaaagguuuuuggaauuaugucugcugaauaauaaacuuuuuugaaauaauaaaucugguagaaaaaugagaucucaaaggcucuuuucagagccaccaaaaaaaaaaaaaaaaaaaaaaaaaaaaaaaaaaaaaaaaaaaaaaaaaaaaaaaaaaaaaaaaaaaaaaaaaaaaaaaaaaaaaaaaaaaaaaaaaaaaa

SEQ ID NO: 20233 - RNA, 2097 nt, Artificial Sequence
  mRNA product Design b-4 (hSL-A100) comprising derived and/or modified sequence from LASV(Nig08-04;Clade II)__ADU56611__SP-HsALB_NP(2-569) (opt4)
aggagagucccgcagucggcguccagcggcucugcuuguucgugugugugucguugcaggccuuauucaagcuuaccaugaagugggugaccuucaucagccugcuguuccuguucagcagcgccuacagcagcgccagcaaggaggugaagagcuuccuguggacccagagccugagaagagagcugagcggcuacugcagcaacaucaagcugcagguggugaaggacgcccaggcccugcugcacggccuggacuucagcgaggugagcaacgugcagagacugaugagaaagcagaagagagacgacggcgaccugaagagacugagagaccugaaccaggccgugaacaaccugguggagcugaagagcacccagcagaagagcgugcugagagugggcacccugaccagcgacgaccugcugacccuggccgccgaccuggagaagcugaagagcaaggugaucagaaccgagagaccccugagcagcggcguguacaugggcaaccugagcacccagcagcuggagcagagaaaggcccugcugagcaugaucggcauggugggcggcgcccagggcacccagcccggcagagacggcguggugagagugugggacgugaagaaccccgaccugcugaacaaccaguucggcaccaugcccagccugacccuggccugccugaccaagcagggccagguggaccugaacgacgccgugcuggcccugaccgaccugggccugaucuacaccgccaaguaccccaacagcagcgaccuggacagacugagccagagccaccccauccugaacaugguggacaccaagaagagcagccugaacaucagcggcuacaacuucagccugggcgccgccgugaaggccggcgccugcaugcuggacggcggcaacaugcuggagaccaucaaggugaccccccagaccauggacggcauccugaagagcauccugaaggugaagagaagccugggcauguucgugagcgacacccccggcgagagaaaccccuacgagaacauccuguacaagaucugccugagcggcgacggcuggcccuacaucgccagcagaaccagcaucgugggcagagccugggagaacaccaccguggaccuggagagcgacggcaagccccagaaggugggcaccgccggcagcaacaagagccugcagagcgccggcuuccccaccggccugaccuacagccagcugaugacccugaaggacagcaugaugcagcuggaccccagcgccaagaccuggaucgacaucgagggcagacccgaggaccccguggagaucgcccuguaccagcccaugagcggcugcuacauccacuucuucagagagcccaccgaccugaagcaguucaagcaggacgccaaguacagccacggcaucgacgugaccgaccuguucagcgcccagcccggccugaccagcgccgugaucgaggcccugcccagaaacauggugcugaccugccagggcagcgacgacaucaagaagcugcuggacagccagggcagaagagacaucaagcugaucgacaucagccugaacaaggccgacagcagaagauucgagaacgccgugugggaccagugcaaggaccugugccacaugcacaccggcguggugguggagaagaagaagagaggcggcaaggaggagaucaccccccacugcgcccugauggacugcaucauguucgacgccgccgugagcggcggccugaacauccccauccugagagccgugcugcccagagacaugguguucagaaccagcagccccaagguggugcugugaggacuaguaauaaggaaacuguaugaaugucugugggcaggaagugaagagauccuucuguaaagguuuuuggaauuaugucugcugaauaauaaacuuuuuugaaauaauaaaucugguagaaaaaugagaucucaaaggcucuuuucagagccaccaaaaaaaaaaaaaaaaaaaaaaaaaaaaaaaaaaaaaaaaaaaaaaaaaaaaaaaaaaaaaaaaaaaaaaaaaaaaaaaaaaaaaaaaaaaaaaaaaaaaa

SEQ ID NO: 20234 - RNA, 2100 nt, Artificial Sequence
  mRNA product Design b-4 (hSL-A100) comprising derived and/or modified sequence from LASV(GA391;Clade III)__AAA46284__SP-HsALB_NP(2-570) (opt4)
aggagagucccgcagucggcguccagcggcucugcuuguucgugugugugucguugcaggccuuauucaagcuuaccaugaagugggugaccuucaucagccugcuguuccuguucagcagcgccuacagcagcgccagcaaggaggugagaagcugccuguggacccagagccugagaagagagcugagcggcuacugcagcaacaucaagcugcagguggugaaggacgcccaggcccugcugcacggccuggacuucagcgaggugagcaacgugcagagacugaugagaaagcagaagagagacgacggcgaccugaagagacugagagaccugaaccaggccgugaacaaccugguggagcugaagagcacccagcagaagagcgugcugagagugggcacccugagcagcgacgaccugcugauccuggccgccgaccuggagaagcugaagagcaaggugaccagaaccgagagaccccugagcagcggcguguacaugggcaaccugagcagccagcagcuggaccagagaagagcccugcugaacaugaucggcaugaccggcgugagcggcggcggcaagggcgccagcaacggcaucgugagagugugggacgugaagaacgccgagcugcugaacaaccaguucggcaccaugcccagccugacccuggccugccugaccaagcagggccagguggaccugaacgacgccgugcaggcccugaccgaccugggccugaucuacaccgccaaguaccccaacagcagcgaccuggacagacugagccagagccaccccauccugaacaugaucgacaccaagaagagcagccugaacaucagcggcuacaacuucagccugggcgccgccgugaaggccggcgccugcaugcuggacggcggcaacaugcuggagaccaucaaggugagcccccagaccauggacggcauccugaagagcauccugaaggugaagaagagccugggcauguucgugagcgacacccccggcgagagaaaccccuacgagaacauccuguacaagaucugccugagcggcgacggcuggagcuacaucgccagcagaaccagcaucgugggcagagccugggagaacaccgugguggaccuggagcaggacaacaagccccagaagaucggcaacggcggcagcaacaagagccugcagagcgccggcuucgccgccggccugaucuacagccagcugaugacccugaaggacuucaagugcuucaaccugauccccaacgccaagaccuggauggacaucgagggcagacccgaggaccccguggagaucgcccuguaccagcccagcagcggcugcuacgugcacuucuucagagagcccaccgaccugaagcaguucaagcaggacgccaaguacagccacggcagagacgugaccgaccuguucgccgcccagcccggccugaccagcgccgugaucgaggcccugcccagaaacauggugaucaccugccagggcagcgaggacaucagaaagcugcuggagagccagggcagaagagacaucaagcugaucgacaucacccugagcaaggccgacagcagaaaguucgagaacgccgugugggaccaguucaaggaccugugccacaugcacaccggcguggugguggagaagaagaagagaggcggcaaggaggagaucaccccccacugcgcccugauggacugcaucauguucgacgccgccgugagcggcggccuggacgccaaggugcugagaguggugcugcccagagacaugguguucagaaccagcacccccaagguggugcugugaggacuaguaauaaggaaacuguaugaaugucugugggcaggaagugaagagauccuucuguaaagguuuuuggaauuaugucugcugaauaauaaacuuuuuugaaauaauaaaucugguagaaaaaugagaucucaaaggcucuuuucagagccaccaaaaaaaaaaaaaaaaaaaaaaaaaaaaaaaaaaaaaaaaaaaaaaaaaaaaaaaaaaaaaaaaaaaaaaaaaaaaaaaaaaaaaaaaaaaaaaaaaaaaa

SEQ ID NO: 20235 - RNA, 2097 nt, Artificial Sequence
  mRNA product Design b-4 (hSL-A100) comprising derived and/or modified sequence from LASV(Nig08-A19;Clade III)__ADU56619__SP-HsALB_NP(2-569) (opt4)
aggagagucccgcagucggcguccagcggcucugcuuguucgugugugugucguugcaggccuuauucaagcuuaccaugaagugggugaccuucaucagccugcuguuccuguucagcagcgccuacagcagcgccagcaaggaggugaagagcuuccuguggacccagagccugagaagagagcugagcggcuacugcagcaacaucaagcugcagguggugaaggacgcccaggcccugcugcacggccuggacuucagcgaggugagcaacgugcagagacugaugagaaagcagaagagagacgacggcgaccugaagagacugagagaccugaaccaggccgugaacaaccugguggagcugaagagcacccagcagaagagcgugcugagagugggcacccugagcagcgacgaccugcuggugcuggccgccgaccuggagaagcugaagagcaagguggugagaaccgagagaccccugagcagcggcaucuacaugggcaaccugagcagccagcagcuggaccagagaaaggcccugcugaacaugaucggcaugaccggcggcaacggcggcagaaacaccaccagcgacggcaucgugagagugugggacgugaagaacgccgagcugcugaacaaccaguucggcaccaugcccagccugacccuggccugccugaccaagcagggccagguggaccugaacgacgccgugcaggcccugaccgaccugggccugaucuacaccgccaaguaccccaacagcagcgaccuggacagacuggcccagagccaccccauccugaacaugaucgacaccaagaagagcagccugaacaucagcggcuacaacuucagccugggcgccgccgugaaggccggcgccugcaugcuggacggcggcaacaugcuggagaccaucaaggugagcccccagaccauggacggcauccugaagagcauccugaaggugaagagaagccugggcauguucaucagcgacacccccggcgagagaaaccccuacgagaacauccuguacaagaucugccugagcggcgacggcuggcccuacaucgccagcagaaccagcaucgugggcagagccugggagaacaccgugguggaccuggagagcgacaacaagccccagaagaccggcaacggcggcagcaacaagagccugcagagcgccggcuucgccgccggccugaccuacagccagcugaugacccugaaggacagcaugcugcagcuggaccccaacgccaagaccuggauggacaucgagggcagacccgaggaccccguggagaucgcccuguaccagcccagcagcggcugcuacauccacuucuucagagagcccaccgaccugaagcaguucaagcaggacgccaaguacagccacggcaucgacgugaccgaccuguucgccgcccagcccggccugaccagcgccgugaucgaggcccugcccagaaacauggugaucaccugccagggcagcgaggacaucagaaagcugcuggagagccagggcagaagagacaucaagcugaucgacaucagccugagcaagguggacagcagaaaguucgagaacgccgugugggaccaguucaaggaccugugccacaugcacaccggcaucgugguggagaagaagaagagaggcggcaaggaggagaucaccccccacugcgcccugauggacugcaucauguucgacgccgccgugagcggcggcguggacgccaaggugcugagagccgugcugcccagagacaugguguucagaaccagcacccccaagguggugcugugaggacuaguaauaaggaaacuguaugaaugucugugggcaggaagugaagagauccuucuguaaagguuuuuggaauuaugucugcugaauaauaaacuuuuuugaaauaauaaaucugguagaaaaaugagaucucaaaggcucuuuucagagccaccaaaaaaaaaaaaaaaaaaaaaaaaaaaaaaaaaaaaaaaaaaaaaaaaaaaaaaaaaaaaaaaaaaaaaaaaaaaaaaaaaaaaaaaaaaaaaaaaaaaaa

SEQ ID NO: 20236 - RNA, 2097 nt, Artificial Sequence
  mRNA product Design b-4 (hSL-A100) comprising derived and/or modified sequence from LASV(G1180-SLE-2010;Clade IV)__AIT17169__SP-HsALB_NP(2-569) (opt4)
aggagagucccgcagucggcguccagcggcucugcuuguucgugugugugucguugcaggccuuauucaagcuuaccaugaagugggugaccuucaucagccugcuguuccuguucagcagcgccuacagcagcgccagcaaggagaucaagagcuuccuguggacccagagccugagaagagagcugagcggcuacugcagcaacaucaagcugcagguggugaaggacgcccaggcccugcugcacggccuggacuucagcgaggugagcaacgugcagagacugaugagaaaggagagaagagacgacaacgaccugaagagacugagagaccugaaccaggccgugaacaaccugguggagcugaagagcacccagcagaagagcauccugagagugggcacccugaccagcgacgaccugcugauccuggccgccgaccuggagaagcugaagagcaaggugaucagaaccgagagaccccugagcgccggcguguacaugggcaaccugagcagccagcagcuggaccagagaagagcccugcugagcaugaucggcaugagcagcggcaaccagagagcccaggccggcagagacggcguggugagagugugggacgugaagaacguggagcugcugaacaaccaguucggcaccaugcccagccugacccuggccugccugaccaagcagggccagguggaccugaacgacgccgugcaggcccugaccgaccugggccugaucuacaccgccaaguaccccaacaccagcgaccuggacagacugacccagagccaccccauccugaacaugaucgacaccaagaagagcagccugaacaucagcggcuacaacuucagccugggcgccgccgugaaggccggcgccugcaugcuggacggcggcaacaugcuggagaccaucaaggugagcccccagaccauggacggcauccugaagagcauccugaaggugaagaaggcccugggcauguucaucagcgacacccccggcgagagaaaccccuacgagaacauccuguacaagaucugccugagcggcgacggcuggcccuacaucgccagcagaaccagcaucaccggcagagccugggagaacaccgugguggaccuggagagcgacggcaagccccagaaggccggcagcaacaacagcaacaagagccugcagagcgugggcuucaccgccggccugaccuacagccagcugaugacccugaaggacgccaugcugcagcuggaccccaacgccaagaccuggauggacaucgagggcagacccgaggaccccguggagaucgcccuguaccagcccagcagcggcugcuacauccacuucuucagagagcccaccgaccugaagcaguucaagcaggacgccaaguacagccacggcaucgacgugaccgaccuguucgccgcccagcccggccugaccagcgccgugaucgacgcccugcccagaaacauggugaucaccugccagggcagcgacgacaucagaaagcugcuggagagccagggcagaaaggacaucaagcugaucgacaucgcccugagcaagaccgacagcagaaaguacgagaacgccgugugggaccaguacaaggaccugugccacaugcacaccggcguggugguggagaagaagaagagaggcggcaaggaggagaucaccccccacugcgcccugauggacugcaucauguucgacgccgccgugagcggcggccugaacaccagcgugcugagagccgugcugcccagagacaugguguucagaaccagcacccccagaguggugcugugaggacuaguaauaaggaaacuguaugaaugucugugggcaggaagugaagagauccuucuguaaagguuuuuggaauuaugucugcugaauaauaaacuuuuuugaaauaauaaaucugguagaaaaaugagaucucaaaggcucuuuucagagccaccaaaaaaaaaaaaaaaaaaaaaaaaaaaaaaaaaaaaaaaaaaaaaaaaaaaaaaaaaaaaaaaaaaaaaaaaaaaaaaaaaaaaaaaaaaaaaaaaaaaaa

SEQ ID NO: 20237 - RNA, 2097 nt, Artificial Sequence
  mRNA product Design b-4 (hSL-A100) comprising derived and/or modified sequence from LASV(G1442-SLE-2011;Clade IV)__AIT17181__SP-HsALB_NP(2-569) (opt4)
aggagagucccgcagucggcguccagcggcucugcuuguucgugugugugucguugcaggccuuauucaagcuuaccaugaagugggugaccuucaucagccugcuguuccuguucagcagcgccuacagcagcgccagcaaggaggugaagagcuuccuguggacccagagccugagaagagagcugagcggcuacugcagcaacaucaagcugcagguggugaaggacgcccaggcccugcugcacggccuggacuucagcgaggugagcaacgugcagagacugaugagaaagcagagaagagacgacaacgaccugaagagacugagagaccugaaccaggccgugaacaaccugguggagcugaagagcacccagcagaagagcgugcugagagugggcacccugaccagcgacgaccugcuggugcuggccgccgaccuggagaagcugaagagcaaggugaucagaaccgagagaccccugagcgccggcguguacaugggcaaccugagcagccagcagcuggaccagagaagagcccugcugaacaugaucggcaugagcggcggcauccagggcaccagaaccggcagagacggcguggugagagugugggacgugaagaacgccgaccugcugaacaaccaguucggcaccaugcccagccugacccuggccugccugaccaagcagggccagguggaccugaacgacguggugcaggcccugaccgaccugggccugaucuacaccgccaaguaccccaacgccagcgaccuggacagacugacccagagccaccccauccugaacaugaucgacaccaagaagagcagccugaacaucagcggcuacaacuucagccugggcgccgccgugaaggccggcgccugcaugcuggacggcggcaacaugcuggagaccaucaaggugagcccccagaccauggacggcauccugaagagcauccugaaggugaagaagacccugggcauguucaucagcgacacccccggcgagagaaaccccuacgagaacauccuguacaagaucugccugagcggcgacggcuggcccuacaucgccagcagaaccagcaucaccggcagagccugggagaacaccgugguggaccuggagagcgacggcaagccccagaaggccggcagcaacaacagcaacaagagccugcagagcgccggcuucgccgccggccugaccuacagccagcugaugacccugaaggacgccaugcugcagcuggaccccaacgccaagaccuggauggacaucgagggcagacccgaggaccccguggagaucgcccuguaccagcccagcagcggcugcuacauccacuucuucagagagcccaccgaccugaagcaguucaagcaggacgccaaguacagccacggcaucgacgugaccgaccuguucgccgcccagcccggccugaccagcgccgugaucgaggcccugcccagaaacauggugaucaccugccagggcagcgacgacaucaagaagcugcuggagagccagggcagaaaggacaucaagcugaucgacaucgcccugagcaagaccgacagcagaaaguacgagaacgccgugugggaccaguacaaggaccugugccacaugcacaccggcguggugguggagaagaagaagagaggcggcaaggaggagaucaccccccacugcgcccugauggacugcaucauguucgacgccgccgugagcggcggccugaacacccuggugcugagagccgugcugcccagagacaugguguucagaaccagcacccccagaguggugcugugaggacuaguaauaaggaaacuguaugaaugucugugggcaggaagugaagagauccuucuguaaagguuuuuggaauuaugucugcugaauaauaaacuuuuuugaaauaauaaaucugguagaaaaaugagaucucaaaggcucuuuucagagccaccaaaaaaaaaaaaaaaaaaaaaaaaaaaaaaaaaaaaaaaaaaaaaaaaaaaaaaaaaaaaaaaaaaaaaaaaaaaaaaaaaaaaaaaaaaaaaaaaaaaaa

SEQ ID NO: 20238 - RNA, 2097 nt, Artificial Sequence
  mRNA product Design b-4 (hSL-A100) comprising derived and/or modified sequence from LASV(G3010-SLE-2013;Clade IV)__AIT17345__SP-HsALB_NP(2-569) (opt4)
aggagagucccgcagucggcguccagcggcucugcuuguucgugugugugucguugcaggccuuauucaagcuuaccaugaagugggugaccuucaucagccugcuguuccuguucagcagcgccuacagcagcgccagcaaggagaucaagagcuuccuguggacccagagccugagaagagagcugagcggcuacugcagcaacaucaagcugcagguggugaaggacgcccaggcccugcugcacggccuggacuucagcgaggugagcaacgugcagagacugaugagaaaggagagaagagacgacaacgaccugaagagacugagagaccugaaccaggccgugaacaaccugguggagcugaagagcacccagcagaagagcauccugagagugggcacccugaccagcgacgaccugcugauccuggccgccgaccuggagaagcugaagagcaaggugaccagaaccgagagaccccugagcgccggcguguacaugggcaaccugagcagccagcagcuggaccagagaagagcccugcugagcaugaucggcaugagcagcggcgugcagggcgccagagccggcagagacggcguggugagagugugggacgugaagaacgccgagcugcugaacaaccaguucggcaccaugcccagccugacccuggccugccugaccaagcagggccagguggaccugaacgacguggugcaggcccugaccgaccugggccugaucuacaccgccaaguaccccaacaccagcgaccuggacagacugacccagagccaccccauccugaacaugaucgacaccaagaagagcagccugaacaucagcggcuacaacuucagccugggcgccgccgugaaggccggcgccugcaugcuggacggcggcaacaugcuggagaccaucaaggugagcccccagaccauggacggcauccugaagagcauccugaaggugaagaaggcccugggcauguucaucagcgagacccccggcgagagaaaccccuacgagaacauccuguacaagaucugccugagcggcgacggcuggcccuacaucgccagcagaaccagcaucaccggcagagccugggagaacaccgugguggaccuggagagcgacggcaagccccagaaggccggcagcaacaacagcaacaagagccugcagagcgccggcuucaccgccggccugaccuacagccagcugaugacccugaaggacgccaugcugcagcuggaccccaacgccaagaccuggauggacaucgagggcagacccgaggaccccguggagguggcccuguaccagcccagcagcggcugcuacauccacuucuucagagagcccaccgaccugaagcaguucaagcaggacgccaaguacagccacggcaucgacgugaccgaccuguucgccgcccagcccggccugaccagcgccgugaucgacgcccugcccagaaacauggugaucaccugccagggcagcgacgacaucaagaagcugcuggagagccagggcagaaaggacaucaagcugaucgacaucgcccugagcaagaccgacagcagaaaguacgagaacgccgugugggaccaguacaaggaccugugccacaugcacaccggcguggugguggagaagaagaagagaggcggcaaggaggagaucaccccccacugcgcccugauggacugcaucauguucgacgccgccgugagcggcggccugaacaccagcgugcugagagccgugcugcccagagacaugguguucagaaccagcacccccagaguggugcugugaggacuaguaauaaggaaacuguaugaaugucugugggcaggaagugaagagauccuucuguaaagguuuuuggaauuaugucugcugaauaauaaacuuuuuugaaauaauaaaucugguagaaaaaugagaucucaaaggcucuuuucagagccaccaaaaaaaaaaaaaaaaaaaaaaaaaaaaaaaaaaaaaaaaaaaaaaaaaaaaaaaaaaaaaaaaaaaaaaaaaaaaaaaaaaaaaaaaaaaaaaaaaaaaa

SEQ ID NO: 20239 - RNA, 2097 nt, Artificial Sequence
  mRNA product Design b-4 (hSL-A100) comprising derived and/or modified sequence from LASV(G502-SLE-2009;Clade IV)__AIT17127__SP-HsALB_NP(2-569) (opt4)
aggagagucccgcagucggcguccagcggcucugcuuguucgugugugugucguugcaggccuuauucaagcuuaccaugaagugggugaccuucaucagccugcuguuccuguucagcagcgccuacagcagcgccagcaaggagaucaagagcuuccuguggacccagagccugagaagagagcugagcggcuacugcagcaacaucaagcugcagguggugaaggacgcccaggcccugcugcacggccuggacuucagcgaggugagcaacgugcagagacugaugagaaaggagagaagagacgacaacgaccugaagagacugagagaccugaaccaggccgugaacaaccugguggagcugaagagcacccagcagaagagcauccugagagugggcacccugaccagcgacgaccugcugauccuggccgccgaccuggagaagcugaagagcaaggugaucagaaccgagagaccccugagcgccggcguguacaugggcaaccugagcagccagcagcuggaccagagaagagcccugcugagcaugaucggcaugagcggcggcaaccagggcgugagagccggcaaggacggcguggugagagugugggacgugaagaacgccgagcugcugaacaaccaguucggcaccaugcccagccugacccuggccugccugaccaagcagggccagguggaccugaacgacgccgugcaggcccugaccgaccugggccugaucuacaccgccaaguaccccaacaccagcgaccuggacagacugacccagagccaccccauccugaacaugaucgacaccaagaagagcagccugaacaucagcggcuacaacuucagccugggcgccgccgugaaggccggcgccugcaugcuggacggcggcaacaugcuggagaccaucaaggugagcccccagaccauggacggcauccugaagagcauccugaaggugaagaaggcccugggcauguucaucagcgacacccccggcgagagaaaccccuacgagaacauccuguacaagaucugccugagcggcgacggcuggcccuacaucgccagcagaaccagcaucaccggcagagccugggagaacaccgugguggaccuggagagcgacggcaagccccagaaggccggcagcaacaacagcaacaagagccugcagagcgccggcuucaccgccggccugaccuacagccagcugaugacccugaaggacgccaugcugcagcuggaccccaacaccaagaccuggauggacaucgagggcagacccgaggaccccguggagaucgcccuguaccagcccagcagcggcugcuacauccacuucuucagagagcccaccgaccugaagcaguucaagcaggacgccaaguacagccacggcaucgacgugaccgaccuguucgccgcccagcccggccugaccagcgccgugaucgacgcccugcccagaaacauggugaucaccugccagggcagcgacgacaucagaaagcugcuggagagccagggcagaaaggacaucaagcugaucgacaucgcccugaacaagaccgacagcagaaaguacgagaacgccgugugggaccaguacaaggaccugugccacaugcacaccggcguggugguggagaagaagaagagaggcggcaaggaggagaucaccccccacugcgcccugauggacugcaucauguucgacgccgccgugagcggcggccugaacaccagcgugcugagagccgugcugcccagagacaugguguucagaaccagcacccccagaguggugcugugaggacuaguaauaaggaaacuguaugaaugucugugggcaggaagugaagagauccuucuguaaagguuuuuggaauuaugucugcugaauaauaaacuuuuuugaaauaauaaaucugguagaaaaaugagaucucaaaggcucuuuucagagccaccaaaaaaaaaaaaaaaaaaaaaaaaaaaaaaaaaaaaaaaaaaaaaaaaaaaaaaaaaaaaaaaaaaaaaaaaaaaaaaaaaaaaaaaaaaaaaaaaaaaaa

SEQ ID NO: 20240 - RNA, 2097 nt, Artificial Sequence
  mRNA product Design b-4 (hSL-A100) comprising derived and/or modified sequence from LASV(G733-SLE-2010;Clade IV)__AIT17155__SP-HsALB_NP(2-569) (opt4)
aggagagucccgcagucggcguccagcggcucugcuuguucgugugugugucguugcaggccuuauucaagcuuaccaugaagugggugaccuucaucagccugcuguuccuguucagcagcgccuacagcagcgccagcaaggagaucaagagcuuccuguggacccagagccugagaagagagcugagcggcuacugcagcaacaucaagcugcagguggugaaggacgcccaggcccugcugcacggccuggacuucagcgaggugagcaacgugcagagacugaugagaaaggagagaagagacgacaacgaccugaagagacugagagaccugaaccaggccgugaacaaccugguggagcugaagagcacccagcagaagagcgugcugagagugggcacccugaccagcgacgagcugcuggugcuggccgccgaccuggagaagcugaagagcaaggugaucagaaccgagagaccccugagcgccggcguguacaugggcaaccugagcagccagcagcuggaccagagaagagcccugcugagcaugaucggcaugagcggcggcaaccagggcgccagaaccggcagagacggcguggugagagugugggacgugaagaacgccgagcugcugaacaaccaguucggcaccaugcccagccugacccuggccugccugaccaagcagggccagguggaccugaacgacgccgugcaggcccugaccgaccugggccugaucuacaccgccaaguaccccaacaccagcgaccuggacagacugacccagagccaccccauccugaacaugaucgacaccaagaagagcagccugaacaucagcggcuacaacuucagccugggcgccgccgugaaggccggcgccugcaugcuggacggcggcaacaugcuggagaccaucaaggugagcccccagaccauggacggcauccugaagagcauccugaaggugaagaaggcccugggcauguucaucagcgacacccccggcgagagaaaccccuacgagaacauccuguacaagaucugccugagcggcgacggcuggcccuacaucgccagcagaaccagcaucaccggcagagccugggagaacaccgugguggaccuggagagcgacggcaagccccagaaggccggcagcaacaacagcaacaagagccugcagagcgccggcuucaccgccggccugaccuacagccagcugaugacccugaaggacgccaugcugcagcuggaccccaacgccaagaccuggauggacaucgagggcagacccgaggaccccguggagaucgcccuguaccagcccagcagcggcugcuacauccacuucuucagagagcccaccgaccugaagcaguucaagcaggacgccaaguacagccacggcaucgacgugaccgaccuguucgccgcccagcccggccugaccagcgccgugaucgacgcccugcccagaaacauggugaucaccugccagggcagcgacgacaucagaaagcugcuggagagccagggcagaaaggacaucaagcugaucgacaucgcccugagcaagaucgacagcagaaaguacgagaacgccgugugggaccaguacaaggaccugugccacaugcacaccggcguggugguggagaagaagaagagaggcggcaaggaggagaucaccccccacugcgcccugauggacugcaucauguucgacgccgccgugagcggcggccugaacagccuggugcugagagccgugcugcccagagacaugguguucagaaccagcacccccagaguggugcugugaggacuaguaauaaggaaacuguaugaaugucugugggcaggaagugaagagauccuucuguaaagguuuuuggaauuaugucugcugaauaauaaacuuuuuugaaauaauaaaucugguagaaaaaugagaucucaaaggcucuuuucagagccaccaaaaaaaaaaaaaaaaaaaaaaaaaaaaaaaaaaaaaaaaaaaaaaaaaaaaaaaaaaaaaaaaaaaaaaaaaaaaaaaaaaaaaaaaaaaaaaaaaaaaa

SEQ ID NO: 20241 - RNA, 2097 nt, Artificial Sequence
  mRNA product Design b-4 (hSL-A100) comprising derived and/or modified sequence from MOPV/LASV reassortant(IGS-1;Clade IV)__AFY05578__SP-HsALB_NP(2-569) (opt4)
aggagagucccgcagucggcguccagcggcucugcuuguucgugugugugucguugcaggccuuauucaagcuuaccaugaagugggugaccuucaucagccugcuguuccuguucagcagcgccuacagcagcgccagcaaggagaucaagagcuuccuguggacccagagccugagaagagagcugagcggcuacugcagcaacaucaagcugcagguggugaaggacgcccaggcccugcugcacggccuggacuucagcgaggugagcaacgugcagagacugaugagaaaggagagaagagacgacaacgaccugaagagacugagagaccugaaccaggccgugaacaaccugguggagcugaagagcacccagcagaagagcauccugagagugggcacccugaccagcgacgaccugcugauccuggccgccgaccuggagaagcugagaagcaaggugaucagaaccgagagaccccugagcgccggcguguacaugggcaaccugagcagccagcagcuggaccagagaagagcccugcugaacaugaucggcaugagcggcggcaaccagggcgccagagccggcagagacggcguggugagagugugggacgugaagaacgccgagcugcugagcaaccaguucggcaccaugcccagccugacccuggccugccugaccaagcagggccagguggaccugaacgacgccgugcaggcccugaccgaccugggccugaucuacaccgccaaguaccccaacaccagcgaccuggacagacugacccagagccaccccauccugaacaugaucgacaccaagaagagcagccugaacaucagcggcuacaacuucagccugggcgccgccgugaaggccggcgccugcaugcuggacggcggcaacaugcuggagaccaucaaggugagcccccagaccauggacggcauccugaagagcauccugaaggugaagaaggcccugggcauguucaucagcgacacccccggcgagagaaaccccuacgagaacauccuguacaagaucugccugagcggcgacggcuggcccuacaucgccagcagaaccagcaucaccggcagagccugggagaacaccgugguggaccuggagagcgacggcaagccccagaaggccgacagcaacaacagcagcaagagccugcagagcgccggcuucaccgccggccugaccuacagccagcugaugacccugaaggacgccaugcugcagcuggaccccaacgccaagaccuggauggacaucgagggcagacccgaggaccccguggagaucgcccuguaccagcccagcagcggcugcuacauccacuucuucagagagcccaccgaccugaagcaguucaagcaggacgccaaguacagccacggcaucgacgugaccgaccuguucgccacccagcccggccugaccagcgccgugaucgacgcccugcccagaaacauggugaucaccugccagggcagcgacgacaucagaaagcugcuggagagccagggcagaaaggacaucaagcugaucgacaucgaccugagcaagaccgacagcagaaaguacgagaacgccgugugggaccaguacaaggaccugugccacaugcacaccggcguggugguggagaagaagaagagaggcggcaaggaggagaucaccccccacugcgcccugauggacugcaucauguucgacgccgccgugagcggcggccugaacaccagcgugcugagagccgugcugcccagagacaugguguucagaaccagcacccccagaguggugcugugaggacuaguaauaaggaaacuguaugaaugucugugggcaggaagugaagagauccuucuguaaagguuuuuggaauuaugucugcugaauaauaaacuuuuuugaaauaauaaaucugguagaaaaaugagaucucaaaggcucuuuucagagccaccaaaaaaaaaaaaaaaaaaaaaaaaaaaaaaaaaaaaaaaaaaaaaaaaaaaaaaaaaaaaaaaaaaaaaaaaaaaaaaaaaaaaaaaaaaaaaaaaaaaaa

SEQ ID NO: 20242 - RNA, 2097 nt, Artificial Sequence
  mRNA product Design b-4 (hSL-A100) comprising derived and/or modified sequence from LASV(LM765-SLE-2012;Clade IV)__AIT17815__SP-HsALB_NP(2-569) (opt4)
aggagagucccgcagucggcguccagcggcucugcuuguucgugugugugucguugcaggccuuauucaagcuuaccaugaagugggugaccuucaucagccugcuguuccuguucagcagcgccuacagcagcgccagcaaggagaucaagagcuuccuguggacccagagccugagaagagagcugagcggcuacugcagcaacaucaagcugcagguggugaaggacgcccaggcccugcugcacggccuggacuucagcgaggugagcaacgugcagagacugaugagaaaggagagaagagacgacaacgaccugaagagacugagagaccugaaccaggccgugaacaaccugguggagcugaagagcacccagcagaagagcauccugagagugggcacccugaccagcgacgaccugcugauccuggccgccgaccuggagaagcugaagagcaaggugaccagaaccgagagaccccugagcgccggcguguacaugggcaaccugagcagccagcagcuggaccagagaagagcccugcuggacaugaucggcaugagcggcagcaaccagggcgccagagccggcagagacggcguggugagagugugggacgugaagaacgccgagcugcugaacaaccaguucggcaccaugcccagccugacccuggccugccugaccaagcagggccagguggaccugaacgacgccgugcaggcccugaccgaccugggccugaucuacaccgccaaguaccccaacaccagcgaccuggacagacugacccagagccaccccauccugaacaugaucgacaccaagaagagcagccugaacaucagcggcuacaacuucagccugggcgccgccgugaaggccggcgccugcaugcuggacggcggcaacaugcuggagaccaucaaggugagcccccagaccauggacggcauccugaagagcauccugaaggugaagaaggcccugggcauguucaucagcgacgcccccggcgagagaaaccccuacgagaacauccuguacaagaucugccugagcggcgacggcuggcccuacaucgccagcagaaccagcaucaccggcagagccugggagaacaccgugguggaccuggagagcgacggcaagccccagaaggccggcagcaacggcagcaacaagagccugcagagcgccggcuucaccgccggccugaccuacagccagcugaugacccugaaggacgccaugcugcagcuggaccccaacgccaagaccuggauggacaucgagggcagacccgaggaccccguggagaucgcccuguaccagcccagcagcggcugcuacauccacuucuucagagagcccaccgaccugaagcaguucaagcaggacgccaaguacagccacggcaucgacgugaccgaccuguucgccgcccagcccggccugaccagcgccgugaucgacgcccugcccagaaacauggugaucaccugccagggcagcgacgacaucagaaagcuguucgagagccagggcagaaaggacaucaagcugaucgacaucgcccugagcaagaccgacagcagaaaguacgagaacgccgugugggaccaguacaaggaccugugccacaugcacaccggcaucgugguggagaagaagaagagaggcggcaaggaggagaucaccccccacugcgcccugauggacugcaucauguucgacgccgccgugagcggcggccugaacaccagcgugcugagagccgugcugcccagagacaugguguucagaaccagcacccccagaguggugcugugaggacuaguaauaaggaaacuguaugaaugucugugggcaggaagugaagagauccuucuguaaagguuuuuggaauuaugucugcugaauaauaaacuuuuuugaaauaauaaaucugguagaaaaaugagaucucaaaggcucuuuucagagccaccaaaaaaaaaaaaaaaaaaaaaaaaaaaaaaaaaaaaaaaaaaaaaaaaaaaaaaaaaaaaaaaaaaaaaaaaaaaaaaaaaaaaaaaaaaaaaaaaaaaaa

SEQ ID NO: 20243 - RNA, 2097 nt, Artificial Sequence
  mRNA product Design b-4 (hSL-A100) comprising derived and/or modified sequence from LASV(LM776-SLE-2012;Clade IV)__AIT17825__SP-HsALB_NP(2-569) (opt4)
aggagagucccgcagucggcguccagcggcucugcuuguucgugugugugucguugcaggccuuauucaagcuuaccaugaagugggugaccuucaucagccugcuguuccuguucagcagcgccuacagcagcgccagcaaggagaucaagagcuuccuguggacccagagccugagaagagagcugagcagcuacugcagcaacaucaagcugcagguggugaaggacgcccaggcccugcugcacggccuggacuucagcgaggugagcaacgugcagagacugaugagaaaggagagaagagacgacaacgaccugaagagacugagagaccugaaccaggccgugaacaaccugguggagcugaagagcacccagcagaagagcauccugagagugggcacccugaccagcgacgaccugcugauccuggccgccgaccuggagaagcugaagagcaaggugaccagaaccgagagaccccugagcgccggcguguacaugggcaaccugagcagccagcagcuggaccagagaagagcccugcugagcaugaucggcaugagcggcagcaaccagggcgccagagccggcagagacggcguggugagagugugggacgugaagaacgccgagcugcugaacaaccaguucggcaccaugcccagccugacccuggccugccugaccaagcagggccagguggaccugaacgacgccgugcaggcccugaccgaccugggccugaucuacaccgccaaguaccccaacaccagcgaccuggacagacugacccagagccaccccauccugaacaugaucgacaccaagaagagcagccugaacaucagcggcuacaacuucagccugggcgccgccgugaaggccggcgccugcaugcuggacggcggcaacaugcuggagaccaucaaggugagcccccagaccauggacggcauccugaagagcauccugaaggugaagaaggcccugggcauguucaucagcgacacccccggcgagagaaaccccuacgagaacauccuguacaagaucugccugagcggcgacggcuggcccuacaucgccagcagaaccagcaucaccggcagagccugggagaacaccgugguggaccuggagagcgacggcaagccccagaaggccggcagcaacaacagcaacaagagccugcagagcgccggcuucaccgccggccugaccuacagccagcugaugacccugaaggacgccaugcugcagcuggaccccaacgccaagaccuggauggacaucgagggcagacccgaggaccccguggagguggcccuguaccagcccagcagcggcugcuacauccacuucuucagagagcccaccgaccugaagcaguucaagcaggacgccaaguacagccacggcaucgacgugaccgaccuguucgccgcccagcccggccugaccagcgccgugaucgacgcccugcccagaaacauggugaucaccugccagggcagcgacgacaucagaaagcugcuggagagccagggcagaaaggacaucaagcugaucgacaucgcccugagcaagaccgacagcagaaaguacgagaacgccgugugggaccaguacaaggaccugugccacaugcacaccggcguggugguggagaagaagaagagaggcggcaaggaggagaucaccccccacugcgcccugauggacugcaucauguucgacgccgccgugagcggcggccugaacaccagcgugcugagagccgugcugcccagagacaugguguucagaaccagcacccccagaguggugcugugaggacuaguaauaaggaaacuguaugaaugucugugggcaggaagugaagagauccuucuguaaagguuuuuggaauuaugucugcugaauaauaaacuuuuuugaaauaauaaaucugguagaaaaaugagaucucaaaggcucuuuucagagccaccaaaaaaaaaaaaaaaaaaaaaaaaaaaaaaaaaaaaaaaaaaaaaaaaaaaaaaaaaaaaaaaaaaaaaaaaaaaaaaaaaaaaaaaaaaaaaaaaaaaaa

SEQ ID NO: 20244 - RNA, 2097 nt, Artificial Sequence
  mRNA product Design b-4 (hSL-A100) comprising derived and/or modified sequence from LASV(Mad39;Clade IV)__ANH09723__SP-HsALB_NP(2-569) (opt4)
aggagagucccgcagucggcguccagcggcucugcuuguucgugugugugucguugcaggccuuauucaagcuuaccaugaagugggugaccuucaucagccugcuguuccuguucagcagcgccuacagcagcgccagcaaggagaucaagagcuuccuguggacccagagccugagaagagagcugagcggcuacugcagcaacaucaagcugcagguggugaaggacgcccaggcccugcugcacggccuggacuucagcgaggugagcaacgugcagagacugaugagaaagcagagaagagacgacaacgaccugaagagacugagagaccugaaccaggccgugaacaaccugguggagcugaagagcacccagcagaagagcgugcugagagugggcacccugaccagcgacgaccugcugacccuggccgccgaccuggagaagcugaagagcaaggugaccagaaccgagagaccccugaccgccggcguguacaugggcaaccugagcagccagcagcuggaccagagaagagcccugcugaacaugaucggcaugagcggcggcaaccagggcgccagaaccggcagagacggcguggugagagugugggacgugaagaacgccgagcugcugaacaaccaguucggcaccaugcccagccugacccuggccugccugaccaagcagggccagguggaccugaacgacguggugcaggcccugaccgaccugggccugaucuacaccgccaaguaccccaacaccagcgaccuggacagacugacccagagccaccccauccugaacaugaucgacaccaacaagagcagccugaacaucagcggcuacaacuucagccugggcgccgccgugaaggccggcgccugcaugcuggacggcggcaacaugcuggagaccaucaaggugagcccccagaccauggacggcauccugaagagcauccugaaggugaagaagagccugggcauguucaucagcgacacccccggcgagagaaaccccuacgagaacauccuguacaagaucugccugagcggcgacggcuggcccuacaucgccagcagaaccagcaucaccggcagagccugggagaacaccgugguggaccuggagagcggcggcaagccccagaaggccggcagcaacaacagcaacaagagccugcagagcgccggcuucgccgccggccugaccuacagccagcugaugacccugaaggacgccaugcugcagcuggaccccaacgccaagaccuggauggacaucgagggcagacccgaggaccccguggagaucgcccuguaccagcccaucagcggcugcuacauccacuucuucagagagcccaccgaccugaagcaguucaagcaggacgccaaguacagccacggcaucgacgugaccgaccuguucgccgcccagcccggccugaccagcgccgugaucgaggcccugcccagaaacauggugaucaccugccagggcagcgacgacaucagaaagcuguucgagagccagggcagaaaggacaucaagcugaucgacaucgcccugagcaagaccgacagcagaaaguacgagaacgccgugugggaccaguacaaggaccugugccacaugcacaccggcguggugguggagaagaagaagaagggcggcaaggaggagaucaccccccacugcgcccugauggacugcaucauguucgacgccgccgugagcggcggccugaacacccuggugcugagagccgugcugcccagagacaugguguucagaaccagcacccccaagguggugcugugaggacuaguaauaaggaaacuguaugaaugucugugggcaggaagugaagagauccuucuguaaagguuuuuggaauuaugucugcugaauaauaaacuuuuuugaaauaauaaaucugguagaaaaaugagaucucaaaggcucuuuucagagccaccaaaaaaaaaaaaaaaaaaaaaaaaaaaaaaaaaaaaaaaaaaaaaaaaaaaaaaaaaaaaaaaaaaaaaaaaaaaaaaaaaaaaaaaaaaaaaaaaaaaaa

SEQ ID NO: 20245 - RNA, 2097 nt, Artificial Sequence
  mRNA product Design b-4 (hSL-A100) comprising derived and/or modified sequence from LASV(Z0947-SLE-2011;Clade IV)__AIT17841__SP-HsALB_NP(2-569) (opt4)
aggagagucccgcagucggcguccagcggcucugcuuguucgugugugugucguugcaggccuuauucaagcuuaccaugaagugggugaccuucaucagccugcuguuccuguucagcagcgccuacagcagcgccagcaaggagaucaagagcuuccuguggacccagagccugagaagagagcugagcggcuacugcagcaacaucaagcugcagguggugaaggacgcccaggcccugcugcacggccuggacuucagcgaggugagcaacgugcagagacugaugagaaaggagagaagagacgacaacgaccugaagagacugagagaccugaaccaggccgugaacaaccugguggagcugaagagcacccagcagaagagcauccugagagugggcacccugaccagcgacgaccugcugauccuggccgccgaccuggagaagcugaagagcaaggugaccagaaccgagagaccccugagcgccggcguguacaugggcaaccugagcagccagcagcuggaccagagaagagcccugcugaacaugaucggcaugagcggcagcaaccagggcgccagaaccggcagagacggcguggugagagugugggacgugaagaacgccgagcugcugaacaaccaguucggcaccaugcccagccugacccuggccugccugaccaagcagggccagguggaccugaacgacgccgugcaggcccugaccgaccugggccugaucuacaccgccaaguaccccaacaccagcgaccuggacagacugacccagagccaccccauccugaacaugaucgacaccaagaagagcagccugaacaucagcggcuacaacuucagccugggcgccgccgugaaggccggcgccugcaugcuggacggcggcaacaugcuggagaccaucaaggugagcccccagaccauggacggcauccugaagagcauccugaaggugaagaaggcccugggcauguucaucagcgacgcccccggcgagagaaaccccuacgagaacauccuguacaagaucugccugagcggcgacggcuggcccuacaucgccagcagaaccagcaucaccggcagagccugggagaacaccgugguggaccuggagagcgacggcaagccccagaaggccggcagcaacggcagcaacaagagccugcagagcgccggcuucaccgccggccugaccuacagccagcugaugacccugaaggacgccaugcugcagcuggaccccaacgccaagaccuggauggacaucgagggcagacccgaggaccccguggagaucgcccuguaccagcccagcagcggcugcuacauccacuucuucagagagcccaccgaccugaagcaguucaagcaggacgccaaguacagccacggcaucgacgugaccgaccuguucgccgcccagcccggccugaccagcgccgugaucgacgcccugcccagaaacauggugaucaccugccagggcagcgacgacaucagaaagcuguucgagagccagggcagaaaggacaucaagcugaucgacaucgcccugagcaagaccgacagcagaaaguacgagaacgccgugugggaccaguacaaggaccugugccacaugcacaccggcaucgugguggagaagaagaagagaggcggcaaggaggagaucaccccccacugcgcccugauggacugcaucauguucgacgccgccgugagcggcggccugaacaccagcgugcugagagccgugcugcccagagacaugguguucagaaccagcacccccagaguggugcugugaggacuaguaauaaggaaacuguaugaaugucugugggcaggaagugaagagauccuucuguaaagguuuuuggaauuaugucugcugaauaauaaacuuuuuugaaauaauaaaucugguagaaaaaugagaucucaaaggcucuuuucagagccaccaaaaaaaaaaaaaaaaaaaaaaaaaaaaaaaaaaaaaaaaaaaaaaaaaaaaaaaaaaaaaaaaaaaaaaaaaaaaaaaaaaaaaaaaaaaaaaaaaaaaa

SEQ ID NO: 20246 - RNA, 2097 nt, Artificial Sequence
  mRNA product Design b-4 (hSL-A100) comprising derived and/or modified sequence from LASV(Josiah;Clade IV)__NP_694869__SP-HsALB_NP(2-569) (opt5)
aggagagucccgcagucggcguccagcggcucugcuuguucgugugugugucguugcaggccuuauucaagcuuaccaugaagugggugaccuucaucagccugcucuuucuguucuccucugccuacagcagcgccuccaaggagaucaaaucuuuccuguggacccagagccucagacgggaacuguccggcuacugcucuaacauuaagcugcaaguggucaaagacgcucaggcccugcuccacgggcuggauuuuagcgagguuuccaaugugcagcgccuuaugagaaaggaacggcgcgacgauaacgaccugaaaagacuccgggaucugaaucaggcggugaacaaucuggucgagcucaagucuacacaacaaaagagcauccugcgcgugggaacgcuuaccuccgacgaucugcucauucuggcugccgaccuugaaaaacuuaagagcaaaguuaucagaacagagcggccccucucugccggcguguauauggggaaccuguccagccagcagcuggaucagcgcagagcucuccugaauaugauuggaaugucuggcgggaaccagggagcccgggcuggccgcgacggcgucgugagaguuugggaugugaagaaugccgagcuucugaacaaucaguucgggaccaugccuucccucacacuggcgugucuuaccaaacagggacaagucgaccugaacgaugccgugcaggcucucacagaccugggccugaucuacaccgccaaguauccgaauacgagcgaccucgaucggcugacccagucucaucccauccuuaacaugauugacacaaagaaauccagccugaauaucuccggguacaacuuuucucucggagcugccgugaaggcgggcgccugcaugcuggaugggggaaacaugcuugaaaccauuaaagucagcccucaaacaauggacggcauccugaaguccauucucaaaguuaagaaagcucugggcauguucaucagcgauacccccggggagcgcaauccuuaugaaaacauucuguacaagaucugucucucuggagacggcuggcccuauaucgccuccagaacgagcauuacagggcgggcuugggagaauaccgugguggaucuggagucugacggaaagccucagaaagccgauagcaacaauuccucuaagagccuucaguccgccggcuuuacagcugggcugaccuacagccagcucaugacccugaaagacgcgaugcugcaacuugauccgaacgccaagacauggauggacaucgaaggaagacccgaggacccugucgaaauugcucucuaccagcccucuuccggcugcuauauccacuucuuucgcgagccuacggaucugaaacaguucaagcaggacgccaaguacagccauggcauugaugugaccgaccuguuugccacacaacccgggcucaccucugcuguuaucgaugcccugccgcggaauauggugaucacaugucagggauccgacgauauuagaaaacuucuggaaagccagggccgcaaggacaucaaacucauugauaucgcgcuguccaagaccgacucucggaaauaugagaacgcugucugggaucaguacaaggaccugugccacaugcauacgggggugguuguggagaagaaaaagagaggaggcaaagaagagauuacaccucacugugcccuuauggauugcaucauguucgacgccgcugucagcgggggccucaauaccuccgugcugcgcgccguccugccccgggacaugguguuuagaaccucuacaccucgcguugugcucugaggacuaguaauaaggaaacuguaugaaugucugugggcaggaagugaagagauccuucuguaaagguuuuuggaauuaugucugcugaauaauaaacuuuuuugaaauaauaaaucugguagaaaaaugagaucucaaaggcucuuuucagagccaccaaaaaaaaaaaaaaaaaaaaaaaaaaaaaaaaaaaaaaaaaaaaaaaaaaaaaaaaaaaaaaaaaaaaaaaaaaaaaaaaaaaaaaaaaaaaaaaaaaaaa

SEQ ID NO: 20247 - RNA, 2097 nt, Artificial Sequence
  mRNA product Design b-4 (hSL-A100) comprising derived and/or modified sequence from LASV(LP;Clade I)__AAF86702__SP-HsALB_NP(2-569) (opt5)
aggagagucccgcagucggcguccagcggcucugcuuguucgugugugugucguugcaggccuuauucaagcuuaccaugaagugggugaccuucaucagccugcucuuucuguucuccucugccuacagcagcaacuccaaggagaucaaaucuuuccuguggacccagagccucagacgggaacuguccggcuacugcucuaauauuaagcuccaaguggucaaagacgcccaggcucugcuccacgggcuggauuuuagcgagguuuccaacgugcagcgccuuaugagaaagcagaaacgggacgaugccgaccugaagcgccucagagaucugaaucaagcggugaacaaucuggucgaacucaagucuacacagcagaaaaacgugcugcggguuggaacgcuuagcuccgacgaucugaucacccucgcugccgaccuggagaaacuuaaaagcaaggugauucgcacagaaagaccccugucuuccggcgucuauauggggaaucucagcucucagcaacuggaucagcggcgcgcccugcucuccaugaucggaaugagcggcgggccucagggaaacagaaccggcggcgacggggugguucgggugugggaugucaaaaaugcugagcugcuuaacaaucaguucggaacaaugccgucucugacccucgccugucugacaaagcaaggccagguggaccuuaacgaugcugugcaggcccugaccgaccucgggcugauuuacacggcgaaguaucccaauuccagcgaccuggauaugcucacccaaucccauccuauccugggaauggucgacacaaagaagucuagccuuaacaucuccggcuacaauuuuagccugggggccgcuguuaaagccggagcuugcaugcucgauggcggcaacaugcuggagaccauuaaggugucuccccagacaauggacgggauccuuaaauccauucugaaggugaaacgcagccucggaauguucaucucugauaccccuggcgaaagaaaccccuaugagaauauucuguacaagaucugucugagcggggaaggauggccuuauauugccucccggacgucuaucacaggccgcgcgugggagaacacccucgucgaccuggagagcgauaauaagccgcccaaacuuaacuccgccgggagcaauaagucucugcaggcugccggacucaacgcuggccugacauacucccagcugaugacccuuaaagacugcaugcuccaacuggauccuagcucuaagaccuggaucgacauugaaggcagacccgaggauccuguggaaaucgcccuguuucagcccuccagcggguguuacauucacuucuuucgggagccgacagaccucaaacaguucaagcaggacgccaaguauucccauggaaucgauguuacggaccuguuuucuacccaaccuggccuuacaagcgcugugauugaagcgcugcccagaaauaugguccuuaccugccagggguccgaugacaucaaaaagcugcuggagucucagggacgccgggauaucaaacuuauugacaucagccucuccaaggccgauagcagaaaauucgagaacgcugugugggaccaguacaaggaucugugucacaugcauacaggcguuguggucgaaaagaaaaagcgcgggggcaaagaggaaauuaccccucacugcgcccugcucgacuguaucauguuugaugccgcuacgacaggaucucugaauauuaccacccuucgggccgugcugcccagagacauggucuuccgcacauccacccccaaggugguucucugaggacuaguaauaaggaaacuguaugaaugucugugggcaggaagugaagagauccuucuguaaagguuuuuggaauuaugucugcugaauaauaaacuuuuuugaaauaauaaaucugguagaaaaaugagaucucaaaggcucuuuucagagccaccaaaaaaaaaaaaaaaaaaaaaaaaaaaaaaaaaaaaaaaaaaaaaaaaaaaaaaaaaaaaaaaaaaaaaaaaaaaaaaaaaaaaaaaaaaaaaaaaaaaaa

SEQ ID NO: 20248 - RNA, 2097 nt, Artificial Sequence
  mRNA product Design b-4 (hSL-A100) comprising derived and/or modified sequence from LASV(803213;Clade II)__AAF86704__SP-HsALB_NP(2-569) (opt5)
aggagagucccgcagucggcguccagcggcucugcuuguucgugugugugucguugcaggccuuauucaagcuuaccaugaagugggugaccuucaucagccugcucuuucuguucuccucugccuacagcagcgccuccaaggaggugaaaucuuuccuguggacccagagccucagacgggaacuguccggcuacugcucuaacaucaaacuucaagucguuaaggacgcucaggcccugcuccacgggcuggauuuuagcgaggugaauaacgugcagcgccuuaugagaaagcagaaacgggacgauggagaccugaagcgccucagagaucugaaucaagcggucaacaaucugguggaacucaaguccacacagcagaaaucuauucugcggguuggcacgcuuaccagcgacgaucugcucacacuggcugccgaccuugagaagcugaaauccaaggugauccgcaccgaaagaccccucagcucuggggucuauaugggaaaccuguccacacagcaacuggagcagcggcgcgcccuccugaauaugauuggcauggugggaggagcucagggcacccagccuggcagagaugggguugugcgggucugggacgugaaaaacccggaucuucugaauaaccaauucggaacaaugcccagccucacccuggccugucuuacgaagcagggccagguggaccugaaugaugcuguccucgcccugaccgaccuggggcucaucuacacagcgaaguauccuaacucuuccgaccuggaucgccuuagccaaucucaucccauucugaauaugguugacaccaaaaaguccagccucaacaucuccggauacaauuuuucucugggcgccgcugugaaagccggggcuugcaugcuugauggaggcaacaugcuggagacaaucaaggugaccccucagacgauggacggcauucucaaaagcauccugaaggucaaaagaucccuggggauguucgugagcgauacacccggagaacggaacccuuaugagaauauucucuacaagaucugucugucuggcgacggguggccguauauugccucccgcaccagcaucguugggagagcgugggaaaacacaaccguggaucuugagucugacggcaagccccagaaagucgggaccgccggaagcaauaagucccugcagucugcuggcuuuccuacaggccucacguacagccaacugaugacccugaaagauuccaugaugcagcuugaccccagcgccaagacauggauugauaucgaggggcggccugaagaccccguggagaucgcucucuaccagccgaugucuggaugcuauauucacuucuuuagagaaccuaccgaccugaaacaguucaagcaagaugccaaguacucccauggcaucgacguugccgaucuguuucccgcucagccugggcucacaagcgcggugauugaggcccugccccgcaacaugguccuuaccugucagggaucugacgauaucaaaaagcugcucgacucccagggccggagagauauuaaacugaucgacaucagccuguccaagguggauucucgcaaauucgaaaaugcugucugggaccaaugcaaggaucuuugucacaugcauacgggggugguuguggagaagaaaaagcggggcggaaaagaggaaauuacaccccacugcgcccucauggacuguaucauguuugaugccgcugucagcggcgggcugaacauuccugugcugagagccguucucccgcgcgacaugguguuccggaccuccucucccaaggucgugcugugaggacuaguaauaaggaaacuguaugaaugucugugggcaggaagugaagagauccuucuguaaagguuuuuggaauuaugucugcugaauaauaaacuuuuuugaaauaauaaaucugguagaaaaaugagaucucaaaggcucuuuucagagccaccaaaaaaaaaaaaaaaaaaaaaaaaaaaaaaaaaaaaaaaaaaaaaaaaaaaaaaaaaaaaaaaaaaaaaaaaaaaaaaaaaaaaaaaaaaaaaaaaaaaaa

SEQ ID NO: 20249 - RNA, 2100 nt, Artificial Sequence
  mRNA product Design b-4 (hSL-A100) comprising derived and/or modified sequence from LASV(GA391;Clade III)__CAA36646__SP-HsALB_NP(2-570) (opt5)
aggagagucccgcagucggcguccagcggcucugcuuguucgugugugugucguugcaggccuuauucaagcuuaccaugaagugggugaccuucaucagccugcucuuucuguucuccucugccuacagcagcgccuccaaggaggugagaucuuuccuguggacccagagccuccggcgcgaacuguccggcuacugcucuaacaucaaacuucaagucguuaaggacgcucaggcccugcuccacgggcuggauuuuagcgagguguccaaugugcagagacuuaugcggaaacagaagcgcgacgauggagaccugaaaagacuccgggaucugaaccaagcggucaauaaccugguggaacucaagucuacacagcagaaaagcguucugcgcgugggcacgcuuuccagcgacgaucugcucauucuggcugccgaccuugagaaacugaagucuaaagucaccagaacagaacggccccucuccagcgggguguauaugggaaaucugucuucccagcaacuggaucagcgcagagcccuccugaacaugaucggcaugaccgggguuagcggaggcggcaagggggcuucugacggaauugugcgggucugggaugugaaaaaugccgagcuucugaacaaucaguucggcacaaugccuucccucacccuggcuugucuuacaaagcaggggcaaguggaccugaacgaugccguccaggcgcucaccgaccugggacugaucuacacggccaaguauccgaauagcuccgaccucgaucgccugucucagagccaucccauucuuaacaugaucgacaccaaaaaguccagccugaauaucucuggcuacaacuuuucccucggggcugccguuaaagcuggagccugcaugcuggauggcggcaauaugcuugagacaauuaaggugagcccucaaaccauggacgggauccugaaaucuauucucaaggugaaaaagagccugggaauguucgucuccgauacacccggcgaaagaaacccuuaugagaacauccuguacaagauuugucucucuggggacggauggcccuauaucgcgagccggaccuccauugugggccgcgccugggaaaauacgguuguggaucuggagcaggacaacaaaccucagaagaucgggaauggaggcagcaacaaaucucuucaguccgcuggcuuugccgcugggcugacauacagccaacucaugacccugaaggauuucaaaugcuuuaaucugaucccgaacgccaagacauggauggacauugagggaagacccgaagauccugucgagaucgcccuuuaccagcccucuuccggcuguuaugugcacuucuuucgggaaccuaccgaccucaagcaguucaaacaggacgcuaaguacagccaugggauugauguuaccgaccuguuugcggcccaacccggacugacauccgcugugaucgaggcccucccgagaaauauggucauuacgugccagggcucugaagauauccgcaaacugcuugagagccaggggcggagagacaucaagcugauugauaucacccucuccaaagccgacucucgcaaguucgagaacgcugugugggaucaguuuaaggaccugugucacaugcauacaggcgucgugguugaaaagaagaaacggggaggcaaggaggaaauuaccccucacugcgcccugauggauuguaucauguucgacgcggcugugagcgggggacuugaugccaaaguccucagagugguucugccccgcgacaugguguuccggacauccaccccuaaggucgugcugugaggacuaguaauaaggaaacuguaugaaugucugugggcaggaagugaagagauccuucuguaaagguuuuuggaauuaugucugcugaauaauaaacuuuuuugaaauaauaaaucugguagaaaaaugagaucucaaaggcucuuuucagagccaccaaaaaaaaaaaaaaaaaaaaaaaaaaaaaaaaaaaaaaaaaaaaaaaaaaaaaaaaaaaaaaaaaaaaaaaaaaaaaaaaaaaaaaaaaaaaaaaaaaaaa

SEQ ID NO: 20250 - RNA, 2097 nt, Artificial Sequence
  mRNA product Design b-4 (hSL-A100) comprising derived and/or modified sequence from LASV(AV;Clade V)__CCA30315__SP-HsALB_NP(2-569) (opt5)
aggagagucccgcagucggcguccagcggcucugcuuguucgugugugugucguugcaggccuuauucaagcuuaccaugaagugggugaccuucaucagccugcucuuucuguucuccucugccuacagcagcgccuccaaggaggugaaaucuuuccuguggacccagagccucagacgggaacuguccggcuacugcucuaacaucaaacuucaagucguuaaggacgcucaggcccugcuccacgggcuggauuuuagcgagguguccaaugugcagcgccuuaugagaaagcagcggcgcgacgauucugaccugaaaagacuccgggaucugaaccaagcggucaauaaccugguggaacucaagagcacacagcagaaguccguucugcgcgugggaacgcuuagcucugacgaucugcucacccuggcugccgaccuugagaaacugaaguccaaagucacaagaaccgaacggccccucagcucuggcguguauauggggaaucuguccagccagcaacuggaucagcgcagagcccuccugaaccuuauuggaaugacaaauggcucucaggggucccaggcuggacgggacggcguugugcgcgucugggaugugaagaacgccgagcugcucaauaaccaauucggcaccaugccuagccugacacuugcuugucugaccaaacagggacagguggaccucaaugaugucguucaagcccugacggaccuggggcucaucuacaccgcgaaguauccgaacacauccgaccuggauagacuuacccagucucaucccauucugaauaugaucgacacaaagaaaagcucccucaacauuagcggcuacaauuuuucucugggggccgcugugaaggccggagcuugcaugcuugauggcgggaacaugcuggagaccaucaaaguguccccucagagcauggacggaauccucaagucuauucugaaagucaagcgggcccugggcauguucgugagcgauacgcccggcgaacgcaacccuuaugagaauauccucuacaaaauuugucuguccggggacggauggcccuauaucgcgucuagaacaagcauuguuggccgggccugggaaaacaccguggucgaucuugagacagacgggaagccucagaagaucggauccggcaauagcaacaaaucucugcaauccgcuggguuuagcgccggacucaccuacucucagcugaugacccugaaggaugcuaugcuucagcucgacccgaaugccaaaacauggauggauauugagggcagacccgaagacccuguggagguugcccuguaccagcccaucuccggcugcuauauccacuucuuucgcgaaccuacggaccugaagcaauucaaacaggaugcuaaguacagccaugggauugacaucgcggaucucuuugccgcucagcccggacugaccuccgccgugauugaggcccuuccgcggaacauggucaucacaugucagggcucugaagacauuaagaaacugcucgagagccaagggagaaaggauaucaaacugaucgacauugcucuguccaagaucgauucucgcaaauucgagaaugccgugugggaccaguauaaggaucuuugccacaugcauaccggagucgugguugaaaagaaaaagcggggcgggaaagaggaaauuacaccucacugugcgcucauggacugcaucauguuugaugcugccgugagcggcggacugaacacccugguccucagagccgugcugccccgcgacaugguuuuccggacguccacaccuagagugguccuuugaggacuaguaauaaggaaacuguaugaaugucugugggcaggaagugaagagauccuucuguaaagguuuuuggaauuaugucugcugaauaauaaacuuuuuugaaauaauaaaucugguagaaaaaugagaucucaaaggcucuuuucagagccaccaaaaaaaaaaaaaaaaaaaaaaaaaaaaaaaaaaaaaaaaaaaaaaaaaaaaaaaaaaaaaaaaaaaaaaaaaaaaaaaaaaaaaaaaaaaaaaaaaaaaa

SEQ ID NO: 20251 - RNA, 2097 nt, Artificial Sequence
  mRNA product Design b-4 (hSL-A100) comprising derived and/or modified sequence from LASV(Togo/2016/7082;Clade VI)__AMR44578__SP-HsALB_NP(2-569) (opt5)
aggagagucccgcagucggcguccagcggcucugcuuguucgugugugugucguugcaggccuuauucaagcuuaccaugaagugggugaccuucaucagccugcucuuucuguucuccucugccuacagcagcaacuccaaggaggugaaaucuuuccuguggacccagagccucagacgggaacuguccggcuacugcucuaauaucaaacuucaagucguuaaagacgcccaggcucugcuccacgggcuggauuuuagcgagguguccaacgugcagcgccuuaugagaaagcagaaacgggacgauggagaccugaagcgccucagagaucugaaucaagccgucaacaaucugguggaacucaagucuguucagcagaaaagcauucugcgggugggcacacuuacguccgacgaucugcucacccuggcggcugaccuugagaagcugaaaagcaaggucacacgcaccgaaagaccccucucuuccgggguguauaugggaaaccugagcucucagcaacuggaucagcggcgcgcccuccuguccaugaucggcaugagcgggggaaaucagaacucucagccuaaaggcgacggcguugugagagucugggaugugaagaaugccgaccuucugaacaaucaauucgggacaaugccgucccucacccuggcuugucuuacaaagcagggacagguggaucugaacgacgccguccaagcucucaccgaccugggccugauuuacacggccaaauaucccaauagcuccgaucucgaccggcugucucagagccauccuauccuuaacaugauugauaccaagaaauccagccugaauaucucuggguacaacuuuucccucggagcggccaucaagacaggcgcuugcaugcuggacgggggaaacaugcuugagaccauuaaaguuacaccccagaccauggauggcauccucaagagcauucugaaagugaagcgcucucugggcauguucaucagcgacacgccuggggagagaaaucccuaugaaaacauucuguacaagaucugucucuccggagauggcuggccuuauauugccucucggacagcuaucaucgggcgcgccugggagaauaccguggucgaccuggaaagcgauuccaaaccgcagaagauuggaagcaacggcucuaauaaaucccuucaaagcgcgggguuugcccccggacugacauacucucagcucaugacccugaaggacuccaugcugcagcuugauccuaacgcuaaaaccuggaucgacauugagggcagacccgaggacccuguggaaguugcccucuuccagcccaucagcggcugcuacauucacuuuuuccgggagccgacagaucugaagcaauuuaagcaggacgcuaaauauucccaugggaucgaugugacggaccuguucgccgcccagccuggacucaccucugcugucaucgaagcgcugcccagaaauauggugcuuacaugucagggcagcgaugacauuaagaaacugcucgauucccaagggcgccgggacaucaagcugauugauguuucucugaacaaaaucgacagcagaaaguuugagaaugccgugugggaucaguacaaggaccuuugccacaugcauaccggagucguggucgaaaagaagaaaaagggcgggaaagaggagauuacaccucacugugcucuccuggauugcaucauguucgacgccgccguguccggcggacugaacgcuaccguucuccgcgccgugcugccccgggacauggucuuuagaacgagcucucccaaggugguucuuugaggacuaguaauaaggaaacuguaugaaugucugugggcaggaagugaagagauccuucuguaaagguuuuuggaauuaugucugcugaauaauaaacuuuuuugaaauaauaaaucugguagaaaaaugagaucucaaaggcucuuuucagagccaccaaaaaaaaaaaaaaaaaaaaaaaaaaaaaaaaaaaaaaaaaaaaaaaaaaaaaaaaaaaaaaaaaaaaaaaaaaaaaaaaaaaaaaaaaaaaaaaaaaaaa

SEQ ID NO: 20252 - RNA, 2097 nt, Artificial Sequence
  mRNA product Design b-4 (hSL-A100) comprising derived and/or modified sequence from LASV(KAK-428;Clade n.d. (VII))__ANH09741__SP-HsALB_NP(2-569) (opt5)
aggagagucccgcagucggcguccagcggcucugcuuguucgugugugugucguugcaggccuuauucaagcuuaccaugaagugggugaccuucaucagccugcucuuucuguucuccucugccuacagcagcaacuccaaggaggugaaaucuuuccuguggacccagagccucagacgggaacuguccggcuacugcacaaauaucaaacuucaagucguuaaggacgcccaggcucugcuccacgggcuggauuuuucugaggugagcaacgugcagcgccuuaugagaaagcagaaacgggacgauaaugaccugaagcgccucagagaucugaaccaagccgucaauaaccugguggaacucaaguccguucagcagaaaucugugcugaaggucggaacgcuuaauagcgacgaucugcucacccuggcggcugaccuugagaaacugaaguccaaagugguucggacagaacgcccccucagcucuggcguguauauggggaaccuguccagccagcaacuggaucagagacgggcccuccugaauaugauuggaauggccggcgggucucagggaaaccagccuucccgcgacggcgucgugagagugugggaugucaagaaugcugaccuucugaacaaucaauucggcaccaugccgagccucacacuggccugucuuaccaagcaggggcagguugaucugaacgacguggugcucgcucugacagaccugggacucaucuacaccgccaaauaucccaauucuuccgaucuggaccggcuuagccaaaaccauccuguccugaacaugauugaugugaauaaguccucucucaacaucagcggcuacaauuuuucccugggggcggccguuaaagcuggagccugcaugcuugacggcgggaacaugcuggagacgauuaagaucagcccccagaccguggauggaauccucaaaucuauucugaaggucaaacgcgcucugggcauguucguguccgacacaccuggcgagagaaaucccuaugaaaacauccucuacaagguuugucugagcgggaauggauggccuuauauugccucucggaccagcaucgugggccgcgcgugggagaacacagucguggaucuugaauccaauaagaaccagccgaaagucgggaauaacggaucuaauaagaugcugcagagcuccggcuuugccaccgggcucacguacagccaacugaugacacugagagacucuaugcuucagcucgaucccaccgcuaaaacauggauugacaucgagggacggccugaggaucccguggaacuggcccuguuccagccuuccagcggcugcuacauucacuuuuucagagagcccaccgaccucaagcaguuuaaacaagacgcuaaguauucucauggcaucgauguuaacgaccuguucuccgcccagccggggcuuaccagcgccgugcuggaagcucucccucgcaauaugguccugacaugucagggauccgaugacauccggaagcugcuugauucucaggacagaaaagauauuaagcucaucgacauuagccuguccaaagcggaugcccgcaaguuugagaacgacgugugggaucaauucaaagaccugugccacaugcauacgggcaucguuguggaaaagaagaaaaagggagggaaacaggagaugacaccccacugugcucuccuggauugcauuauguuugacgccgccgucucuggcgggcuuaacgugccuacccugcgggcugugcuccccaccgacaugguuuucagaacaaucaccacgaaggucgugcugugaggacuaguaauaaggaaacuguaugaaugucugugggcaggaagugaagagauccuucuguaaagguuuuuggaauuaugucugcugaauaauaaacuuuuuugaaauaauaaaucugguagaaaaaugagaucucaaaggcucuuuucagagccaccaaaaaaaaaaaaaaaaaaaaaaaaaaaaaaaaaaaaaaaaaaaaaaaaaaaaaaaaaaaaaaaaaaaaaaaaaaaaaaaaaaaaaaaaaaaaaaaaaaaaa

SEQ ID NO: 20253 - RNA, 2097 nt, Artificial Sequence; identical to SEQ ID NO: 20247
  mRNA product Design b-4 (hSL-A100) comprising derived and/or modified sequence from LASV(Pinneo-NIG-1969;Clade I)__AIT17837__SP-HsALB_NP(2-569) (opt5)

SEQ ID NO: 20254 - RNA, 2097 nt, Artificial Sequence
  mRNA product Design b-4 (hSL-A100) comprising derived and/or modified sequence from LASV(ISTH0009-NIG-2011;Clade II)__AIT17405__SP-HsALB_NP(2-569) (opt5)
aggagagucccgcagucggcguccagcggcucugcuuguucgugugugugucguugcaggccuuauucaagcuuaccaugaagugggugaccuucaucagccugcucuuucuguucuccucugccuacagcagcguguccaaggaggucaaaucuuuccuguggacccagagccucagacgggaacuguccggcuacugcucuaacaucaaacuucaaguugugaaggacgcccaggcucugcuccacgggcuggauuuuagcgagguguccaauguccagcgccuuaugagaaagcagaaacgggacgauucugaccugaagcgccucagagaucugaaccaagccgugaauaaccugguugaacucaagagcacacagcagaaauccauucugcgggugggaacgcuuaccagcgacgaucugcucacacuggcggcugaccuugagaagcugaaaucuaaggucauccgcaccgaaagaccccucuccagcggcguguauauggggaaucugucuacacagcaacuggagcagcggcgcgcccuccugaacaugauuggaaugguuggcggggcccagggaacccagccuggcagagauggcgugguccgggugugggacgugaaaaauccggaucuucugaacaaucaauucgggacaaugcccucccucacccuggcuugucuuacgaagcagggacaggucgaccugaacgaugccguucucgcucugaccgaccugggccucaucuacacagccaaguauccuaauagcucugaccuggaucgccuuucccaaagccaucccauucugaacaugguggacaucaaaaaguccucucucaauaucagcggguacaacuuuucccugggagcggccgugaaagcuggcgccugcaugcuugaugggggaaauaugcuggagaccauuaaggucacaccucagaccauggacggcauccucaaaagcauucugaaggugaaaagaucucugggcauguucguuuccgauacgcccggggaacggaacccuuaugagaacauccucuacaagauuugucugagcggagacggcuggccguauaucgcuucucgcacaagcauuguggggagagccugggaaaauaccacagucgaucuugaguccgacggaaagccccagaaagugggcucugcggggagcaacaagucccugcagagcgccggauuuccuaccggccucaccuacucucaacugaugacacugaaagauuccaugaugcagcuugaccccagcgcuaagacguggaucgauaucgagggccggccugaagaccccguugagauugcccucuaccagccgaugucugggugcuauauccacuucuuuagagaaccuaccgaccugaaacaguucaagcaagaugcuaaguacucccauggaauugacguggccgaucuguuucccgcccagccuggccucacaagcgcugucaucgaggcgcugccccgcaauauggugcuuaccugucagggguccgacgauauuaaacggcugcucgacucucagggaagacgcgauaucaagcugaucgacauugcccugagcaaagcugauucccggagauucgaaaacgccgucugggaccaaugcaaggaucuuugucacaugcauacaggcgugguuguggagaaaaagaagcgcgggggcaaagaggaaaucacgccccacugcgcccucauggacuguauuauguaugaugcugccgucucuggaggccugaauaucccugugcugcgggcgguucucccgagagacaugguguuucgcaccagcucccccaaggucgugcugugaggacuaguaauaaggaaacuguaugaaugucugugggcaggaagugaagagauccuucuguaaagguuuuuggaauuaugucugcugaauaauaaacuuuuuugaaauaauaaaucugguagaaaaaugagaucucaaaggcucuuuucagagccaccaaaaaaaaaaaaaaaaaaaaaaaaaaaaaaaaaaaaaaaaaaaaaaaaaaaaaaaaaaaaaaaaaaaaaaaaaaaaaaaaaaaaaaaaaaaaaaaaaaaaa

SEQ ID NO: 20255 - RNA, 2097 nt, Artificial Sequence
  mRNA product Design b-4 (hSL-A100) comprising derived and/or modified sequence from LASV(ISTH2010-NIG-2012;Clade II)__AIT17483__SP-HsALB_NP(2-569) (opt5)
aggagagucccgcagucggcguccagcggcucugcuuguucgugugugugucguugcaggccuuauucaagcuuaccaugaagugggugaccuucaucagccugcucuuucuguucuccucugccuacagcagcgccuccaaggaggugaaaucuuuccuguggacccagagccucagacgggaacuguccggcuacugcucuaacaucaaacuucaagucguuaaggacgcucaggcccugcuccacgggcuggauuuuagcgagguguccaaugugcagcgccuuaugagaaagcagaaacgggacgauucugaccugaagcgccucagagaucugaaccaagcggucaauaaccugguggaacucaagagcacacagcagaaauccauucugcggguuggaacgcuuaccagcgacgaucugcucacacuggcugccgaccuugagaagcugaaaucuaaggugauccgcaccgaaagaccccucuccagcggcgucuauauggggaaucugucuacacagcaacuggagcagcggcgcgcccuccugaaccuuauuggaauggugggcggggcucagggaacccagccuggcagagauggcguugugcgggucugggacgugaaaaauccggaucugcucaacaaucaauucgggacaaugcccucccugacccuugccugucugacgaagcagggacagguggaccucaacgaugcuguccuggcccugaccgaccucggccugaucuacacagcgaaguauccuaauagcucugaccuugaucgccugucccaaagccaucccauucucaacaugguugacaccaaaaaguccucucugaauaucagcggguuuaacuucucccuuggagccgcugugaaagccggcgcuugcaugcuggaugggggaaauaugcucgagacaaucaaggugaccccucagacgauggacggcauucugaaaagcauccugaaggucaaaaagucucucggcauguuuguguccgauacacccggggaaagaaacccuuacgagaacauucuguauaagaucugucuuagcggagacggcuggccguacauugccucucggaccagcaucguugggcgcgcgugggaaaauacaaccguggaucuggaguccgacggaaaaccccacaaggucggcaccgccgggucuaacaaaagccuccaguccgcuggauucccuacaggccugacguauagccagcugaugacccuuaaggauucuaugaugcaacucgaccccuccgccaaaacauggauugauaucgagggcagaccugaagaccccguggagaucgcucuguaccagccgaugagcgggugcuacauucacuuuuuccgggaaccuaccgaccugaagcaguuuaagcaggaugccaaauauucucauggaaucgacguugccgaucucuuccccgcucaaccuggccugacauccgcggugauugaggcccuucccagaaauaugguccugaccugucaggggagcgacgauaucaagcgccuccuggacucccagggacggagagauauuaaacugaucgacaucgcucuuucuaaggccgauagccgccgguuugaaaacgccgugugggaccagugcaaagaucucugucauaugcacacgggcgucgugguugagaagaagaaaagagggggcaaggaggaaauuacaccccacugcgcucugauggacuguaucauguacgaugccgcgguguccggaggccugaauauuccuguccuccgcgcugugcugccgcgggacaugguuuucagaaccucuagccccaaagugguccuuugaggacuaguaauaaggaaacuguaugaaugucugugggcaggaagugaagagauccuucuguaaagguuuuuggaauuaugucugcugaauaauaaacuuuuuugaaauaauaaaucugguagaaaaaugagaucucaaaggcucuuuucagagccaccaaaaaaaaaaaaaaaaaaaaaaaaaaaaaaaaaaaaaaaaaaaaaaaaaaaaaaaaaaaaaaaaaaaaaaaaaaaaaaaaaaaaaaaaaaaaaaaaaaaaa

SEQ ID NO: 20256 - RNA, 2097 nt, Artificial Sequence
  mRNA product Design b-4 (hSL-A100) comprising derived and/or modified sequence from LASV(Lassa virus/H.sapiens-wt/NGA/2015/ISTH_0543;Clade II)__AVO03640__SP-HsALB_NP(2-569) (opt5)
aggagagucccgcagucggcguccagcggcucugcuuguucgugugugugucguugcaggccuuauucaagcuuaccaugaagugggugaccuucaucagccugcucuuucuguucuccucugccuacagcagcgccuccaaggaggugaaaucuuuccuguggacccagagccucagacgggaacuguccggcuacugcucuaacaucaaacuucaagucguuaaggacgcucaggcccugcuccacgggcuggauuuuagcgagguguccaaugugcagcgccuuaugagaaagcagaaacgggacgauucugaccugaagcgccucagagaucugaaccaagcggucaauaaccugguggaacucaagagcacacagcagaaauccauucugcggguuggaacgcuuaccagcgacgaucugcucacacuggcugccgaccuugagaagcugaaaucuaaggugauccgcaccgaaagaccccucuccagcggcgucuauauggggaaucugucuacacagcaacuggagcagcggcgcgcccuccugaacaugauuggaauggugggcggggcucagggaacccagccuggcagagauggcguugugcgggucugggacgugaaaaauccggaucuucugaacaaucaauucgggacaaugcccucccucacccuggccugucuuacgaagcagggacagguggaccugaacgaugcuguccucgcccugaccgaccugggccucaucuacacagcgaaguauccuaauagcucugaccuggaucgccuuucccaaagccaucccauucugaacaugguugacaccaaaaaguccucucucaauaucagcggguacaacuuuucccugggagccgcugugaaagccggcgcuugcaugcuugaugggggaaauaugcuggagacaaucaaggugaccccucagacgauggacggcauucucaaaagcauccugaaggucaaaaagucucugggcauguucguguccgauacacccggggaaagaaacccuuaugagaacauucucuacaagaucugucugagcggagacggcuggccguauauugccucucggaccagcaucguugggcgcgcgugggaaaauacaaccguggaucuugaguccgacggaaaaccccagaaggucggcucugccgggagcaacaaaucccugcagagcgcuggauuuccuaccggccucacauacucucaacugaugacgcugaaggauuccaugaugcagcuugaccccagcgccaaaaccuggauugauaucgagggcagaccugaagaccccguggagaucgcucucuaccagccgaugucugggugcuauauucacuucuuucgggaaccuacagaccugaagcaguucaagcaagaugccaaauacucccauggaaucgacguugccgaucuguuucccgcucagccuggccucaccagcgcggugauugaggcccugcccagaaauaugguccuuacaugucagggguccgacgauaucaagcgccugcucgacucucagggacggaaagauauuaagcugaucgacaucgcucugagcaaagccgauuccagacgcuucgaaaacgccgugugggaccaaugcaaggaucuuugucacaugcauaccggcgucgugguugagaagaaaaagagagggggcaaagaggaaauuacgccccacugcgcucucauggacuguaucauguaugaugccgcggugucuggaggccugaauauuccuguccugcgggcugugcucccgcgcgacaugguuuuucggacaagcucccccaaggugguccugugaggacuaguaauaaggaaacuguaugaaugucugugggcaggaagugaagagauccuucuguaaagguuuuuggaauuaugucugcugaauaauaaacuuuuuugaaauaauaaaucugguagaaaaaugagaucucaaaggcucuuuucagagccaccaaaaaaaaaaaaaaaaaaaaaaaaaaaaaaaaaaaaaaaaaaaaaaaaaaaaaaaaaaaaaaaaaaaaaaaaaaaaaaaaaaaaaaaaaaaaaaaaaaaaa

SEQ ID NO: 20257 - RNA, 2097 nt, Artificial Sequence
  mRNA product Design b-4 (hSL-A100) comprising derived and/or modified sequence from LASV(Lassa virus/H.sapiens-wt/NGA/2016/ISTH_0009;Clade II)__AVO03572__SP-HsALB_NP(2-569) (opt5)
aggagagucccgcagucggcguccagcggcucugcuuguucgugugugugucguugcaggccuuauucaagcuuaccaugaagugggugaccuucaucagccugcucuuucuguucuccucugccuacagcagcgccuccaaggaggugaaaucuuuccuguggacccagagccucagacgggaacuguccggcuacugcucuaacaucaaacuucaagucguuaaggacgcucaggcccugcuccacgggcuggauuuuagcgagguguccaaugugcagcgccuuaugagaaagcagaaacgggacgauucugaccugaagcgccucagagaucugaaccaagcggucaauaaccugguggaacucaagagcacacagcagaaauccauucugcggguuggaacgcuuaccagcgacgaucugcucacacuggcugccgaccuugagaagcugaaaucuaaggugauccgcaccgaaagaccccucuccagcggcgucuauauggggaaucugucuacacagcaacuggagcagcggcgcgcccuccugaacaugauuggaauggugggcggggcucagggaacccagccuggcagagauggcguugugcgggucugggacgugaaaaauccggaucuucugaacaaucaauucgggacaaugcccucccucacccuggccugucuuacgaagcagggacagguggaccugaacgaugcuguccucgcccugaccgaccugggccucaucuacacagcgaaguauccuaauagcucugaccuggaucgccuuucccaaagccaucccauucugaacaugguugacaccaaaaaguccucucucaauaucagcggguacaacuuuucccugggagccgcugugaaagccggcgcuugcaugcuugaugggggaaauaugcuggagacaaucaaggugaccccucagacgauggacggcauucucaaaagcauccugaaggucaaaaagucucugggcauguucguguccgauacacccggggaaagaaacccuuaugagaacauucucuacaagaucugucugagcggagacggcuggccguauauugccucucggaccagcaucguugggcgcgcgugggaaaauacaaccguggaucuugaguccgacggaaaaccccagaaggucggcucugccgggagcaacaaaucccugcagagcgcuggauuuccuaccggccucacauacucucaacugaugacgcugaaggauuccaugaugcagcuugaccccagcgccaaaaccuggauugauaucgagggcagaccugaagaccccguggagaucgcucucuaccagccgaugucugggugcuauauucacuucuuucgggaaccuacagaccugaagcaguucaagcaagaugccaaauacucccauggaaucgacguugccgaucuguuucccgcucagccuggccucaccagcgcggugauugaggcccugcccagaaauaugguccuuacaugucagggguccgacgauaucaagcgccugcucgacucucagggacggagagauauuaaacugaucgacaucgcucugagcaaggccgauucccgccgguucgaaaacgccgugugggaccaaugcaaagaucuuugucacaugcauaccggcgucgugguugagaagaagaaaagagggggcaaggaggaaauuacgccccacugcgcucucauggacuguaucauguaugaugccgcggugucuggaggccugaauauuccuguccugcgcgcugugcucccgcgggacaugguuuuuagaacaagcucccccaaagugguccugugaggacuaguaauaaggaaacuguaugaaugucugugggcaggaagugaagagauccuucuguaaagguuuuuggaauuaugucugcugaauaauaaacuuuuuugaaauaauaaaucugguagaaaaaugagaucucaaaggcucuuuucagagccaccaaaaaaaaaaaaaaaaaaaaaaaaaaaaaaaaaaaaaaaaaaaaaaaaaaaaaaaaaaaaaaaaaaaaaaaaaaaaaaaaaaaaaaaaaaaaaaaaaaaaa

SEQ ID NO: 20258 - RNA, 2097 nt, Artificial Sequence
  mRNA product Design b-4 (hSL-A100) comprising derived and/or modified sequence from LASV(Lassa virus/H.sapiens-wt/NGA/2016/ISTH_0017;Clade II)__AVO03568__SP-HsALB_NP(2-569) (opt5)
aggagagucccgcagucggcguccagcggcucugcuuguucgugugugugucguugcaggccuuauucaagcuuaccaugaagugggugaccuucaucagccugcucuuucuguucuccucugccuacagcagcgccuccaaggaggugaaaucuuuccuguggacccagagccucagacgggaacuguccggcuacugcucuagcaucaaacuucaagucguuaaggacgcucaggcccugcuccacgggcuggauuuuuccgaggugucuaacgugcagcgccuuaugagaaagcagaaacgggacgauagcgaccugaagcgccucagagaucugaaucaagcggucaacaaucugguggaacucaaguccacacagcagaaaagcauucugcggguuggaacgcuuaccucugacgaucugcucacacuggcugccgaccuugagaagcugaaauccaaggugauccgcaccgaaagaccccucagcucuggcgucuauauggggaaccuguccacacagcaacuggagcagcggcgcgcccuccugaauaugauuggaauggcuggcggggcccagggaacccagccuggcagagauggcgugguucgggugugggacgucaaaaacccggaucuucugaauaaccaauucgggacaaugcccagccucacccuggcuugucuuacgaagcagggacagguggaccugaaugaugccgugcucgcgcugaccgaccugggccucaucuacacagccaaguauccuaacucuuccgaccuggaucgccuuagccaaucccaucccauucugaauauggucgacaccaaaaagucuagccucaacaucuccggguacaauuuuagccugggagcugccguuaaagcuggcgccugcaugcuugaugggggaaacaugcuggagacaaucaaggugaccccucagacgauggacggcauucucaaaucuauccugaaggugaaaagaucccugggcauguucgucagcgaugcgcccggggaacggaauccuuaugagaacauucucuacaagaucugucugucuggagacggcuggccguauauugccagccgcacauccaucguggggagagcuugggaaaacaccacaguugaucuugagucugacggaaagccccagaaagugggcgccaccgggagcaauaagucccugcagagcgcuggauuuccuaccggccucacauacucucaacugaugacgcugaaagauuccaugaugcagcuugaccccagcgccaagaccuggauugauaucgagggccggccugaagaccccgucgagguggcccucuaccagccgguuucugggugcuauauccacuucuuuagagaaccuacagaccugaaacaguucaagcaagaugcuaaguacucccauggaauugacguggcggaucuguuucccgcccagccuggccucaccagcgcugucaucgaggcccugccccgcaacauggugcuuacaugucagggguccgacgauauuaaaaagcugcucgacucucagggacggaaagauaucaagcugauugacaucgcccugagcaaagcugauuccagacgcuucgaaaaugccgucugggaccaaugcaaggaucuuugucacaugcauaccggcgugguuguggagaagaaaaagagagggggcaaagaggaaaucacgccccacugcgcgcucauggacuguauuauguaugaugcugccgucucuggaggccugaacaucccugugcugcgggccguucucccgcgcgacaugguguuucggacaagcucccccaaggucgugcugugaggacuaguaauaaggaaacuguaugaaugucugugggcaggaagugaagagauccuucuguaaagguuuuuggaauuaugucugcugaauaauaaacuuuuuugaaauaauaaaucugguagaaaaaugagaucucaaaggcucuuuucagagccaccaaaaaaaaaaaaaaaaaaaaaaaaaaaaaaaaaaaaaaaaaaaaaaaaaaaaaaaaaaaaaaaaaaaaaaaaaaaaaaaaaaaaaaaaaaaaaaaaaaaaa

SEQ ID NO: 20259 - RNA, 2097 nt, Artificial Sequence
  mRNA product Design b-4 (hSL-A100) comprising derived and/or modified sequence from LASV(Lassa virus/H.sapiens-wt/NGA/2018/ISTH_0959;Clade II)__AVV65100__SP-HsALB_NP(2-569) (opt5)
aggagagucccgcagucggcguccagcggcucugcuuguucgugugugugucguugcaggccuuauucaagcuuaccaugaagugggugaccuucaucagccugcucuuucuguucuccucugccuacagcagcgccuccaaggaggugaaaucuuuccuguggacccagagccucagacgggaacuguccggcuacugcucuaacaucaaacuucaagucguuaaggacgcucaggcccugcuccacgggcuggauuuuagcgagguguccaaugugcagcgccuuaugagaaagcagaaacgggacgauucugaccugaagcgccucagagaucugaaccaagcggucaauaaccugguggaacucaagagcacccagcagaaauccauucugcggguuggaacgcuuaccagcgacgaucugcucacacuggcugccgaccuugagaagcugaaaucuaaggugauccgcaccgaaagaccccucuccagcggcgucuauauggggaaucugucuacacagcaacuggagcagcggcgcgcccuccugaaccuuauuggaauggugggcggggcucagggaacccagccuggcagagauggcguugugcgggucugggacgugaaaaauccggaucugcucaacaaucaauucgggacaaugcccucccugacccuugccugucugacgaagcagggacagguggaccucaacgaugucguucuggcucugaccgaccucggccugaucuacacagccaaguauccuaauagcucugaccuugaucgccugucccaaagccaucccauucucaacaugguggacaccaaaaaguccucucugaauaucagcggguuuaacuucucccuuggagcggccgugaaagcuggcgccugcaugcuggaugggggaaauaugcucgagacaaucaaggucaccccucagacgauggacggcauucugaaaagcauccugaaggugaaaaagucucucggcauguuuguuuccgauacacccggggaaagaaacccuuacgagaacauucuguauaagaucugucuuagcggagacggcuggccguacauugcuucucggaccagcaucguggggcgcgccugggaaaauacaaccgucgaucuggaguccgacggaaaaccccacaaggugggcaccgcggggucuaacaaaagccuccaguccgccggauucccuacaggccugacguauagccagcugaugacccuuaaggauucuaugaugcaacucgaccccuccgcuaaaacauggauugauaucgagggcagaccugaagaccccguugagaucgcccuguaccagccgaugagcgggugcuacauucacuuuuuccgggaaccuaccgaccugaagcaguuuaagcaggaugcuaaauauucucauggaaucgacguggccgaucucuuccccgcccaaccuggccugacauccgcugucauugaggcgcuucccagaaauauggugcugaccugucaggggagcgacgauaucaagcgccuccuggacucccagggacggaaagauauuaagcugaucgacaucgcccuuucuaaaacggauagcagacgcuuugaaaacgcugucugggaccagugcaaggaucucugucauaugcacacaggcgugguuguggagaagaaaaagagagggggcaaagaggaaauuacaccccacugcgcccugauggacuguaucauguacgaugccgcugucuccggaggccugaauauuccugugcuccgggccguucugccgcgcgacaugguguuccggaccucuagccccaaggucgugcuuugaggacuaguaauaaggaaacuguaugaaugucugugggcaggaagugaagagauccuucuguaaagguuuuuggaauuaugucugcugaauaauaaacuuuuuugaaauaauaaaucugguagaaaaaugagaucucaaaggcucuuuucagagccaccaaaaaaaaaaaaaaaaaaaaaaaaaaaaaaaaaaaaaaaaaaaaaaaaaaaaaaaaaaaaaaaaaaaaaaaaaaaaaaaaaaaaaaaaaaaaaaaaaaaaa

SEQ ID NO: 20260 - RNA, 2097 nt, Artificial Sequence
  mRNA product Design b-4 (hSL-A100) comprising derived and/or modified sequence from LASV(LASV003-NIG-2008;Clade II)__AIT17581__SP-HsALB_NP(2-569) (opt5)
aggagagucccgcagucggcguccagcggcucugcuuguucgugugugugucguugcaggccuuauucaagcuuaccaugaagugggugaccuucaucagccugcucuuucuguucuccucugccuacagcagcgccuccaaggaggugaaaucuuuccuguggacccagagccucagacgggaacuguccggcuacugcucuagcaucaaacuucaagucguuaaggacgcucaggcccugcuccacgggcuggauuuuuccgaggugucuaacgugcagcgccuuaugagaaagcagaaacgggacgauagcgaccugaagcgccucagagaucugaaucaagcggucaacaaucugguggaacucaaguccacccagcagaaaagcguucugcgggugggaacgcuuaccucugacgaucugcucacacuggcugccgaccuugagaagcugaaauccaaggucauucgcaccgaaagaccccucagcucuggcguguauauggggaaccuguccgcccagcaacuggagcagcggcgcacacuccugaauaugaucggaaugguuggcggggcucagggaacccagccuggcagagauggcgugguccgggugugggacgugaaaaacccggaucuucugaauaaccaauucgggacaaugcccagccucacccuggccugucuuacgaagcagggacaggucgaccugaaugauguugugcucgcucugaccgaccugggccucauuuacacagccaaguauccuaacucuuccgaccuggaucgccuuagccaaucccaucccauccugucuaugguggacaccaaaaagagcucccucaauauuagcggguacaacuuuucucugggagcggccgucaaagcuggcgccugcaugcuugaugggggaaauaugcuggagacaaucaaggugaccccucagacgauggacggcauccucaaauccauucugaagguuaaaaagagccugggcauguucgugucugauacacccggggaaagaaacccuuaugagaauauccucuacaagauuugucugagcggagacggcuggccguauaucgcuucccggaccucuauugucgggcgcgccugggaaaacacaaccguggaucuugagagcgacggaaaaccccagaagguuggcaccgcgggguccaacaaaagccugcagucugccggauuuccuacaggccucacguacucccaacugaugacccugaaggauagcaugaugcagcuugaccccucugcuaaaacauggaucgauauugagggcagaccugaagaccccguggagaucgcccucuaccagccgauguccgggugcuauauccacuucuuucgggaaccuaccgaccugaagcaguucaagcaagaugcuaaauacagccauggaauugacgucacagaucuguuucccgcccagccuggccucaccuccgccgugaucgaggcucugcccagaaauaugguccuuacgugucaggggucugacgauauuaagcgccugcucgacagccagggacggagagauaucaaacugauugacaucgcgcuguccaaggccgauucucgccgguucgaaaacgcugugugggaccaaugcaaagaucuuugucacaugcauacaggcguuguggucgagaagaagaaaagagggggcaaggaggaaaucacaccccacugcgcccucauggacuguauuauguaugaugccgcugugagcggaggccugaauaucccuguucugcgcgccgugcucccgcgggacauggucuuuagaaccuccagccccaaaguggugcugugaggacuaguaauaaggaaacuguaugaaugucugugggcaggaagugaagagauccuucuguaaagguuuuuggaauuaugucugcugaauaauaaacuuuuuugaaauaauaaaucugguagaaaaaugagaucucaaaggcucuuuucagagccaccaaaaaaaaaaaaaaaaaaaaaaaaaaaaaaaaaaaaaaaaaaaaaaaaaaaaaaaaaaaaaaaaaaaaaaaaaaaaaaaaaaaaaaaaaaaaaaaaaaaaa

SEQ ID NO: 20261 - RNA, 2097 nt, Artificial Sequence
  mRNA product Design b-4 (hSL-A100) comprising derived and/or modified sequence from LASV(LASV035-NIG-2009;Clade II)__AIT17589__SP-HsALB_NP(2-569) (opt5)
aggagagucccgcagucggcguccagcggcucugcuuguucgugugugugucguugcaggccuuauucaagcuuaccaugaagugggugaccuucaucagccugcucuuucuguucuccucugccuacagcagcgccuccaaggaggugaaaucuuuccuguggacccagagccucagacgggaacuguccggcuacugcucuagcaucaaacuucaagucguuaaagacgcucaggcccugcuccacgggcuggauuuuuccgaggugucuaacgugcagcgccuuaugagaaagcagaaacgggacgauagcgaccugaagcgccucagagaucugaaucaagcggucaacaaucugguggaacucaaguccacacagcagaaaagcauucugcggguuggaacgcuuaccucugacgaucugcucacacuggcugccgaccuugagaagcugaaauccaaggugauccgcaccgaaagaccccucagcucuggcgucuauauggggaaccuguccgcccagcaacuggagcagcggcgcgcucuccugaauaugauuggaauggugggcggggcccagggaacacagccuggcagagauggcguugugcgggucugggacgugaaaaacccggaucuucugaauaaccaauucgggaccaugcccagccucacacuggcuugucuuaccaagcagggacagguggaccugaaugaugccguccucgcgcugacggaccugggccucaucuacaccgccaaguauccuaacucuuccgaccuggaucgccuuagccaaucccaucccauucugaauaugguugacacaaagaagucuagccucaacaucuccggguacaauuuuagccugggagcugccgugaaagcuggcgccugcaugcuugaugggggaaacaugcuggagaccaucaaggugacaccucagaccauggacggcauucucaaaucuauccugaaggucaaaagaucccugggcauguucgugagcgauacgcccggggaacggaauccuuaugagaacauucucuacaagaucugucugucuggagacggcuggccguauauugcgagccgcacauccaucguugggagagccugggaaaacaccacaguggaucuugagucugacggaaagccccagaaagucggcaccaccgggagcaauaagucccugcagagcgcuggauuuccuacaggccucacguacucucaacugaugacccugaaagauuccaugaugcagcuugaccccagcgccaagacauggauugauaucgagggccggccugaagaccccguggagaucgcucucuaccagccgaugucugggugcuauauucacuucuuuagagaaccuaccgaccugaaacaguucaagcaagaugccaaguacucccauggaaucgacguugccgaucuguuucccgcucagccuggccucacaagcgcggugauugaggcccugccccgcaacaugguccuuaccugucagggguccgacgauaucaaaaagcugcucgacucucagggacggagagauauuaaacugaucgacaucgcucugagcaaggccgauucccgcaaauucgaaaaugccgugugggaccaaugcaaggaucuuugucacaugcauacgggcgucgugguugagaagaaaaagagagggggcaaagaggaaauuacaccccacugcgcucucauggacuguaucauguaugaugccgcggugucuggaggccugaacauuccuguccugcgggcugugcucccgcgcgacaugguuuuucggaccagcucccccaaggugguccugugaggacuaguaauaaggaaacuguaugaaugucugugggcaggaagugaagagauccuucuguaaagguuuuuggaauuaugucugcugaauaauaaacuuuuuugaaauaauaaaucugguagaaaaaugagaucucaaaggcucuuuucagagccaccaaaaaaaaaaaaaaaaaaaaaaaaaaaaaaaaaaaaaaaaaaaaaaaaaaaaaaaaaaaaaaaaaaaaaaaaaaaaaaaaaaaaaaaaaaaaaaaaaaaaa

SEQ ID NO: 20262 - RNA, 2097 nt, Artificial Sequence
  mRNA product Design b-4 (hSL-A100) comprising derived and/or modified sequence from LASV(LASV1000-NIG-2009;Clade II)__AIT17783__SP-HsALB_NP(2-569) (opt5)
aggagagucccgcagucggcguccagcggcucugcuuguucgugugugugucguugcaggccuuauucaagcuuaccaugaagugggugaccuucaucagccugcucuuucuguucuccucugccuacagcagcgccuccaaggaggugaaaucuuuccuguggacccagagccucagacgggaacuguccggcuacugcucuaacaucaaacuucaagucguuaaggacgcucaggcccugcuccacgggcuggauuuuagcgagguguccaaugugcagcgccuuaugagaaagcagaaacgggacgauucugaccugaagcgccucagagaucugaaccaagcggucaauaaccugguggaacucaagagcacacagcagaaauccauucugcggguuggaacgcuuaccagcgacgaucugcucacacuggcugccgaccuugagaagcugaaaucuaaggugauccgcaccgaaagaccccucuccagcggcgucuauauggggaaucugucuacacagcaacuggagcagcggcgcgcccuccugaacaugauuggaauggugggcggggcucagggaacccagccuggcagagauggcguugugcgggucugggacgugaaaaauccggaucuucugaacaaucaauucgggacaaugcccucccucacccuggccugucuuacgaagcagggacagguggaccugaacgaugucguucucgcucugaccgaccugggccucaucuacacagccaaguauccuaauagcucugaccuggaucgccuuucccaaagccaucccauucugaacaugguggacaccaaaaaguccucucucaauaucagcggguacaacuuuucccugggagcggccgugaaagcuggcgccugcaugcuugaugggggaaauaugcuggagacaaucaaggucaccccucagacgauggacggcauucucaaaagcauccugaaggugaaaaagucucugggcauguucguuuccgauacacccggggaaagaaacccuuaugagaacauucucuacaagaucugucugagcggagacggcuggccguauauugcuucucggaccagcaucguggggcgcgccugggaaaauacaaccgucgaucuugaguccgacggaaaaccccagaaggugggcaccgcggggucuaacaaaagccugcaguccgccggauuuccuacaggccucacguacagccaacugaugacccugaaggauucuaugaugcagcuugaccccuccgcuaaaacauggauugauaucgagggcagaccugaagaccccguugagaucgcccucuaccagccggugagcgggugcuauauucacuucuuucgggaaccuaccgaccugaagcaguucaagcaagaugcuaaauacucucauggaaucgacgucgccgaucuguuucccgcccagccuggccucacauccgcugugauugaggcgcugcccagaaauaugguccuuaccugucaggggagcgacgauaucaagcgccugcucgacucccagggacggagagauauuaaacugaucgacaucgcccugucuaaggcugauagccgccgguucgaaaacgccgugugggaccaaugcaaagaucuuugucacaugcauacgggcguuguggucgagaagaagaaaagagggggcaaggaggaaauuacaccccacugcgcccucauggacuguaucauguaugaugcugccguguccggaggccugaauauuccuguucugcgcgcggugcucccgcgggacauggucuuuagaaccucuagccccaaaguggugcugugaggacuaguaauaaggaaacuguaugaaugucugugggcaggaagugaagagauccuucuguaaagguuuuuggaauuaugucugcugaauaauaaacuuuuuugaaauaauaaaucugguagaaaaaugagaucucaaaggcucuuuucagagccaccaaaaaaaaaaaaaaaaaaaaaaaaaaaaaaaaaaaaaaaaaaaaaaaaaaaaaaaaaaaaaaaaaaaaaaaaaaaaaaaaaaaaaaaaaaaaaaaaaaaaa

SEQ ID NO: 20263 - RNA, 2097 nt, Artificial Sequence
  mRNA product Design b-4 (hSL-A100) comprising derived and/or modified sequence from LASV(LASV221-NIG-2010;Clade II)__AIT17625__SP-HsALB_NP(2-569) (opt5)
aggagagucccgcagucggcguccagcggcucugcuuguucgugugugugucguugcaggccuuauucaagcuuaccaugaagugggugaccuucaucagccugcucuuucuguucuccucugccuacagcagcgccuccaaggaggugaaaucuuuccuguggacccagagccucagacgggaacuguccggcuacugcucuagcaucaaacuucaagucguuaaggacgcucaggcccugcuccacgggcuggauuuuuccgaggugucuaacgugcagcgccuuaugagaaagcagcggcgcgacgauagcgaccugaaaagacuccgggaucugaaucaagcggucaacaaucugguggaacucaaguccacacagcaaaagagcauucugcgcguuggaacgcuuaccucugacgaucugcucacacuggcugccgaccuugagaaacugaaguccaaagugaucagaaccgaacggccccucagcucuggcgucuauauggggaaccuguccacacagcagcuggagcagcgcagagcccuccugaauaugauuggaauggugggcggggcucagggaacccagccuggccgggauggcguugugcgcgucugggacgugaagaacccggaucuucugaauaaccaauucgggacaaugcccagccucacccuggccugucuuacgaaacagggacagguggaccugaaugaugcuguccucgcccugaccgaccugggccucaucuacacagcgaaguauccuaacucuuccgaccuggauagacuuagccaaucccaucccauucugaauaugguugacaccaagaaaucuagccucaacaucuccggguacaauuuuagccugggagccgcugugaaggccggcgcuugcaugcuugaugggggaaacaugcuggagacaaucaaagugaccccucagacggucgacggcauucucaagucuauccugaaagugaagcggucccugggcauguucguuagcgauacacccggggaacgcaauccuuaugagaacauucucuacaaaaucugucugucuggagacggcuggccguauauugccagcagaaccuccaucguggggcgggcgugggaaaacacaaccgucgaucuugagucugacggaaagccccagaaggugggcaccgccgggagcaauaaaucccugcagagcgcuggauuuccuacaggccucacguacucucaacugaugacccugaaggauuccaugaugcagcuugaccccagcgccaaaacauggauugauaucgagggcagaccugaagaccccguugagaucgcucucuaccagccgaugucugggugcuauauucacuucuuucgcgaaccuaccgaccugaagcaguucaaacaagaugccaaguacucccauggaaucgacguggccgaucuguuucccgcucagccuggccucacaagcgcggucauugaggcccugccccggaacauggugcuuaccugucagggguccgacgauaucaagagacugcucgacucucagggacgccgggauauuaaacugaucgacaucgcucugagcaaggccgauuccagaaaauucgaaaaugccgucugggaccaaugcaaggaucuuugucacaugcauacgggcgugguuguggagaaaaagaagcgcgggggcaaagaggaaauuacaccccacugcgcucucauggacuguaucauguaugaugccgcggucucuggaggccugaacauuccugugcugcgggcuguucucccgagagacaugguguuucgcaccagcucccccaaggucgugcugugaggacuaguaauaaggaaacuguaugaaugucugugggcaggaagugaagagauccuucuguaaagguuuuuggaauuaugucugcugaauaauaaacuuuuuugaaauaauaaaucugguagaaaaaugagaucucaaaggcucuuuucagagccaccaaaaaaaaaaaaaaaaaaaaaaaaaaaaaaaaaaaaaaaaaaaaaaaaaaaaaaaaaaaaaaaaaaaaaaaaaaaaaaaaaaaaaaaaaaaaaaaaaaaaa

SEQ ID NO: 20264 - RNA, 2097 nt, Artificial Sequence
  mRNA product Design b-4 (hSL-A100) comprising derived and/or modified sequence from LASV(LASV237-NIG-2010;Clade II)__AIT17639__SP-HsALB_NP(2-569) (opt5)
aggagagucccgcagucggcguccagcggcucugcuuguucgugugugugucguugcaggccuuauucaagcuuaccaugaagugggugaccuucaucagccugcucuuucuguucuccucugccuacagcagcgccuccaaggaggugaaaucuuuccuguggacccagagccucagacgggaacuguccggcuacugcucuaacaucaaacuucaagucguuaaggacgcucaggcccugcuccacgggcuggauuuuagcgagguguccaaugugcagcgccuuaugagaaagcagaaacgggacgauucugaccugaagcgccucagagaucugaaccaagcggucaauaaccugguggaacucaagagcacacagcagaaauccauucugcggguuggaacgcuuaccagcgacgaucugcucacacuggcugccgaccuugagaagcugaaaucuaaggugauccgcaccgaaagaccccucuccagcggcgucuauauggggaaucugucuacacagcaacuggagcagcggcgcgcccuccugaacaugauuggaauggugggcggggcucagggaacccagccuggcagagauggcguugugcgggucugggacgugaaaaauccggaucuucugaacaaucaauucgggacaaugcccucccucacccuggccugucuuacgaagcagggacagguggaccugaacgaugcuguccucgcccugaccgaccugggccucaucuacacagcgaaguauccuaauagcucugaccuggaucgccuuucccaaagccaucccauucugaacaugguugacaucaaaaaguccucucucaauaucagcggguacaacuuuucccugggagccgcugugaaagccggcgcuugcaugcuugaugggggaaauaugcuggagaccauuaaggugacaccucagaccauggacggcauccucaaaagcauucugaaggucaaaagaucucugggcauguucguguccgauacgcccggggaacggaacccuuaugagaacauccucuacaagauuugucugagcggagacggcuggccguauaucgccucucgcacaagcauuguugggagagcgugggaaaauaccacaguggaucuugaguccgacggaaagccccagaaagucggcucugccgggagcaacaagucccugcagagcgcuggauuuccuaccggccucaccuacucucaacugaugacacugaaagauuccaugaugcagcuugaccccagcgccaagacguggaucgauaucgagggccggccugaagaccccguggagauugcucucuaccagccgaugucugggugcuauauccacuucuuuagagaaccuaccgaccugaaacaguucaagcaagaugccaaguacucccauggaauugacguugccgaucuguuucccgcucagccuggccucacaagcgcggugaucgaggcccugccccgcaauaugguccuuaccugucagggguccgacgauauuaaacggcugcucgacucucagggaagacgcgauaucaagcugaucgacauugcucugagcaaagccgauucccggagauucgaaaacgccgugugggaccaaugcaaggaucuuugucacaugcauacaggcgucgugguugagaaaaagaagcgcgggggcaaagaggaaaucacgccccacugcgcucucauggacuguauuauguaugaugccgcggugucuggaggccugaauaucccuguccugcgggcugugcucccgagagacaugguuuuucgcaccagcucccccaaggugguccugugaggacuaguaauaaggaaacuguaugaaugucugugggcaggaagugaagagauccuucuguaaagguuuuuggaauuaugucugcugaauaauaaacuuuuuugaaauaauaaaucugguagaaaaaugagaucucaaaggcucuuuucagagccaccaaaaaaaaaaaaaaaaaaaaaaaaaaaaaaaaaaaaaaaaaaaaaaaaaaaaaaaaaaaaaaaaaaaaaaaaaaaaaaaaaaaaaaaaaaaaaaaaaaaaa

SEQ ID NO: 20265 - RNA, 2097 nt, Artificial Sequence
  mRNA product Design b-4 (hSL-A100) comprising derived and/or modified sequence from LASV(LASV253-NIG-2011;Clade II)__AIT17671__SP-HsALB_NP(2-569) (opt5)
aggagagucccgcagucggcguccagcggcucugcuuguucgugugugugucguugcaggccuuauucaagcuuaccaugaagugggugaccuucaucagccugcucuuucuguucuccucugccuacagcagcgccuccaaggaggugaaaucuuuccuguggacccagagccucagacgggaacuguccggcuacugcucuagcaucaaacuucaagucguuaaggacgcucaggcccugcuccacgggcuggauuuuuccgaggugucuaacgugcagcgccuuaugagaaagcagaaacgggacgauagcgaccugaagcgccucagagaucugaaucaagcggucaacaaucugguggaacucaaguccacccagcagaaaagcguucugcgggugggaacgcuuaccucugacgaucugcucacacuggcugccgaccuugagaagcugaaauccaaggucauucgcaccgaaagaccccucagcucuggcguguauauggggaaccuguccacacagcaacuggagcagcggcgcgcccuccugaauaugaucggaaugguuggcggggcucagggaacccagccuggcagagauggcgugguccgggugugggacgugaaaaacccggaucuucugaauaaccaauucgggacaaugcccagccucacccuggccugucuuacgaagcagggacaggucgaccugaaugauguugugcucgcucugaccgaccugggccucauuuacacagccaaguauccuaacucuuccgaccuggaucgccuuagccaaucccaucccauccugaauaugguggacaccaaaaagucuagccucaacauuuccggguacaauuuuagccugggagcggccgucaaagcuggcgccugcaugcuugaugggggaaacaugcuggagacaaucaaggugaccccucagacgauggacggcauccucaaaucuauucugaagguuaaaaagucccugggcauguucgugagcgauacacccggggaaagaaauccuuaugagaacauccucuacaagauuugucugucuggagacggcuggccguauaucgcuagccggaccuccauugucgggcgcgccugggaaaacacaaccguggaucuugagucugacggaaaaccccagaagguuggcaccgcggggagcaauaaaucccugcagagcgccggauuuccuacaggccucacguacucucaacugaugacccugaaggauuccaugaugcagcuugaccccagcgcuaaaacauggaucgauauugagggcagaccugaagaccccguggagaucgcccucuaccagccgaugucugggugcuauauccacuucuuucgggaaccuaccgaccugaagcaguucaagcaagaugcuaaauacucccauggaauugacgucacagaucuguuucccgcccagccuggccucaccagcgccgugaucgaggcucugcccagaaacaugguccuuacgugucagggguccgacgauauuaagcgccugcucgacucucagggacggagagauaucaaacugauugacaucgcgcugagcaaggccgauucccgccgguucgaaaaugcugugugggaccaaugcaaagaucuuugucacaugcauacaggcguuguggucgagaagaagaaaagagggggcaaggaggaaaucacaccccacugcgcccucauggacuguauuauguaugaugccgcugugucuggaggccugaacaucccuguucugcgcgccgugcucccgcgggacauggucuuuagaaccagcucccccaaaguggugcugugaggacuaguaauaaggaaacuguaugaaugucugugggcaggaagugaagagauccuucuguaaagguuuuuggaauuaugucugcugaauaauaaacuuuuuugaaauaauaaaucugguagaaaaaugagaucucaaaggcucuuuucagagccaccaaaaaaaaaaaaaaaaaaaaaaaaaaaaaaaaaaaaaaaaaaaaaaaaaaaaaaaaaaaaaaaaaaaaaaaaaaaaaaaaaaaaaaaaaaaaaaaaaaaaa

SEQ ID NO: 20266 - RNA, 2097 nt, Artificial Sequence
  mRNA product Design b-4 (hSL-A100) comprising derived and/or modified sequence from LASV(LASV254-NIG-2011;Clade II)__AIT17675__SP-HsALB_NP(2-569) (opt5)
aggagagucccgcagucggcguccagcggcucugcuuguucgugugugugucguugcaggccuuauucaagcuuaccaugaagugggugaccuucaucagccugcucuuucuguucuccucugccuacagcagcgccuccaaggaggugaaaucuuuccuguggacccagagccucagacgggaacuguccggcuacugcucuagcaucaaacuucaagucguuaaggacgcucaggcccugcuccacgggcuggauuuuuccgaggugucuaacgugcagcgccuuaugagaaagcagaaacgggacgauagcgaccugaagcgccucagagaucugaaucaagcggucaacaaucugguggaacucaaguccacacagcagaaaagcguucugcgggugggaacgcuuaccucugacgaucugcucacacuggcugccgaccuugagaagcugaaauccaaggucauucgcaccgaaagaccccucagcucuggcguguauauggggaaccuguccacacagcaacuggagcagcggcgcgcccuccugaauaugaucggaaugguuggcggggcucagggaacccagccuggcagagauggcgugguccgggugugggacgugaaaaacccggaucuucugaauaaccaauucgggacaaugcccagccucacccuggccugucuuacgaagcagggacaggucgaccugaaugaugcuguucucgcccugaccgaccugggccucauuuacacagcgaaguauccuaacucuuccgaccuggaucgccuuagccaaucccaucccauccugaauaugguggacaccaaaaagucuagccucaacauuuccggguacaauuuuagccugggagccgcugugaaagccggcgcuugcaugcuugaugggggaaacaugcuggagacaaucaaggucaccccucagacgauggacggcauccucaaaucuauucugaaggugaaaaagucccugggcauguucguuagcgauacacccggggaaagaaauccuuaugagaacauccucuacaagauuugucugucuggagacggcuggccguauaucgccagccggaccuccauuguggggcgcgcgugggaaaacacaaucgucgaucuugagucugacggaaaaccccagaaggugggcaccgccgggagcaauaaaucccugcagagcgcuggauuuccuaccggccucacauacucucaacugaugacgcugaaggauuccaugaugcagcuugaccccagcgccaaaaccuggauugauaucgagggcagaccugaagaccccguugagaucgcucucuaccagccgaugucugggugcuauauucacuucuuucgggaaccuacagaccugaagcaguucaagcaagaugccaaauacucccauggaaucgacguggccgaucuguuucccgcucagccuggccucaccagcgcggucauugaggcccugcccagaaacauggugcuuacaugucagggguccgacgauaucaagcgccugcucgacucucagggacggagagauauuaaacugaucgacaucgcucugagcaaggccgauucccgccgguucgaaaaugccgucugggaccaaugcaaagaucuuugucacaugcauaccggcgugguuguggagaagaagaaaagagggggcaaggaggaaauuacgccccacugcgcucucauggacuguaucauguaugaugccgcggucucuggaggccugaacauuccugugcugcgcgcuguucucccgcgggacaugguguuuagaacaagcucccccaaagucgugcugugaggacuaguaauaaggaaacuguaugaaugucugugggcaggaagugaagagauccuucuguaaagguuuuuggaauuaugucugcugaauaauaaacuuuuuugaaauaauaaaucugguagaaaaaugagaucucaaaggcucuuuucagagccaccaaaaaaaaaaaaaaaaaaaaaaaaaaaaaaaaaaaaaaaaaaaaaaaaaaaaaaaaaaaaaaaaaaaaaaaaaaaaaaaaaaaaaaaaaaaaaaaaaaaaa

SEQ ID NO: 20267 - RNA, 2097 nt, Artificial Sequence
  mRNA product Design b-4 (hSL-A100) comprising derived and/or modified sequence from LASV(Nig08-04;Clade II)__ADU56611__SP-HsALB_NP(2-569) (opt5)
aggagagucccgcagucggcguccagcggcucugcuuguucgugugugugucguugcaggccuuauucaagcuuaccaugaagugggugaccuucaucagccugcucuuucuguucuccucugccuacagcagcgccuccaaggaggugaaaucuuuccuguggacccagagccucagacgggaacuguccggcuacugcucuaacaucaaacuucaagucguuaaggacgcucaggcccugcuccacgggcuggauuuuagcgagguguccaaugugcagcgccuuaugagaaagcagaaacgggacgauggagaccugaagcgccucagagaucugaaccaagcggucaauaaccugguggaacucaagucuacccagcagaaaagcguucugcgggugggcacgcuuaccuccgacgaucugcucacacuggcugccgaccuugagaagcugaaaagcaaggucauucgcaccgaaagaccccucucuuccgggguguauaugggaaaucugagcacacagcaacuggagcagcggaaagcccuccugucuaugaucggcaugguugggggagcucagggcacccagccuggccgcgaugggguggucagagugugggacgugaagaacccggaucuucugaauaaccaauucggaacaaugcccucccucacccuggccugucuuacgaagcagggccaggucgaccugaaugaugcuguucucgcccugaccgaccuggggcucauuuacacagcgaaauauccuaacagcucugaccuggaucggcuuucccaaagccaucccauccugaauaugguggacaccaagaaauccucucucaacauuagcggauacaauuuuucccugggcgccgcugugaaggccggggcuugcaugcuugauggaggcaacaugcuggagacaaucaaagucaccccucagacgauggacggcauccucaagagcauucugaaagugaagcgcucucuggggauguucguuuccgauacacccggagaaagaaauccuuaugagaacauccucuacaagauuugucugagcggcgacggguggccguauaucgccucucggaccagcauugugggacgcgcgugggaaaacacaaccgucgaucuugaguccgacggcaaaccccagaagguggggaccgccggaucuaauaaaagccugcaguccgcuggcuuuccuacaggccucacguacagccaacugaugacccugaaggauucuaugaugcagcuugaccccuccgccaaaacauggaucgauauugaggggagaccugaagaccccguugagaucgcucucuaccagccgaugagcggaugcuauauccacuucuuucgggaaccuaccgaccugaagcaguucaagcaagaugccaaauacucucauggcauugacgugacagaucuguuuuccgcccagcccgggcucaccagcgcugucaucgaggcgcugccuagaaacauggugcuuacgugucagggauccgacgauauuaagaaacugcucgacucucagggccgccgggauaucaagcugauugacaucagccugaauaaagccgauuccagacgcuucgaaaacgcugucugggaccaaugcaaggaucuuugucacaugcauacaggggugguuguggagaagaaaaagcggggcggaaaagaggaaaucacaccccacugcgcccucauggacuguauuauguuugaugccgcugucucuggcgggcugaauauccccauucugagagccgugcucccucgcgacaugguuuuccggaccagcuccccgaaggugguccugugaggacuaguaauaaggaaacuguaugaaugucugugggcaggaagugaagagauccuucuguaaagguuuuuggaauuaugucugcugaauaauaaacuuuuuugaaauaauaaaucugguagaaaaaugagaucucaaaggcucuuuucagagccaccaaaaaaaaaaaaaaaaaaaaaaaaaaaaaaaaaaaaaaaaaaaaaaaaaaaaaaaaaaaaaaaaaaaaaaaaaaaaaaaaaaaaaaaaaaaaaaaaaaaaa

SEQ ID NO: 20268 - RNA, 2100 nt, Artificial Sequence
  mRNA product Design b-4 (hSL-A100) comprising derived and/or modified sequence from LASV(GA391;Clade III)__AAA46284__SP-HsALB_NP(2-570) (opt5)
aggagagucccgcagucggcguccagcggcucugcuuguucgugugugugucguugcaggccuuauucaagcuuaccaugaagugggugaccuucaucagccugcucuuucuguucuccucugccuacagcagcgccuccaaggaggugagaucuugccuguggacccagagccuccggcgcgaacuguccggcuacuguucuaacaucaaacuucaagucguuaaggacgcucaggcccugcuccacgggcuggauuucagcgagguguccaaugugcagagacuuaugcggaaacagaagcgcgacgauggagaccugaaaagacuccgggaucugaaccaagcggucaauaaccugguggaacucaagucuacacagcagaaaagcguucugcgcgugggcacgcuuuccagcgacgaucugcucauucuggcugccgaccuugagaaacugaagucuaaagucaccagaacagaacggccccucuccagcgggguguauaugggaaaucugucuucccagcaacuggaucagcgcagagcccuccugaacaugaucggcaugaccgggguuagcggaggcggcaagggggcuucuaauggaauugugcgggucugggacgugaaaaacgccgagcuucugaauaaccaguuuggcacaaugccuucccucacccuggcuugccuuacaaagcaggggcaaguggaucugaaugacgccguccaggcgcucaccgaucugggacugaucuacacggccaaguauccgaacagcuccgaccucgaccgccugucucagagccaucccauucuuaauaugaucgauaccaaaaaguccagccugaacaucucuggcuacaauuucucccucggggcugccguuaaagcuggagccuguaugcuggacggcggcaacaugcuugagacaauuaaggugagcccucaaaccauggaugggauccugaaaucuauucucaaggugaaaaagagccugggaauguuugucuccgacacacccggcgaaagaaacccuuaugagaauauccuguacaagauuugccucucuggggauggauggagcuauaucgcgucccggaccagcauugugggccgcgccugggaaaacacgguuguggaccuggagcaggauaauaaaccccagaagaucgggaacggaggcucuaauaaaucccuucagagcgcuggcuucgccgcugggcugaucuacucucaacucaugacacugaaggacuuuaaauguuucaaccugauuccuaaugccaagaccuggauggauaucgagggaagaccggaagaccccgucgagauugcccuuuaccagccuuccagcggcugcuaugugcacuuuuuccgggaacccacagaucucaagcaguuuaaacaggacgcuaaguacucccaugggagagacguuaccgaucuguucgcggcccaaccuggacugaccucugcugugaucgaggcccucccccgcaacauggucauuacaugucagggcagcgaagacauccggaaacugcuugagucccaggggagacgcgauaucaagcugauugacaucacgcucucuaaagccgauagccggaaguuugagaaugcugugugggaccaguucaaggaucugugccacaugcauaccggcgucgugguugaaaagaagaaaagaggaggcaaggaggaaauuacaccgcacugugcccugauggacugcaucauguuugaugcggcuguguccgggggacuugacgccaaaguccuccgcgugguucugccucgggauaugguguucagaaccagcacacccaaggucgugcugugaggacuaguaauaaggaaacuguaugaaugucugugggcaggaagugaagagauccuucuguaaagguuuuuggaauuaugucugcugaauaauaaacuuuuuugaaauaauaaaucugguagaaaaaugagaucucaaaggcucuuuucagagccaccaaaaaaaaaaaaaaaaaaaaaaaaaaaaaaaaaaaaaaaaaaaaaaaaaaaaaaaaaaaaaaaaaaaaaaaaaaaaaaaaaaaaaaaaaaaaaaaaaaaaa

SEQ ID NO: 20269 - RNA, 2097 nt, Artificial Sequence
  mRNA product Design b-4 (hSL-A100) comprising derived and/or modified sequence from LASV(Nig08-A19;Clade III)__ADU56619__SP-HsALB_NP(2-569) (opt5)
aggagagucccgcagucggcguccagcggcucugcuuguucgugugugugucguugcaggccuuauucaagcuuaccaugaagugggugaccuucaucagccugcucuuucuguucuccucugccuacagcagcgccuccaaggaggugaaaucuuuccuguggacccagagccucagacgggaacuguccggcuacugcucuaacaucaaacuucaagucguuaaggacgcucaggcccugcuccacgggcuggauuuuagcgagguguccaaugugcagcgccuuaugagaaagcagaaacgggacgauggagaccugaagcgccucagagaucugaaccaagcggucaauaaccugguggaacucaagucuacacagcagaaaagcguucugcgggugggcacgcuuuccagcgacgaucugcucguccuggcugccgaccuugagaagcugaaaucuaaggugguucgcaccgaaagaccccucuccagcgggauuuauaugggaaaucugucuucccagcaacuggaucagcggaaagcccuccugaacaugaucggcaugacagggggaaauggcggccgcaacaccacaagcgacgggauugugagagucugggaugugaagaaugcugagcuucugaacaaucaguucggaaccaugccuucucucacacuggccugucuuaccaagcagggccaaguggaccugaacgaugcuguccaggcccucacggaccuggggcugaucuacaccgcgaaauaucccaauuccagcgaccucgaucggcuggcccagucccauccgauucuuaacaugaucgacacaaagaaaucuagccugaauaucuccggauacaacuuuagccucggcgcugccguuaaggcuggggccugcaugcuggauggaggcaacaugcuugagaccauuaaagugucuccucaaacaauggacggcauccugaaguccauucucaaagugaagcgcagccuggggauguucaucucugauacccccggagaaagaaauccuuaugagaacauucuguacaagaucugucucagcggcgacggguggcccuauauugcgucccggacgucuaucgucggacgcgccugggaaaauacagugguugaucuggagagcgacaacaaaccucagaagaccggcaaugggggauccaacaaaagccuucagucugcuggcuuugccgcuggccugacauacucccagcucaugacccugaaggauagcaugcugcaacuugacccgaaugccaaaaccuggauggauaucgaggggagacccgaagacccuguggagauugcccucuaccagcccucuuccggaugcuauauccacuucuuucgggaaccuacagaccugaagcaguucaagcaggaugcuaaauacagccauggcauugacgucacggaucuguuugcggcccaacccgggcucaccuccgcugugaucgaggcccugccgagaaacaugguuauuacaugucagggaucugaagacauccgcaaacuucuggagagccagggccggagagauaucaagcucauugacaucucccugucuaagguggauagccgcaaauucgagaaugccgucugggaccaguuuaaggaucugugccacaugcauaccgggauuguggucgaaaagaaaaagcggggcggaaaagaggaaaucacaccucacugugcucuuauggacugcauuauguucgaugccgcgguguccggcgggguugacgcuaaggugcucagagccguccugccccgcgauaugguguuucggaccagcacgccuaaaguugugcugugaggacuaguaauaaggaaacuguaugaaugucugugggcaggaagugaagagauccuucuguaaagguuuuuggaauuaugucugcugaauaauaaacuuuuuugaaauaauaaaucugguagaaaaaugagaucucaaaggcucuuuucagagccaccaaaaaaaaaaaaaaaaaaaaaaaaaaaaaaaaaaaaaaaaaaaaaaaaaaaaaaaaaaaaaaaaaaaaaaaaaaaaaaaaaaaaaaaaaaaaaaaaaaaaa

SEQ ID NO: 20270 - RNA, 2097 nt, Artificial Sequence
  mRNA product Design b-4 (hSL-A100) comprising derived and/or modified sequence from LASV(G1180-SLE-2010;Clade IV)__AIT17169__SP-HsALB_NP(2-569) (opt5)
aggagagucccgcagucggcguccagcggcucugcuuguucgugugugugucguugcaggccuuauucaagcuuaccaugaagugggugaccuucaucagccugcucuuucuguucuccucugccuacagcagcgccuccaaggagaucaaaucuuuccuguggacccagagccucagacgggaacuguccggcuacugcucuaacauuaagcugcaaguggucaaagacgcucaggcccugcuccacgggcuggauuuuagcgagguuuccaaugugcagcgccuuaugagaaaggaacggcgcgacgauaacgaccugaaaagacuccgggaucugaaucaggcggugaacaaucuggucgagcucaagucuacacaacaaaagagcauccugcgcgugggaacgcuuaccuccgacgaucugcucauucuggcugccgaccuugaaaaacuuaagagcaaaguuaucagaacagagcggccccucucugccggcguguauauggggaaccuguccagccagcagcuggaucagcgcagagcucuccugucuaugauuggaauguccagcggcaaucagcgggcccaggcugggcgcgacggagucgugagaguuugggaugugaagaacgucgagcuucugaauaaccaguucggcaccaugccuucucucacacuggccugucuuaccaaacaaggccagguggaccugaaugaugcggugcaggcccucacagaccuggggcugaucuacaccgcuaaguauccgaacacguccgaccucgaucggcugacccaaagccaucccauccuuaauaugauugacacaaagaaauccucucugaacaucagcggauacaauuuuucccucggcgccgcugucaaggccggggcgugcaugcuggauggaggcaacaugcuugaaaccauuaaaguuagcccucagacaauggacgggauccugaagucuauucucaaagugaagaaagcccugggaauguucaucuccgauacccccggcgagcgcaacccuuaugaaaauauucuguacaagaucugucucagcggcgacggguggcccuauaucgcuucuagaacgagcauuacaggacgggccugggagaacaccguggucgaucuggaguccgacggcaagccucagaaagcugggucuaauaacagcaauaagucccuucagagcgugggauuuacagccggccugaccuacucucaacucaugacccugaaagaugccaugcugcagcuugacccgaacgcuaagacauggauggauaucgaagggagacccgaggacccuguugaaauugcgcucuaccagcccuccagcggaugcuauauccacuucuuucgcgagccuacggaccugaaacaguucaagcaagaugccaaguacucucauggcauugacgugaccgaucuguuugcugcccagcccggccucacauccgccgucaucgacgcucugccgcggaauauggugaucaccugucaggggagcgaugacauuagaaaacuucuggaaucccagggacgcaaggauaucaaacucauugacaucgcccugucuaagacagauagccggaaauaugagaacgcgguuugggaccaauacaaggaucugugccacaugcauaccggcguggucguggagaagaaaaagagagggggaaaagaagagauuacgccucacugugcucuuauggacugcaucauguucgaugccgccgucuccggcgggcucaauacaucugugcugcgcgcuguucugccccgggacaugguguuuagaaccagcaccccucgcgucgugcucugaggacuaguaauaaggaaacuguaugaaugucugugggcaggaagugaagagauccuucuguaaagguuuuuggaauuaugucugcugaauaauaaacuuuuuugaaauaauaaaucugguagaaaaaugagaucucaaaggcucuuuucagagccaccaaaaaaaaaaaaaaaaaaaaaaaaaaaaaaaaaaaaaaaaaaaaaaaaaaaaaaaaaaaaaaaaaaaaaaaaaaaaaaaaaaaaaaaaaaaaaaaaaaaaa

SEQ ID NO: 20271 - RNA, 2097 nt, Artificial Sequence
  mRNA product Design b-4 (hSL-A100) comprising derived and/or modified sequence from LASV(G1442-SLE-2011;Clade IV)__AIT17181__SP-HsALB_NP(2-569) (opt5)
aggagagucccgcagucggcguccagcggcucugcuuguucgugugugugucguugcaggccuuauucaagcuuaccaugaagugggugaccuucaucagccugcucuuucuguucuccucugccuacagcagcgccuccaaggaggugaaaucuuuccuguggacccagagccucagacgggaacuguccggcuacugcucuaacaucaaacuucaagucguuaaggacgcucaggcccugcuccacgggcuggauuuuagcgagguguccaaugugcagcgccuuaugagaaagcagcggcgcgacgauaacgaccugaaaagacuccgggaucugaaucaagcggucaacaaucugguggaacucaagucuacacagcaaaagagcguucugcgcgugggaacgcuuaccuccgacgaucugcucguccuggcugccgaccuugagaaacuuaagagcaaagugauuagaacagaacggccccucucugccggcguuuauauggggaaccuguccagccagcagcuggaucagcgcagagcucuccugaauaugaucggaaugucuggcgggauucagggaacccggacaggccgcgacggcguggucagagugugggaugugaagaacgccgaccuucugaauaaccaguucgggaccaugccuucccucacacuggcuugucuuaccaaacaaggacaggucgaucugaaugacguugugcaggcccucacggaccugggccugaucuacaccgcgaaguauccgaacgccagcgaucucgaccggcugacacaaucucaucccauucuuaauaugaucgauaccaagaaauccagccugaacaucuccggguacaauuuuucucucggagcugccgugaaggcuggcgccugcaugcuggacgggggaaacaugcuugagacaauuaaagucagcccucagaccauggauggcauccugaaguccauucucaaagugaagaaaacgcugggcauguucaucagcgacacacccggggagcgcaacccuuaugaaaauauucuguacaagaucugucucucuggagauggcuggcccuauauugcguccagaaccagcaucacagggcgggccugggagaacaccguuguggaccuggaaucugauggaaagccucagaaagcuggcagcaauaacuccaauaagucucuucagagcgccggguuugcugccggacugaccuacucccaacucaugacacugaaagacgccaugcugcagcuugauccgaacgcuaagacguggauggacaucgagggcagacccgaggacccugucgaaauugcgcucuaccagcccagcucuggcugcuauauccacuucuuucgcgagccuaccgaucugaaacaguucaagcaagacgccaaguacucccaugggauugaugugacagaccuguuugcugcccagcccggacucaccagcgccguuaucgaagcucugccgcggaauauggugauuacaugucagggcucugaugacaucaaaaagcugcuggagucccaggggagaaaagauaucaagcucauugacaucgcccugagcaaaaccgauucccgcaaguaugaaaacgcggucugggaccaauacaaggaucugugccacaugcauacgggaguggucguggagaaaaagaaacggggcgggaaggaggaaauuacaccucacugugcucuuauggacugcaucauguucgaugccgccguuucuggcggacucaauacccuggugcugagagcuguccucccccgcgacaugguguuucggaccagcacaccuagaguugugcugugaggacuaguaauaaggaaacuguaugaaugucugugggcaggaagugaagagauccuucuguaaagguuuuuggaauuaugucugcugaauaauaaacuuuuuugaaauaauaaaucugguagaaaaaugagaucucaaaggcucuuuucagagccaccaaaaaaaaaaaaaaaaaaaaaaaaaaaaaaaaaaaaaaaaaaaaaaaaaaaaaaaaaaaaaaaaaaaaaaaaaaaaaaaaaaaaaaaaaaaaaaaaaaaaa

SEQ ID NO: 20272 - RNA, 2097 nt, Artificial Sequence
  mRNA product Design b-4 (hSL-A100) comprising derived and/or modified sequence from LASV(G3010-SLE-2013;Clade IV)__AIT17345__SP-HsALB_NP(2-569) (opt5)
aggagagucccgcagucggcguccagcggcucugcuuguucgugugugugucguugcaggccuuauucaagcuuaccaugaagugggugaccuucaucagccugcucuuucuguucuccucugccuacagcagcgccuccaaggagaucaaaucuuuccuguggacccagagccucagacgggaacuguccggcuacugcucuaacauuaaacuucaaguggucaaagacgcucaggcccugcuccacgggcuggauuuuagcgagguuuccaaugugcagcgccuuaugagaaaggaacggcgcgacgauaacgaccugaaaagacuccgggaucugaaucaggcggugaacaaucuggucgagcucaagucuacacaacaaaagagcauccugcgcgugggaacgcuuaccuccgacgaucugcucauucuggcugccgaccuugaaaaacuuaagagcaaaguuacaagaaccgagcggccccucucugccggcguguauauggggaaccuguccagccagcagcuggaucagcgcagagcucuccugucuaugaucggaauguccagcggcguccagggggcccgggcuggacgcgacggcgugguuagagugugggaugucaagaaugccgagcuucugaacaaucaguucggcacaaugccuucucucacccuggcgugucuuacaaaacaggggcaaguggaccugaacgaugugguccaggcccucaccgaccugggacugauuuacacggcuaaguauccgaauaccuccgaccucgaucggcugacacagagccaucccauccuuaacaugaucgacaccaagaaauccucucugaauauuagcggcuacaacuuuucccucggggccgcuguuaaggccggagcgugcaugcuggauggcgggaauaugcuugaaacaaucaaagugagcccucaaaccauggacggcauucugaagucuauccucaaagugaagaaagcccugggaauguucauuuccgagacgcccggcgaacgcaacccuuaugagaacauccuguacaagauuugucucagcggggauggauggcccuauaucgcuucuagaacaagcaucaccggccgggccugggagaauacagucguggaccuggaauccgaugggaagccucagaaagcuggaucuaacaauagcaacaagucccuucagagcgccggcuuuaccgccgggcugaccuacucucagcucaugacacugaaagacgcuaugcugcaacuugauccgaaugcgaagacguggauggacauugagggaagacccgaagauccuguugagguggcccucuaccagcccuccagcggcugcuauauccacuucuuucgcgaaccuaccgaccugaaacaguucaagcaggacgcuaaguacucucauggcauugaugucacagaccuguuugccgcccaacccgggcucaccuccgcugugaucgaugcccugccgcggaacaugguuauuacaugucagggaagcgacgauaucaaaaagcugcuggagucccagggcagaaaagacaucaagcucauugauaucgcgcugucuaaaaccgacagccgcaaguaugagaaugcugugugggaucaguacaaggaccugugccacaugcauacgggggucguggucgaaaagaagaaacggggaggcaaggaggaaauuacaccucacugugcccuuauggauugcaucauguucgacgccgcuguguccgggggccucaacaccucuguucugagagccgugcugccccgcgauauggucuuucggaccagcacaccuagagugguucucugaggacuaguaauaaggaaacuguaugaaugucugugggcaggaagugaagagauccuucuguaaagguuuuuggaauuaugucugcugaauaauaaacuuuuuugaaauaauaaaucugguagaaaaaugagaucucaaaggcucuuuucagagccaccaaaaaaaaaaaaaaaaaaaaaaaaaaaaaaaaaaaaaaaaaaaaaaaaaaaaaaaaaaaaaaaaaaaaaaaaaaaaaaaaaaaaaaaaaaaaaaaaaaaaa

SEQ ID NO: 20273 - RNA, 2097 nt, Artificial Sequence
  mRNA product Design b-4 (hSL-A100) comprising derived and/or modified sequence from LASV(G502-SLE-2009;Clade IV)__AIT17127__SP-HsALB_NP(2-569) (opt5)
aggagagucccgcagucggcguccagcggcucugcuuguucgugugugugucguugcaggccuuauucaagcuuaccaugaagugggugaccuucaucagccugcucuuucuguucuccucugccuacagcagcgccuccaaggagaucaaaucuuuccuguggacccagagccucagacgggaacuguccggcuacugcucuaacauuaagcugcaaguggucaaagacgcucaggcccugcuccacgggcuggauuuuagcgagguuuccaaugugcagcgccuuaugagaaaggaacggcgcgacgauaacgaccugaaaagacuccgggaucugaaucaggcggugaacaaucuggucgagcucaagucuacacaacaaaagagcauccugcgcgugggaacgcuuaccuccgacgaucugcucauucuggcugccgaccuugaaaaacuuaagagcaaaguuaucagaacagagcggccccucucugccggcguguauauggggaaccuguccagccagcagcuggaucagcgcagagcucuccugucuaugauuggaauguccggcgggaaucagggaguccgggccggcaaggacggcgugguucgcgugugggaugucaaaaacgcugagcuucugaauaaccaguucgggaccaugccuagccucacacuggccugucuuaccaagcagggacaaguggaccugaaugaugcggugcaggcccucacagaccugggccugaucuacaccgcuaaguauccgaacacgucugaccucgauagacugacccagucccaucccauccuuaauaugauugacaccaaaaagagcucccugaacaucucuggguacaauuuuagccucggagccgcugucaaagccggcgcgugcaugcuggaugggggaaacaugcuugaaacaauuaagguuuccccucaaacaauggacggcauccugaaaagcauucucaaggugaaaaaggcccugggcauguucaucucugauacccccggggagcggaacccuuaugaaaauauucuguacaagaucugucucuccggagacggcuggcccuauaucgcuagccgcacgucuauuacagggagagccugggagaacaccguggucgaucuggagagcgacggaaaaccucagaaggcuggcuccaauaacucuaauaaaagccuucaguccgccggguuuacagccggacugaccuacagccagcucaugacccugaaggaugcuaugcugcaacuugacccgaacacaaaaacguggauggauaucgaaggccggcccgaggacccuguggaaauugcgcucuaccagcccucuuccggcugcuauauccacuucuuuagagagccuaccgaccugaagcaguucaagcaggaugccaaauacagccaugggauugacguuacagaucuguuugcugcccaacccggacucaccucugccgugaucgacgcucugccgcgcaauauggucaucacaugucagggcuccgaugacauucggaaacuucuggaaagccaggggagaaaggauaucaagcucauugacaucgcccugaacaaaaccgauucccgcaaguaugagaaugcggugugggaccaguacaaggaucugugccacaugcauacgggaguuguggucgagaaaaagaaacggggcgggaaggaagagauuacaccucacugugcucuuauggacugcaucauguucgaugccgccgugucuggcggacucaacaccagcguccugagagcugugcugccccgcgacaugguuuuucggaccuccacaccuagagugguccucugaggacuaguaauaaggaaacuguaugaaugucugugggcaggaagugaagagauccuucuguaaagguuuuuggaauuaugucugcugaauaauaaacuuuuuugaaauaauaaaucugguagaaaaaugagaucucaaaggcucuuuucagagccaccaaaaaaaaaaaaaaaaaaaaaaaaaaaaaaaaaaaaaaaaaaaaaaaaaaaaaaaaaaaaaaaaaaaaaaaaaaaaaaaaaaaaaaaaaaaaaaaaaaaaa

SEQ ID NO: 20274 - RNA, 2097 nt, Artificial Sequence
  mRNA product Design b-4 (hSL-A100) comprising derived and/or modified sequence from LASV(G733-SLE-2010;Clade IV)__AIT17155__SP-HsALB_NP(2-569) (opt5)
aggagagucccgcagucggcguccagcggcucugcuuguucgugugugugucguugcaggccuuauucaagcuuaccaugaagugggugaccuucaucagccugcucuuucuguucuccucugccuacagcagcgccuccaaggagaucaaaucuuuccuguggacccagagccucagacgggaacuguccggcuacugcucuaacauuaagcugcaaguggucaaagacgcucaggcccugcuccacgggcuggauuuuagcgagguuuccaaugugcagcgccuuaugagaaaggaacggcgcgacgauaacgaccugaaaagacuccgggaucugaaucaggcggugaacaaucuggucgagcucaagucuacacaacaaaagagcgugcugcgcguuggaacgcuuaccuccgacgaacugcucgugcuggcugccgaucuugagaaacuuaagagcaaagucaucagaacagagcggccccucucugccggcguguauauggggaaccuguccagccagcagcuggaccagcgcagagcucuccugucuaugauuggaauguccggcgggaaucagggagcccggaccggccgcgauggcguugugagagucugggacgugaagaacgcugaacuucugaauaaccaguucgggacaaugccuagccucacccuggccugucuuacaaaacagggacaaguggaucugaaugacgcgguccaggcccucaccgaucugggccugaucuacacggcuaaguauccgaacaccucugaccucgaccggcugacacagucccaucccauucuuaauaugaucgauaccaagaaaagcucccugaacaucucuggguacaauuuuagccucggagccgcuguuaaggccggcgcgugcaugcuggacgggggaaacaugcuugagacaauuaaaguguccccucaaaccauggauggcauccucaagagcauucugaaagugaagaaagcccugggcauguucaucucugacacgcccggggaacgcaacccuuaugagaauauucuguacaagaucugucucuccggagauggcuggcccuauauugcuagcagaacaucuaucaccgggcgggccugggagaacacagucguggaccuggaaagcgauggaaagccucagaaagcuggcuccaauaacucuaauaagagccuucaguccgccggguuuaccgccggacugaccuacagccagcucaugacacugaaagacgcuaugcugcaacuugauccgaacgcgaagacguggauggacaucgagggcagacccgaagauccuguugagauugcccucuaccagcccucuuccggcugcuauauccacuucuuucgcgaaccuaccgaccugaaacaguucaagcaggacgcuaaguacagccaugggauugaugugacagaccuguuugccgcccaacccggacucaccucugcugucaucgaugcccugccgcggaauauggugauuacaugucagggcuccgacgauaucagaaaacuucuggagagccaggggcgcaaggacaucaaacucauugauaucgcgcuguccaagauugacucucggaaauaugagaacgcuguuugggaucaguacaaggaccugugccacaugcauaccggaguggucguggaaaagaaaaagagaggcgggaaagaggaaaucacgccucacugugcccuuauggauugcauuauguucgacgccgcugucagcggcggacucaauucccuggugcugcgcgccguucucccccgggauaugguguuuagaacaucuaccccucgcgucgugcugugaggacuaguaauaaggaaacuguaugaaugucugugggcaggaagugaagagauccuucuguaaagguuuuuggaauuaugucugcugaauaauaaacuuuuuugaaauaauaaaucugguagaaaaaugagaucucaaaggcucuuuucagagccaccaaaaaaaaaaaaaaaaaaaaaaaaaaaaaaaaaaaaaaaaaaaaaaaaaaaaaaaaaaaaaaaaaaaaaaaaaaaaaaaaaaaaaaaaaaaaaaaaaaaaa

SEQ ID NO: 20275 - RNA, 2097 nt, Artificial Sequence
  mRNA product Design b-4 (hSL-A100) comprising derived and/or modified sequence from MOPV/LASV reassortant(IGS-1;Clade IV)__AFY05578__SP-HsALB_NP(2-569) (opt5)
aggagagucccgcagucggcguccagcggcucugcuuguucgugugugugucguugcaggccuuauucaagcuuaccaugaagugggugaccuucaucagccugcucuuucuguucuccucugccuacagcagcgccuccaaggagaucaaaucuuuccuguggacccagagccucagacgggaacuguccggcuacugcucuaacauuaaacuucaaguggucaaggacgcucaggcccugcuccacgggcuggauuuuagcgagguuuccaaugugcagcgccuuaugagaaaggaacggcgcgacgauaacgaccugaaaagacuccgggaucugaaucaggcggugaacaaucuggucgagcucaagucuacacaacaaaagagcauccugcgcgugggaacgcuuaccuccgacgaucugcucauucuggcugccgaccuugaaaaacugagaagcaagguuauccggacagagcgcccccucucugccggcguguauauggggaaccuguccagccagcagcuggaucagagacgggcucuccugaauaugauuggaaugucuggcgggaaccagggagcccgcgcuggcagagacggcgucgugcggguuugggaugugaaaaaugccgagcuucuguccaaccaguucgggaccaugccuagccucacacuggcgugucuuaccaagcagggacaagucgaccugaaugaugccgugcaggcucucacagaccugggccugaucuacaccgccaaauauccgaacacgucugaccucgaucgccugacccagucccaucccauccuuaauaugauugacacaaagaaaagcucccugaacaucucuggguacaauuuuagccucggagcugccgugaaggcgggcgccugcaugcuggaugggggaaacaugcuugaaaccauuaaggucuccccucaaacaauggacggcauccugaaaagcauucucaagguuaaaaaggcucugggcauguucaucucugauacccccggggagagaaacccuuaugaaaauauucuguacaaaaucugucucuccggagacggcuggcccuauaucgccagccggacgucuauuacagggagagcuugggagaacaccgugguggaucuggagagcgacggaaagccucagaaggccgauuccaauaacucuagcaaaucccuucagagcgccggcuuuacagcugggcugaccuacucucagcucaugacccugaaggacgcgaugcugcaacuugauccgaaugccaaaacauggauggacaucgaaggacgccccgaggacccugucgaaauugcucucuaccagcccuccagcggcugcuauauccacuucuuucgggagccuacggaucugaagcaguucaaacaggacgccaaguacucucauggcauugaugugaccgaccuguuugccacacaacccgggcucaccuccgcuguuaucgaugcccugccgagaaacauggugaucacaugucagggaagcgacgauauucgcaaacuucuggaaucccagggccggaaggacaucaagcucauugauaucgaccugucuaaaaccgauagcagaaaguaugagaaugcggucugggaccaguacaaagaucugugccacaugcauacgggggugguuguggagaagaagaaacgcggaggcaaggaagagauuacaccucacugugcucuuauggacugcaucauguucgacgccgccgucuccgggggccucaacaccucugugcugcgggcuguccugcccagagauaugguguuucgcaccagcacaccucggguugugcucugaggacuaguaauaaggaaacuguaugaaugucugugggcaggaagugaagagauccuucuguaaagguuuuuggaauuaugucugcugaauaauaaacuuuuuugaaauaauaaaucugguagaaaaaugagaucucaaaggcucuuuucagagccaccaaaaaaaaaaaaaaaaaaaaaaaaaaaaaaaaaaaaaaaaaaaaaaaaaaaaaaaaaaaaaaaaaaaaaaaaaaaaaaaaaaaaaaaaaaaaaaaaaaaaa

SEQ ID NO: 20276 - RNA, 2097 nt, Artificial Sequence
  mRNA product Design b-4 (hSL-A100) comprising derived and/or modified sequence from LASV(LM765-SLE-2012;Clade IV)__AIT17815__SP-HsALB_NP(2-569) (opt5)
aggagagucccgcagucggcguccagcggcucugcuuguucgugugugugucguugcaggccuuauucaagcuuaccaugaagugggugaccuucaucagccugcucuuucuguucuccucugccuacagcagcgccuccaaggagaucaaaucuuuccuguggacccagagccucagacgggaacuguccggcuacugcucuaacauuaagcugcaaguggucaaagacgcucaggcccugcuccacgggcuggauuuuagcgagguuuccaaugugcagcgccuuaugagaaaggaacggcgcgacgauaacgaccugaaaagacuccgggaucugaaucaggcggugaacaaucuggucgagcucaagucuacacaacaaaagagcauccugcgcgugggaacgcuuaccuccgacgaucugcucauucuggcugccgaccuugaaaaacuuaagagcaaaguuacaagaaccgagcggccccucucugccggcguguauauggggaaccuguccagccagcagcuggaucagcgcagagcucuccuggacaugaucggaaugucuggcuccaaucagggggcccgggcuggacgcgauggcgucgugagaguuugggacgugaagaacgccgagcuucugaauaaccaguucggcacaaugccuagccucacccuggcgugucuuacaaaacaggggcaagucgaucugaaugacgccgugcaggcucucaccgaccugggacugauuuacacggccaaguauccgaacaccucugaucucgaccggcugacacagucccaucccauccuuaauaugaucgauaccaagaaaagcucccugaacauuucuggcuacaauuuuagccucggggcugccgugaaggcgggagccugcaugcuggacggcgggaacaugcuugaaacaaucaaagucuccccucaaaccauggauggcauucucaagagcauccugaaaguuaagaaagcucugggaauguucauuucugacgcccccggcgagcgcaacccuuaugaaaauauccuguacaagauuugucucuccggggauggauggcccuauaucgcuagcagaacgucuaucacaggccgggccugggagaacaccgugguggaccuggagagcgaugggaagccucagaaagccggauccaauggcucuaacaagagccuucaguccgcuggguuuacagcgggacugaccuacagccagcucaugacccugaaagacgccaugcugcaacuugauccgaaugcuaagacauggauggacauugaaggcagacccgaggacccugucgaaaucgcccucuaccagcccucuuccggcugcuauauucacuucuuucgcgagccuacggaucugaaacaguucaagcaggacgccaaguacagccaugggaucgaugugaccgaccuguuugcugcccaacccggacucacaucugcgguuauugaugcucugccgcggaacauggugaucaccugucagggcuccgacgauaucagaaaacuuuucgaaagccaggggcgcaaggacauuaaacugaucgauauugcccucuccaagacagacucucggaaauaugagaaugccgucugggaucaguacaaggaccugugccacaugcauaccggaaucgugguugagaagaaaaagagaggcgggaaagaagagauuacgccucacugugcucugauggauugcaucauguuugacgccgcugugagcggcggacuuaacacauccguccuccgcgccgugcugccccgggacauggucuucagaaccucuaccccucgcgugguucugugaggacuaguaauaaggaaacuguaugaaugucugugggcaggaagugaagagauccuucuguaaagguuuuuggaauuaugucugcugaauaauaaacuuuuuugaaauaauaaaucugguagaaaaaugagaucucaaaggcucuuuucagagccaccaaaaaaaaaaaaaaaaaaaaaaaaaaaaaaaaaaaaaaaaaaaaaaaaaaaaaaaaaaaaaaaaaaaaaaaaaaaaaaaaaaaaaaaaaaaaaaaaaaaaa

SEQ ID NO: 20277 - RNA, 2097 nt, Artificial Sequence
  mRNA product Design b-4 (hSL-A100) comprising derived and/or modified sequence from LASV(LM776-SLE-2012;Clade IV)__AIT17825__SP-HsALB_NP(2-569) (opt5)
aggagagucccgcagucggcguccagcggcucugcuuguucgugugugugucguugcaggccuuauucaagcuuaccaugaagugggugaccuucaucagccugcucuuucuguucuccucugccuacagcagcgccuccaaggagaucaaaucuuuccuguggacccagagccucagacgggaacuguccucuuacugcagcaacauuaaacuucaaguggucaaggacgcucaggcccugcuccacggccuggauuuuuccgagguuucuaaugugcagcgccuuaugagaaaggaacggcgcgacgauaacgaccugaaaagacuccgggaucugaaucaggcggugaacaaucuggucgagcucaagagcacacaacagaaguccauccugcgcguggggacgcuuaccagcgacgaucugcucauucuggcugccgaccuugaaaaacugaagucuaaaguuacaagaaccgagcggccccucuccgccggaguguauaugggcaaccugagcucucagcagcuggaucaacgcagagcucuccuguccaugaucgggaugagcggaucuaaucagggcgcccgggcugggcgcgacggagucgugagaguuugggaugugaagaacgccgagcuucugaauaaccaguucggcacaaugccuucccucacccuggcgugucuuacaaaacagggccaagucgaccugaaugaugccgugcaggcucucaccgaccuggggcugauuuacacggccaaguauccgaacaccagcgaccucgaucggcugacacagucccaucccauccuuaauaugaucgacaccaagaaaucuagccugaacauuuccggauacaauuuuagccucggcgcugccgugaaggcgggggccugcaugcuggauggaggcaacaugcuugaaacaaucaaagucucuccucaaaccauggacgggauucugaaguccauccucaaaguuaagaaagcucugggaauguucauuagcgauacgcccggcgagcgcaacccuuaugaaaauauccuguacaagauuugucucucuggcgacggguggcccuauaucgccagcagaacauccaucaccggacgggcuugggagaacacagugguggaucuggagucugacggcaagccucagaaagccgggagcaauaacuccaauaagagccuucagucugccggauuuaccgcuggccugaccuacucccagcucaugacacugaaagaugcgaugcugcaacuugacccgaacgccaagacguggauggauauugaagggagacccgaggacccugucgaaguggcucucuaccagcccagcucuggaugcuauauccacuucuuucgcgagccuaccgaccugaaacaguucaagcaggaugccaaguacucccauggcauugacguuacagaucuguuugccgcucaacccggccucaccagcgccgugaucgacgcgcugccgcggaauauggucauuacaugucagggguccgaugacaucagaaaacuucuggaaucucagggacgcaaggauaucaaacucauugacaucgcucugagcaagaccgauucccggaaauaugagaacgccgugugggaccaguacaaggaucugugccacaugcauacgggcguuguggucgagaagaaaaagagagggggaaaagaagagauuacaccucacugugcccuuauggacugcaucauguucgaugcugccgugucuggcgggcucaauaccagcguccugcgcgcugugcugccccgggacaugguuuuuagaaccuccacaccucgcgugguccucugaggacuaguaauaaggaaacuguaugaaugucugugggcaggaagugaagagauccuucuguaaagguuuuuggaauuaugucugcugaauaauaaacuuuuuugaaauaauaaaucugguagaaaaaugagaucucaaaggcucuuuucagagccaccaaaaaaaaaaaaaaaaaaaaaaaaaaaaaaaaaaaaaaaaaaaaaaaaaaaaaaaaaaaaaaaaaaaaaaaaaaaaaaaaaaaaaaaaaaaaaaaaaaaaa

SEQ ID NO: 20278 - RNA, 2097 nt, Artificial Sequence
  mRNA product Design b-4 (hSL-A100) comprising derived and/or modified sequence from LASV(Mad39;Clade IV)__ANH09723__SP-HsALB_NP(2-569) (opt5)
aggagagucccgcagucggcguccagcggcucugcuuguucgugugugugucguugcaggccuuauucaagcuuaccaugaagugggugaccuucaucagccugcucuuucuguucuccucugccuacagcagcgccuccaaggagaucaaaucuuuccuguggacccagagccucagacgggaacuguccggcuacugcucuaacauuaagcugcaaguggucaaagacgcucaggcccugcuccacgggcuggauuuuagcgagguuuccaaugugcagcgccuuaugagaaagcagcggcgcgacgauaacgaccugaaaagacuccgggaucugaaucaagcggugaacaaucuggucgaacucaagucuacacagcaaaagagcgugcugcgcguuggaacgcuuaccuccgacgaucugcucacacuggcugccgaccuugagaaacuuaagagcaaagugaccagaacagaacggccccucaccgccggcgucuauauggggaaccugucuucccagcagcuggaucagcgcagagcucuccugaauaugaucggaaugagcggcgggaaccagggagcccggacaggccgcgacggcgugguuagagugugggaugucaagaaugcugagcuucugaacaaucaguucgggaccaugccuucucucacgcuggccugucuuaccaaacaaggacagguggaccugaacgaugugguccaggcgcucacagaccugggccugauuuacaccgccaaguauccgaauacauccgaccucgaucggcugacccaaagccaucccauccuuaacaugauugacacgaauaagucuucccugaacaucagcggguacaacuuuucccucggagcugccguuaaagcuggcgccugcaugcuggaugggggaaauaugcuugagacaaucaaggugucuccucagaccauggacggcauucugaaaagcauccucaaggugaaaaagucccugggcauguucauuagcgauacacccggggaacgcaacccuuaugagaauauccuguacaaaauuugucucucuggagacggcuggcccuauaucgcguccagaaccagcauuaccgggcgggccugggaaaacacagucguggaucuggagucuggaggcaagccucagaaggcugggagcaauaacuccaauaaaucucuucagagcgccggauuugcugccggccugacguacucccaacucaugacccugaaggacgccaugcugcagcuugauccgaacgcuaaaacauggauggacaucgagggcagacccgaagauccuguugagaucgcgcucuaccagcccauuagcgggugcuauauccacuucuuucgcgaaccuaccgaccugaagcaguucaaacaagacgccaaguacucucauggaauugaugugacagaccuguuugcugcccagcccggccucaccuccgccgucaucgaggcucugccgcggaauauggugauuacgugucaggggagcgaugacaucagaaaacuuuucgaaucucagggacgcaaggauaucaagcugauugacaucgcccucuccaaaacagauagccggaaguaugagaacgcgguuugggaccaauacaaagaucugugccacaugcauaccggcguggucguggagaagaagaaaaagggcgggaaagaagagauuaccccucacugugcucugauggacugcaucauguuugaugccgccgucuccggaggccuuaauacacucgugcugagagcuguucugccccgcgacaugguguuccggaccucuacaccuaaggucgugcucugaggacuaguaauaaggaaacuguaugaaugucugugggcaggaagugaagagauccuucuguaaagguuuuuggaauuaugucugcugaauaauaaacuuuuuugaaauaauaaaucugguagaaaaaugagaucucaaaggcucuuuucagagccaccaaaaaaaaaaaaaaaaaaaaaaaaaaaaaaaaaaaaaaaaaaaaaaaaaaaaaaaaaaaaaaaaaaaaaaaaaaaaaaaaaaaaaaaaaaaaaaaaaaaaa

SEQ ID NO: 20279 - RNA, 2097 nt, Artificial Sequence
  mRNA product Design b-4 (hSL-A100) comprising derived and/or modified sequence from LASV(Z0947-SLE-2011;Clade IV)__AIT17841__SP-HsALB_NP(2-569) (opt5)
aggagagucccgcagucggcguccagcggcucugcuuguucgugugugugucguugcaggccuuauucaagcuuaccaugaagugggugaccuucaucagccugcucuuucuguucuccucugccuacagcagcgccuccaaggagaucaaaucuuuccuguggacccagagccucagacgggaacuguccggcuacugcucuaacauuaagcugcaaguggucaaagacgcucaggcccugcuccacgggcuggauuuuagcgagguuuccaaugugcagcgccuuaugagaaaggaacggcgcgacgauaacgaccugaaaagacuccgggaucugaaucaggcggugaacaaucuggucgagcucaagucuacacaacaaaagagcauccugcgcgugggaacgcuuaccuccgacgaucugcucauucuggcugccgaccuugaaaaacuuaagagcaaaguuacaagaaccgagcggccccucucugccggcguguauauggggaaccuguccagccagcagcuggaucagcgcagagcucuccugaauaugaucggaaugucuggcuccaaccagggggcccggacaggacgcgacggcgucgugagaguuugggaugugaagaaugcugagcuucugaacaaucaguucggcaccaugccuagccucacacuggccugucuuaccaaacaggggcaagucgaccugaacgaugcggugcaggcccucacggaccugggacugauuuacaccgcuaaguauccgaauacaucugaccucgaucggcugacccagucccaucccauccuuaacaugaucgacacaaagaaaagcucccugaauauuucuggcuacaacuuuagccucggggccgcugugaaggccggagcgugcaugcuggauggcgggaacaugcuugaaaccaucaaagucuccccucaaacgauggacggcauucucaagagcauccugaaaguuaagaaagcccugggaauguucauuucugaugcucccggcgagcgcaauccuuaugaaaacauccuguacaagauuugucucuccggggacggauggcccuauaucgccagcagaacaucuaucaccggccgggcuugggagaauacagugguggaucuggagagcgacgggaagccucagaaagccggauccaacggcucuaauaagagccuucaguccgccggguuuaccgcuggacugaccuacagccagcucaugacacugaaagaugcgaugcugcaacuugacccgaacgccaagacguggauggauauugaaggcagacccgaggacccugucgaaaucgcucucuaccagcccucuuccggcugcuauauucacuucuuucgcgagccuaccgaccugaaacaguucaagcaggaugccaaguacagccaugggaucgacgugacagaucuguuugccgcucaacccggacucaccucugccguuauugacgcgcugccgcggaauauggugaucacaugucagggcuccgaugacaucagaaaacuuuucgaaagccaggggcgcaaggauauuaaacugaucgacauugcucucuccaagaccgauucucggaaauaugagaacgccgucugggaccaguacaaggaucugugccacaugcauacgggaaucgugguugagaagaaaaagagaggcgggaaagaagagauuacaccucacugugcccugauggacugcaucauguuugaugcugccgugagcggcggacuuaauaccuccguccuccgcgcugugcugccccgggacauggucuucagaaccucuacaccucgcgugguucugugaggacuaguaauaaggaaacuguaugaaugucugugggcaggaagugaagagauccuucuguaaagguuuuuggaauuaugucugcugaauaauaaacuuuuuugaaauaauaaaucugguagaaaaaugagaucucaaaggcucuuuucagagccaccaaaaaaaaaaaaaaaaaaaaaaaaaaaaaaaaaaaaaaaaaaaaaaaaaaaaaaaaaaaaaaaaaaaaaaaaaaaaaaaaaaaaaaaaaaaaaaaaaaaaa

SEQ ID NO: 20280 - RNA, 2073 nt, Artificial Sequence
  mRNA product Design b-4 (A100) comprising derived and/or modified sequence from LASV(Josiah;Clade IV)__NP_694869__SP-HsALB_NP(2-569) (opt1)
aggagagucccgcagucggcguccagcggcucugcuuguucgugugugugucguugcaggccuuauucaagcuuaccaugaagugggugaccuucaucagccugcucuuccuguucuccagcgccuacuccagcgccuccaaggagaucaagagcuuccuguggacccagucccuccgccgggagcugagcggcuacugcuccaacaucaagcuccagguggucaaggacgcccaggcgcugcugcacgggcuggacuucagcgagguguccaacgugcagcgccucaugcggaaggagcgccgggacgacaacgaccugaagcgccugcgggaccucaaccaggccgucaacaaccugguggagcucaagagcacccagcagaaguccauccugcgcgugggcacccugaccagcgacgaccugcucauccuggccgccgaccuggagaagcucaaguccaaggucauccggaccgagcgcccccugagcgccgggguguacaugggcaaccuguccagccagcagcucgaccagcggcgcgcgcugcugaacaugaucgggauguccggcggcaaccagggggcccgggccggccgcgacggggugguccgggugugggacgugaagaacgccgagcuccugaacaaccaguucggcaccaugccgagccugacgcucgcgugccugaccaagcaggggcaggucgaccugaacgacgccgugcaggcccucaccgaccugggccugaucuacaccgccaaguaccccaacacguccgaccucgaccgccugacccagagccaccccauccugaacaugaucgacaccaagaaguccagccucaacaucagcggcuacaacuucucccugggggccgcggugaaggccggcgccugcaugcuggacgggggcaacaugcucgagaccaucaaggucagcccccagacgauggacggcauccugaaguccauccugaaggugaagaaggcccucgggauguucaucagcgacaccccgggcgagcggaaccccuacgagaacauccuguacaagaucugccuguccggggacggcuggcccuacaucgccagccgcaccuccaucaccgggcgggcgugggagaacacgguggucgaccucgagagcgacggcaagccccagaaggccgacuccaacaacagcuccaagagccugcaguccgccggcuucaccgccgggcugaccuacagccagcucaugacccugaaggacgccaugcugcagcuggacccgaacgcgaagacguggauggacaucgagggccgccccgaggaccccguggagaucgcccucuaccagcccuccagcgggugcuacauccacuucuuccgggagccgaccgaccugaagcaguucaagcaggacgccaaguacucccacggcaucgacgugaccgaccuguucgccacccagcccgggcucacgagcgccgucaucgacgcgcugccccgcaacauggugaucacgugccagggcuccgacgacauccgcaagcugcucgagagccagggccggaaggacaucaagcugaucgacaucgcccugagcaagaccgacucccgcaaguacgagaacgccgugugggaccaguacaaggaccucugccacaugcacaccggggucguggucgagaagaagaagcggggcgggaaggaggagaucaccccgcacugcgcccugauggacugcaucauguucgacgcggccgugagcggcgggcugaacaccuccgugcuccgcgccguccugccccgggacaugguguuccgcaccagcacgccccgggugguccugugaggacuaguaauaaggaaacuguaugaaugucugugggcaggaagugaagagauccuucuguaaagguuuuuggaauuaugucugcugaauaauaaacuuuuuugaaauaauaaaucugguagaaaaaugagaucuaaaaaaaaaaaaaaaaaaaaaaaaaaaaaaaaaaaaaaaaaaaaaaaaaaaaaaaaaaaaaaaaaaaaaaaaaaaaaaaaaaaaaaaaaaaaaaaaaaaa

SEQ ID NO: 20281 - RNA, 2073 nt, Artificial Sequence
  mRNA product Design b-4 (A100) comprising derived and/or modified sequence from LASV(LP;Clade I)__AAF86702__SP-HsALB_NP(2-569) (opt1)
aggagagucccgcagucggcguccagcggcucugcuuguucgugugugugucguugcaggccuuauucaagcuuaccaugaagugggugaccuucaucagccugcucuuccuguucuccagcgccuacuccagcaacuccaaggagaucaagagcuuccuguggacccagucccuccgccgggagcugagcggcuacugcuccaacaucaagcuccagguggucaaggacgcccaggcccugcugcacgggcuggacuucagcgagguguccaacgugcagcgccucaugcggaagcagaagcgcgacgacgcggaccugaagcggcugcgcgaccucaaccaggccgucaacaaccugguggagcucaagagcacccagcagaagaacgugcugcgggucggcacgcuguccagcgacgaccugaucacccucgccgccgaccuggagaagcugaaguccaaggugauccgcaccgagcggccccucagcuccgggguguacaugggcaaccugagcucccagcagcuggaccagcgccgggcccuccugagcaugaucgggauguccggcggcccgcaggggaaccgcaccggcggggacggcgucgugcgggugugggacgucaagaacgcggagcugcucaacaaccaguucgggacgaugcccagccugacccuggccugccucaccaagcagggccagguggaccugaacgacgccgugcaggcccugaccgaccucggccugaucuacacggcgaaguaccccaacuccagcgaccuggacaugcucacccagagccaccccauccuggggauggucgacaccaagaaguccagccugaacaucuccggcuacaacuucagccucggggccgccgugaaggccggcgccugcaugcuggacggcgggaacaugcuggagaccaucaagguguccccgcagacgauggacggcauccucaagagcauccugaaggucaagcgcucccuggggauguucaucagcgacacccccggcgagcggaaccccuacgagaacauccucuacaagaucugccuguccggggagggcuggcccuacaucgcgagccgcaccuccaucaccggccgggccugggagaacacgcugguggaccucgagagcgacaacaagccgcccaagcugaacuccgccgggagcaacaagucccugcaggccgccggccucaacgcggggcugaccuacagccagcugaugacccugaaggacugcaugcuccagcuggaccccuccagcaagaccuggaucgacaucgagggccgccccgaggacccgguggagaucgcccuguuccagcccuccagcgggugcuacauccacuucuuccgggagcccacggaccucaagcaguucaagcaggacgccaaguacagccacggcaucgacgucaccgaccuguucuccacccagcccggccugaccagcgccgugaucgaggcccucccgcgcaacauggugcugacgugccagggguccgacgacaucaagaagcugcucgagagccagggccggcgcgacaucaagcugaucgacaucucccugagcaaggcggacucccgcaaguucgagaacgccgucugggaccaguacaaggaccucugccacaugcacaccgggguggucguggagaagaagaagcggggcgggaaggaggagaucacgccccacugcgcccugcuggacugcaucauguucgacgccgccaccaccggcagccucaacaucaccacccugcgcgcggugcugccccgggacauggucuuccgcaccuccacgcccaagguggugcucugaggacuaguaauaaggaaacuguaugaaugucugugggcaggaagugaagagauccuucuguaaagguuuuuggaauuaugucugcugaauaauaaacuuuuuugaaauaauaaaucugguagaaaaaugagaucuaaaaaaaaaaaaaaaaaaaaaaaaaaaaaaaaaaaaaaaaaaaaaaaaaaaaaaaaaaaaaaaaaaaaaaaaaaaaaaaaaaaaaaaaaaaaaaaaaaaa

SEQ ID NO: 20282 - RNA, 2073 nt, Artificial Sequence
  mRNA product Design b-4 (A100) comprising derived and/or modified sequence from LASV(803213;Clade II)__AAF86704__SP-HsALB_NP(2-569) (opt1)
aggagagucccgcagucggcguccagcggcucugcuuguucgugugugugucguugcaggccuuauucaagcuuaccaugaagugggugaccuucaucagccugcucuuccuguucuccagcgccuacuccagcgccuccaaggaggugaaguccuuccuguggacccagagccuccgccgggagcugagcggcuacugcuccaacaucaagcugcaggucgugaaggacgcccaggcgcuccugcacgggcuggacuucagcgaggugaacaacguccagcgccucaugcggaagcagaagcgcgacgacggcgaccugaagcggcugcgcgaccucaaccaggccgugaacaaccugguggagcugaaguccacccagcagaaguccauccuccgggucgggacgcugaccagcgacgaccugcucacccuggccgccgaccuggagaagcucaagagcaaggugauccgcaccgagcggccccuguccagcggcguguacauggggaaccuguccacgcagcagcucgagcagcgccgggcccugcugaacaugaucggcauggucggcggggcgcagggcacccagccggggcgcgacggcguggugcgggucugggacgugaagaaccccgaccuccugaacaaccaguucgggaccaugcccagccugacccucgccugccugacgaagcagggccagguggaccugaacgacgccguccucgcccugaccgaccugggccucaucuacaccgcgaaguaccccaacuccagcgaccuggaccgccugucccagagccacccgauccucaacaugguggacaccaagaaguccagccugaacaucagcggguacaacuucucccugggcgccgccgugaaggccggggccugcaugcucgacggcggcaacaugcuggagacgaucaaggucacgccccagaccauggacgggauccucaagagcauccugaaggugaagcggucccugggcauguucgugagcgacacccccggggagcgcaaccccuacgagaacauccuguacaagaucugccucuccggcgacggguggccguacaucgcgagccggaccuccaucgucggccgcgccugggagaacaccaccguggaccuggagagcgacggcaagccccagaagguggggaccgccggcuccaacaagagccugcaguccgccggguuccccacgggccucaccuacagccagcugaugacccugaaggacuccaugaugcagcuggaccccagcgccaagaccuggaucgacaucgaggggcggccggaggaccccgucgagaucgcgcucuaccagcccauguccggcugcuacauccacuucuuccgcgagcccacggaccugaagcaguucaagcaggacgccaaguacagccacggcaucgacguggccgaccuguucccggcccagcccgggcucaccuccgccgucaucgaggcgcugccccggaacauggugcugaccugccagggcagcgacgacaucaagaagcuccuggacucccaggggcgccgcgacaucaagcugaucgacaucagccucagcaagguggacucccggaaguucgagaacgccgucugggaccagugcaaggaccugugccacaugcacaccggcgugguggucgagaagaagaagcgcgggggcaaggaggagaucacgccccacugcgcccugauggacugcaucauguucgacgccgccgugagcggcgggcucaacaucccggugcugcgggcgguccugccccgcgacaugguguuccggaccuccagccccaaggugguccucugaggacuaguaauaaggaaacuguaugaaugucugugggcaggaagugaagagauccuucuguaaagguuuuuggaauuaugucugcugaauaauaaacuuuuuugaaauaauaaaucugguagaaaaaugagaucuaaaaaaaaaaaaaaaaaaaaaaaaaaaaaaaaaaaaaaaaaaaaaaaaaaaaaaaaaaaaaaaaaaaaaaaaaaaaaaaaaaaaaaaaaaaaaaaaaaaa

SEQ ID NO: 20283 - RNA, 2076 nt, Artificial Sequence
  mRNA product Design b-4 (A100) comprising derived and/or modified sequence from LASV(GA391;Clade III)__CAA36646__SP-HsALB_NP(2-570) (opt1)
aggagagucccgcagucggcguccagcggcucugcuuguucgugugugugucguugcaggccuuauucaagcuuaccaugaagugggugaccuucaucagccugcucuuccuguucuccagcgccuacuccagcgccuccaaggaggugcgcagcuuccuguggacccagucccuccggcgcgagcugagcggcuacugcuccaacaucaagcugcaggucgugaaggacgcccaggcgcuccugcacgggcuggacuucagcgagguguccaacguccagcggcucaugcgcaagcagaagcgggacgacggcgaccugaagcgccugcgggaccucaaccaggccgugaacaaccugguggagcucaagagcacccagcagaaguccguccugcgcguggggacccugagcuccgacgaccugcucauccuggccgccgaccuggagaagcucaagagcaaggugacccggaccgagcgcccccuguccagcggcgucuacauggggaaccuguccagccagcagcucgaccagcggcgcgcccugcugaacaugaucggcaugaccggcguguccgggggcgggaagggcgcgagcgacgggaucgugcgggucugggacgugaagaacgccgagcuccugaacaaccaguucggcacgaugccgucccugacccucgccugccugaccaagcagggccagguggaccugaacgacgccguccaggcgcucaccgaccuggggcugaucuacacggccaaguaccccaacagcagcgaccucgaccgccugucccagagccaccccauccugaacaugaucgacaccaagaaguccagccucaacaucuccggcuacaacuucagccugggggccgccgugaaggccggcgcgugcaugcuggacggcgggaacaugcucgagaccaucaaggugagcccccagaccauggacggcauccucaaguccauccugaaggucaagaagucccuggggauguucgugagcgacacgccgggcgagcggaaccccuacgagaacauccuguacaagaucugccuguccggggacggcuggcccuacaucgccagccgcaccuccaucgugggccgggccugggagaacaccgucguggaccucgagcaggacaacaagccccagaagaucgggaacggcgggagcaacaagucccugcagagcgccggcuucgccgcggggcugaccuacucccagcucaugacgcugaaggacuucaagugcuucaaccugaucccgaacgccaagaccuggauggacaucgagggccgccccgaggaccccguggagaucgcccuguaccagcccagcuccggcugcuacguccacuucuuccgggagccgaccgaccucaagcaguucaagcaggacgccaaguacagccacgggaucgacgugaccgaccuguucgccgcgcagcccggccugacgagcgccgucaucgaggcccucccccgcaacauggugaucacgugccagggguccgaggacauccggaagcugcuggagagccagggccgccgcgacaucaagcucaucgacaucacccuguccaaggccgacagccggaaguucgagaacgccgugugggaccaguucaaggaccugugccacaugcacaccggggucgugguggagaagaagaagcgcggcggcaaggaggagaucacgccccacugcgcgcucauggacugcaucauguucgacgccgccgucuccgggggccuggacgccaaggugcugcgggugguccucccgcgcgacaugguguuccggaccagcacccccaaggugguccugugaggacuaguaauaaggaaacuguaugaaugucugugggcaggaagugaagagauccuucuguaaagguuuuuggaauuaugucugcugaauaauaaacuuuuuugaaauaauaaaucugguagaaaaaugagaucuaaaaaaaaaaaaaaaaaaaaaaaaaaaaaaaaaaaaaaaaaaaaaaaaaaaaaaaaaaaaaaaaaaaaaaaaaaaaaaaaaaaaaaaaaaaaaaaaaaaa

SEQ ID NO: 20284 - RNA, 2073 nt, Artificial Sequence
  mRNA product Design b-4 (A100) comprising derived and/or modified sequence from LASV(AV;Clade V)__CCA30315__SP-HsALB_NP(2-569) (opt1)
aggagagucccgcagucggcguccagcggcucugcuuguucgugugugugucguugcaggccuuauucaagcuuaccaugaagugggugaccuucaucagccugcucuuccuguucuccagcgccuacuccagcgccuccaaggaggugaaguccuuccuguggacccagagccuccgccgggagcugagcggcuacugcuccaacaucaagcugcaggucgugaaggacgcccaggcgcuccugcacgggcuggacuucagcgagguguccaacguccagcgccucaugcggaagcagcgccgggacgacagcgaccugaagcgccugcgggaccucaaccaggccgugaacaaccugguggagcugaaguccacccagcagaaguccguccuccgcgugggcacgcugagcagcgacgaccugcucacccuggccgccgaccuggagaagcucaaguccaaggugacccggaccgagcgcccccugagcuccggggucuacaugggcaaccugagcucccagcagcucgaccagcggcgcgcccugcugaaccucaucgggaugacgaacggcagccagggcucccaggcggggcgggacggcguggugcgcgucugggacgugaagaacgccgagcugcugaacaaccaguucgggaccaugccgagccucacccuggccugccugaccaagcagggccagguggaccucaacgacgucgugcaggcccugacggaccuggggcucaucuacaccgcgaaguaccccaacaccagcgaccuggaccggcugacccagucccaccccauccucaacaugaucgacacgaagaaguccagccugaacaucagcggcuacaacuucucccugggcgccgccgugaaggccggggccugcaugcucgacggcgggaacaugcuggagaccaucaaggucagcccccaguccauggacggcauccucaagagcauccugaaggugaagcgcgcgcugggcauguucguguccgacaccccgggggagcggaaccccuacgagaacauccuguacaagaucugccucagcggcgacggguggcccuacaucgccucccgcaccagcaucgucggccgggccugggagaacacggugguggaccuggagaccgacgggaagccccagaagaucggcuccggcaacagcaacaagucccugcagagcgccggguucuccgccggccucaccuacagccagcugaugacccugaaggacgcgaugcugcagcucgacccgaacgccaagacguggauggacaucgaggggcgccccgaggaccccgucgagguggcccuguaccagcccaucuccggcugcuacauccacuucuuccgggagccgaccgaccugaagcaguucaagcaggacgccaaguacagccacgggaucgacaucgccgaccucuucgcggcccagcccggccugaccagcgccgucaucgaggcccugccccgcaacauggugaucacgugccagggcuccgaggacaucaagaagcuccuggagagccaggggcgcaaggacaucaagcugaucgacaucgcccucuccaagaucgacagccggaaguucgagaacgcggugugggaccaguacaaggaccugugccacaugcacaccggcgucgugguggagaagaagaagcgcgggggcaaggaggagaucaccccgcacugcgcccugauggacugcaucauguucgacgccgccgucuccgggggccucaacacccuggugcugcgggcggugcucccccgcgacauggucuuccggaccagcacgccccgcguggugcugugaggacuaguaauaaggaaacuguaugaaugucugugggcaggaagugaagagauccuucuguaaagguuuuuggaauuaugucugcugaauaauaaacuuuuuugaaauaauaaaucugguagaaaaaugagaucuaaaaaaaaaaaaaaaaaaaaaaaaaaaaaaaaaaaaaaaaaaaaaaaaaaaaaaaaaaaaaaaaaaaaaaaaaaaaaaaaaaaaaaaaaaaaaaaaaaaa

SEQ ID NO: 20285 - RNA, 2073 nt, Artificial Sequence
  mRNA product Design b-4 (A100) comprising derived and/or modified sequence from LASV(Togo/2016/7082;Clade VI)__AMR44578__SP-HsALB_NP(2-569) (opt1)
aggagagucccgcagucggcguccagcggcucugcuuguucgugugugugucguugcaggccuuauucaagcuuaccaugaagugggugaccuucaucagccugcucuuccuguucuccagcgccuacuccagcaacuccaaggaggugaaguccuuccuguggacccagagccuccgccgggagcugagcggcuacugcuccaacaucaagcugcaggucgugaaggacgcccaggcccuccugcacgggcuggacuucagcgagguguccaacguccagcgccucaugcggaagcagaagcgcgacgacggcgaccugaagcggcugcgcgaccucaaccaggcggugaacaaccugguggagcucaagagcguccagcagaaguccauccugcggguggggacccugaccagcgacgaccugcucacccuggccgccgaccuggagaagcucaaguccaaggugacccgcaccgagcggccccugagcuccggcgucuacauggggaaccugagcucccagcagcucgaccagcgccgggcccugcugagcaugaucggcauguccggcgggaaccagaacagccagccgaagggcgacgggguggugcgcgucugggacgugaagaacgccgaccuccugaacaaccaguucggcacgaugcccucccugacccucgcgugccugaccaagcagggccagguggaccugaacgacgccguccaggcccucaccgaccuggggcugaucuacacggccaaguaccccaacagcagcgaccucgaccggcugucccagagccaccccauccugaacaugaucgacaccaagaaguccagccucaacaucuccggcuacaacuucagccugggggcggccaucaagaccggcgccugcaugcuggacgggggcaacaugcucgagaccaucaaggugacgccgcagaccauggacggcauccugaaguccauccugaaggugaagcgcagccucgggauguucaucuccgacacccccggcgagcggaaccccuacgagaacauccuguacaagaucugccugagcggggacggcuggcccuacaucgccucccgcaccgccaucaucgggcgggcgugggagaacacggucguggaccucgagagcgacuccaagccgcagaagaucggcagcaacggcuccaacaagagccugcaguccgccggguucgcccccggccugaccuacagccagcucaugacccugaaggacuccaugcugcagcuggaccccaacgccaagaccuggaucgacaucgaggggcgccccgaggacccgguggaggucgcccucuuccagcccaucagcggcugcuacauccacuucuuccgggagcccacggaccugaagcaguucaagcaggacgcgaaguacagccacgggaucgacgugaccgaccuguucgccgcccagcccggccucaccuccgccgugaucgaggcccugccgcgcaacaugguccugaccugccagggcagcgacgacaucaagaagcuccuggacucccaggggcggcgcgacaucaagcugaucgacgugagccucaacaagaucgacucccgcaaguucgagaacgcggucugggaccaguacaaggaccugugccacaugcacacgggcgugguggucgagaagaagaagaagggcgggaaggaggagaucacgccccacugcgcccugcucgacugcaucauguucgacgccgccgugagcgggggccugaacgccaccgugcugcgggcgguccucccccgcgacaugguguuccggaccuccagccccaaggugguccugugaggacuaguaauaaggaaacuguaugaaugucugugggcaggaagugaagagauccuucuguaaagguuuuuggaauuaugucugcugaauaauaaacuuuuuugaaauaauaaaucugguagaaaaaugagaucuaaaaaaaaaaaaaaaaaaaaaaaaaaaaaaaaaaaaaaaaaaaaaaaaaaaaaaaaaaaaaaaaaaaaaaaaaaaaaaaaaaaaaaaaaaaaaaaaaaaa

SEQ ID NO: 20286 - RNA, 2073 nt, Artificial Sequence
  mRNA product Design b-4 (A100) comprising derived and/or modified sequence from LASV(KAK-428;Clade n.d. (VII))__ANH09741__SP-HsALB_NP(2-569) (opt1)
aggagagucccgcagucggcguccagcggcucugcuuguucgugugugugucguugcaggccuuauucaagcuuaccaugaagugggugaccuucaucagccugcucuuccuguucuccagcgccuacuccagcaacuccaaggaggugaaguccuuccuguggacccagagccuccgccgggagcugagcggcuacugcaccaacaucaagcugcaggucgugaaggacgcccaggcccuccugcacgggcuggacuucuccgaggugagcaacguccagcgccucaugcggaagcagaagcgcgacgacaacgaccugaagcggcugcgcgaccucaaccaggcggugaacaaccugguggagcugaaguccguccagcagaaguccgugcucaaggugggcacgcugaacagcgacgaccugcucacccuggccgccgaccuggagaagcucaagagcaaggucgugcggaccgagcgcccccuguccagcgggguguacaugggcaaccuguccagccagcagcucgaccagcggcgcgcccugcugaacaugaucgggauggccggcggcucccaggggaaccagccgagccgggacggcgucgugcgcgugugggacgucaagaacgcggaccuccugaacaaccaguucgggaccaugcccucccugacgcucgccugccugaccaagcagggccagguggaccugaacgacgugguccucgcccugaccgaccuggggcucaucuacaccgccaaguaccccaacagcuccgaccuggaccggcugagccagaaccaccccgugcucaacaugaucgacgugaacaagagcucccugaacaucagcggcuacaacuucucccugggcgcggccgucaaggccggggccugcaugcucgacggcgggaacaugcuggagacgaucaagaucagcccgcagaccguggacggcauccugaaguccauccucaaggugaagcgcgcccugggcauguucgucagcgacacccccggggagcggaaccccuacgagaacauccuguacaaggugugccucuccggcaacggguggcccuacaucgcgagccgcaccuccaucgucggccgggccugggagaacacggugguggaccuggagagcaacaagaaccagccgaaggucgggaacaacggcuccaacaagaugcugcagagcuccggcuucgccaccgggcucaccuacagccagcugaugacccugcgcgacuccaugcugcagcucgaccccacggccaagaccuggaucgacaucgagggccggcccgaggaccccguggagcuggcccuguuccagccgagcuccgggugcuacauccacuucuuccgcgagcccaccgaccucaagcaguucaagcaggacgcgaaguacagccacggcaucgacgugaacgaccuguucuccgcccagcccgggcugaccagcgccguccucgaggcccugccccggaacauggugcugacgugccagggcagcgacgacauccgcaagcuccuggacucccaggaccgcaaggacaucaagcugaucgacaucagccucuccaaggccgacgcgcggaaguucgagaacgacgugugggaccaguucaaggaccugugccacaugcacaccggcaucgucguggagaagaagaagaagggcgggaagcaggagaugaccccgcacugcgcccugcucgacugcaucauguucgacgccgccgugagcgggggccugaacguccccacccugcgcgccgugcuccccacggacaugguguuccggaccaucaccaccaaggucgugcugugaggacuaguaauaaggaaacuguaugaaugucugugggcaggaagugaagagauccuucuguaaagguuuuuggaauuaugucugcugaauaauaaacuuuuuugaaauaauaaaucugguagaaaaaugagaucuaaaaaaaaaaaaaaaaaaaaaaaaaaaaaaaaaaaaaaaaaaaaaaaaaaaaaaaaaaaaaaaaaaaaaaaaaaaaaaaaaaaaaaaaaaaaaaaaaaaa

SEQ ID NO: 20287 - RNA, 2073 nt, Artificial Sequence; identical to SEQ ID NO: 20281
  mRNA product Design b-4 (A100) comprising derived and/or modified sequence from LASV(Pinneo-NIG-1969;Clade I)__AIT17837__SP-HsALB_NP(2-569) (opt1)

SEQ ID NO: 20288 - RNA, 2073 nt, Artificial Sequence
  mRNA product Design b-4 (A100) comprising derived and/or modified sequence from LASV(ISTH0009-NIG-2011;Clade II)__AIT17405__SP-HsALB_NP(2-569) (opt1)
aggagagucccgcagucggcguccagcggcucugcuuguucgugugugugucguugcaggccuuauucaagcuuaccaugaagugggugaccuucaucagccugcucuuccuguucuccagcgccuacuccagcguguccaaggaggucaagagcuuccuguggacccagucccuccgccgggagcugagcggcuacugcuccaacaucaagcuccagguggugaaggacgcccaggcccugcugcacgggcuggacuucagcgaggucuccaacgugcagcgccucaugcggaagcagaagcgcgacgacagcgaccugaagcggcugcgcgaccucaaccaggcggugaacaaccuggucgagcugaaguccacccagcagaaguccauccuccgggugggcacccugaccagcgacgaccugcucacccuggccgccgaccuggagaagcucaagagcaaggugauccgcaccgagcggccccuguccagcggggucuacaugggcaaccuguccacgcagcagcucgagcagcgccgggcccugcugaacaugaucgggauggugggcggcgcccaggggacccagccgggccgcgacggggugguccgggugugggacgugaagaaccccgaccuccugaacaaccaguucggcaccaugcccagccugacccucgcgugccugacgaagcaggggcaggucgaccugaacgacgccgugcucgcccugaccgaccugggccucaucuacaccgccaaguaccccaacuccagcgaccuggaccgccugucccagagccacccgauccucaacaugguggacaucaagaaguccagccugaacaucagcggcuacaacuucucccugggggcggccgucaaggccggcgccugcaugcucgacgggggcaacaugcuggagaccaucaaggugacgccccagaccauggacggcauccucaagagcauccugaaggugaagcggucccuggggauguucgucagcgacacccccggcgagcgcaaccccuacgagaacauccuguacaagaucugccucuccggggacggcuggccguacaucgccagccggaccuccaucguggggcgcgcgugggagaacacgaccguggaccuggagagcgacggcaagccccagaaggucggcuccgccgggagcaacaagucccugcagagcgccggcuuccccaccgggcucaccuacucccagcugaugacgcugaaggacagcaugaugcagcuggaccccuccgccaagaccuggaucgacaucgagggccggccggaggaccccguggagaucgcccucuaccagcccaugagcgggugcuacauccacuucuuccgcgagcccaccgaccugaagcaguucaagcaggacgcgaaguacucccacggcaucgacgucgccgaccuguucccggcccagcccggccucaccagcgccgugaucgaggcccugccccggaacauggugcugacgugccaggggagcgacgacaucaagcgccuccuggacucccagggccgccgggacaucaagcugaucgacaucgcgcucagcaaggccgacucccgccgguucgagaacgccgucugggaccagugcaaggaccugugccacaugcacaccggggugguggucgagaagaagaagcgcggcgggaaggaggagaucacgccccacugcgcccugauggacugcaucauguacgacgccgcggugagcggcggccucaacaucccggugcugcgggccguccugccccgcgacaugguguuccggaccuccagccccaaggugguccucugaggacuaguaauaaggaaacuguaugaaugucugugggcaggaagugaagagauccuucuguaaagguuuuuggaauuaugucugcugaauaauaaacuuuuuugaaauaauaaaucugguagaaaaaugagaucuaaaaaaaaaaaaaaaaaaaaaaaaaaaaaaaaaaaaaaaaaaaaaaaaaaaaaaaaaaaaaaaaaaaaaaaaaaaaaaaaaaaaaaaaaaaaaaaaaaaa

SEQ ID NO: 20289 - RNA, 2073 nt, Artificial Sequence
  mRNA product Design b-4 (A100) comprising derived and/or modified sequence from LASV(ISTH2010-NIG-2012;Clade II)__AIT17483__SP-HsALB_NP(2-569) (opt1)
aggagagucccgcagucggcguccagcggcucugcuuguucgugugugugucguugcaggccuuauucaagcuuaccaugaagugggugaccuucaucagccugcucuuccuguucuccagcgccuacuccagcgccuccaaggaggugaaguccuuccuguggacccagagccuccgccgggagcugagcggcuacugcuccaacaucaagcugcaggucgugaaggacgcccaggcgcuccugcacgggcuggacuucagcgagguguccaacguccagcgccucaugcggaagcagaagcgcgacgacagcgaccugaagcggcugcgcgaccucaaccaggccgugaacaaccugguggagcugaaguccacccagcagaaguccauccuccgggucggcacgcugaccagcgacgaccugcucacccuggccgccgaccuggagaagcucaagagcaaggugauccgcaccgagcggccccuguccagcgggguguacaugggcaaccuguccacgcagcagcucgagcagcgccgggcccugcugaaccucaucgggauggucggcggcgcgcaggggacccagccgggccgcgacgggguggugcgggucugggacgugaagaaccccgaccugcugaacaaccaguucggcaccaugcccagccucacccuggccugccugacgaagcagggccagguggaccucaacgacgccguccuggcccugaccgaccucgggcugaucuacaccgcgaaguaccccaacuccagcgaccuggaccgccucucccagagccacccgauccugaacaugguggacaccaagaaguccagccugaacaucagcggcuucaacuucucccucggggccgccgugaaggccggcgccugcaugcuggacgggggcaacaugcuggagacgaucaaggucacgccccagaccauggacggcauccucaagagcauccugaaggugaagaagucccuggggauguucgugagcgacacccccggcgagcggaaccccuacgagaacauccucuacaagaucugccuguccggggacggcuggccguacaucgcgagccgcaccuccaucgucgggcgggccugggagaacaccaccguggaccuggagagcgacggcaagccccacaaggugggcaccgccggguccaacaagagccuccaguccgccggcuuccccacggggcugaccuacagccagcugaugacccugaaggacuccaugaugcagcucgaccccagcgccaagaccuggaucgacaucgagggccgcccggaggaccccgucgagaucgcgcuguaccagcccauguccgggugcuacauccacuucuuccgggagcccacggaccugaagcaguucaagcaggacgccaaguacagccacggcaucgacguggccgaccucuucccggcccagcccggccugaccuccgccgucaucgaggcgcugccccgcaacauggugcugaccugccaggggagcgacgacaucaagcggcuccuggacagccagggccgccgcgacaucaagcucaucgacaucgcccuguccaaggccgacagccggcgcuucgagaacgccgugugggaccagugcaaggaccugugccacaugcacaccggggucgugguggagaagaagaagcggggcgggaaggaggagaucacgccccacugcgcccucauggacugcaucauguacgacgcggccgucuccggcggccugaacaucccggugcugcgcgccgugcucccccgggacauggucuuccgcaccagcucccccaagguggugcugugaggacuaguaauaaggaaacuguaugaaugucugugggcaggaagugaagagauccuucuguaaagguuuuuggaauuaugucugcugaauaauaaacuuuuuugaaauaauaaaucugguagaaaaaugagaucuaaaaaaaaaaaaaaaaaaaaaaaaaaaaaaaaaaaaaaaaaaaaaaaaaaaaaaaaaaaaaaaaaaaaaaaaaaaaaaaaaaaaaaaaaaaaaaaaaaaa

SEQ ID NO: 20290 - RNA, 2073 nt, Artificial Sequence
  mRNA product Design b-4 (A100) comprising derived and/or modified sequence from LASV(Lassa virus/H.sapiens-wt/NGA/2015/ISTH_0543;Clade II)__AVO03640__SP-HsALB_NP(2-569) (opt1)
aggagagucccgcagucggcguccagcggcucugcuuguucgugugugugucguugcaggccuuauucaagcuuaccaugaagugggugaccuucaucagccugcucuuccuguucuccagcgccuacuccagcgccuccaaggaggugaaguccuuccuguggacccagagccuccgccgggagcugagcggcuacugcuccaacaucaagcugcaggucgugaaggacgcccaggcgcuccugcacgggcuggacuucagcgagguguccaacguccagcgccucaugcggaagcagaagcgcgacgacagcgaccugaagcggcugcgcgaccucaaccaggccgugaacaaccugguggagcugaaguccacccagcagaaguccauccuccgggucggcacgcugaccagcgacgaccugcucacccuggccgccgaccuggagaagcucaagagcaaggugauccgcaccgagcggccccuguccagcgggguguacaugggcaaccuguccacgcagcagcucgagcagcgccgggcccugcugaacaugaucgggauggucggcggcgcgcaggggacccagccgggccgcgacgggguggugcgggucugggacgugaagaaccccgaccuccugaacaaccaguucggcaccaugcccagccugacccucgccugccugacgaagcagggccagguggaccugaacgacgccguccucgcccugaccgaccuggggcucaucuacaccgcgaaguaccccaacuccagcgaccuggaccgccugucccagagccacccgauccucaacaugguggacaccaagaaguccagccugaacaucagcggcuacaacuucucccugggggccgccgugaaggccggcgccugcaugcucgacgggggcaacaugcuggagacgaucaaggucacgccccagaccauggacggcauccucaagagcauccugaaggugaagaagucccuggggauguucgugagcgacacccccggcgagcggaaccccuacgagaacauccuguacaagaucugccucuccggggacggcuggccguacaucgcgagccgcaccuccaucgucgggcgggccugggagaacaccaccguggaccuggagagcgacggcaagccccagaaggugggcuccgccgggagcaacaagucccugcagagcgccggcuuccccaccgggcucacguacucccagcugaugacccugaaggacagcaugaugcagcuggaccccuccgccaagaccuggaucgacaucgagggccgcccggaggaccccgucgagaucgcgcucuaccagcccaugagcgggugcuacauccacuucuuccgggagcccaccgaccugaagcaguucaagcaggacgccaaguacucccacggcaucgacguggccgaccuguucccggcccagcccggccucacgagcgccgucaucgaggcgcugccccgcaacauggugcugaccugccaggggagcgacgacaucaagcggcuccuggacucccagggccgcaaggacaucaagcugaucgacaucgcccucagcaaggccgacucccgccgguucgagaacgccgugugggaccagugcaaggaccugugccacaugcacaccggggucgugguggagaagaagaagcgcggcgggaaggaggagaucacgccccacugcgcccugauggacugcaucauguacgacgcggccgucagcggcggccucaacaucccggugcugcgggccgugcugccccgcgacauggucuuccggaccuccagccccaagguggugcucugaggacuaguaauaaggaaacuguaugaaugucugugggcaggaagugaagagauccuucuguaaagguuuuuggaauuaugucugcugaauaauaaacuuuuuugaaauaauaaaucugguagaaaaaugagaucuaaaaaaaaaaaaaaaaaaaaaaaaaaaaaaaaaaaaaaaaaaaaaaaaaaaaaaaaaaaaaaaaaaaaaaaaaaaaaaaaaaaaaaaaaaaaaaaaaaaa

SEQ ID NO: 20291 - RNA, 2073 nt, Artificial Sequence
  mRNA product Design b-4 (A100) comprising derived and/or modified sequence from LASV(Lassa virus/H.sapiens-wt/NGA/2016/ISTH_0009;Clade II)__AVO03572__SP-HsALB_NP(2-569) (opt1)
aggagagucccgcagucggcguccagcggcucugcuuguucgugugugugucguugcaggccuuauucaagcuuaccaugaagugggugaccuucaucagccugcucuuccuguucuccagcgccuacuccagcgccuccaaggaggugaaguccuuccuguggacccagagccuccgccgggagcugagcggcuacugcuccaacaucaagcugcaggucgugaaggacgcccaggcgcuccugcacgggcuggacuucagcgagguguccaacguccagcgccucaugcggaagcagaagcgcgacgacagcgaccugaagcggcugcgcgaccucaaccaggccgugaacaaccugguggagcugaaguccacccagcagaaguccauccuccgggucggcacgcugaccagcgacgaccugcucacccuggccgccgaccuggagaagcucaagagcaaggugauccgcaccgagcggccccuguccagcgggguguacaugggcaaccuguccacgcagcagcucgagcagcgccgggcccugcugaacaugaucgggauggucggcggcgcgcaggggacccagccgggccgcgacgggguggugcgggucugggacgugaagaaccccgaccuccugaacaaccaguucggcaccaugcccagccugacccucgccugccugacgaagcagggccagguggaccugaacgacgccguccucgcccugaccgaccuggggcucaucuacaccgcgaaguaccccaacuccagcgaccuggaccgccugucccagagccacccgauccucaacaugguggacaccaagaaguccagccugaacaucagcggcuacaacuucucccugggggccgccgugaaggccggcgccugcaugcucgacgggggcaacaugcuggagacgaucaaggucacgccccagaccauggacggcauccucaagagcauccugaaggugaagaagucccuggggauguucgugagcgacacccccggcgagcggaaccccuacgagaacauccuguacaagaucugccucuccggggacggcuggccguacaucgcgagccgcaccuccaucgucgggcgggccugggagaacaccaccguggaccuggagagcgacggcaagccccagaaggugggcuccgccgggagcaacaagucccugcagagcgccggcuuccccaccgggcucacguacucccagcugaugacccugaaggacagcaugaugcagcuggaccccuccgccaagaccuggaucgacaucgagggccgcccggaggaccccgucgagaucgcgcucuaccagcccaugagcgggugcuacauccacuucuuccgggagcccaccgaccugaagcaguucaagcaggacgccaaguacucccacggcaucgacguggccgaccuguucccggcccagcccggccucacgagcgccgucaucgaggcgcugccccgcaacauggugcugaccugccaggggagcgacgacaucaagcggcuccuggacucccagggccgccgcgacaucaagcugaucgacaucgcccucagcaaggccgacucccggcgcuucgagaacgccgugugggaccagugcaaggaccugugccacaugcacaccggggucgugguggagaagaagaagcggggcgggaaggaggagaucacgccccacugcgcccugauggacugcaucauguacgacgcggccgucagcggcggccucaacaucccggugcugcgcgccgugcugccccgggacauggucuuccgcaccuccagccccaagguggugcucugaggacuaguaauaaggaaacuguaugaaugucugugggcaggaagugaagagauccuucuguaaagguuuuuggaauuaugucugcugaauaauaaacuuuuuugaaauaauaaaucugguagaaaaaugagaucuaaaaaaaaaaaaaaaaaaaaaaaaaaaaaaaaaaaaaaaaaaaaaaaaaaaaaaaaaaaaaaaaaaaaaaaaaaaaaaaaaaaaaaaaaaaaaaaaaaaa

SEQ ID NO: 20292 - RNA, 2073 nt, Artificial Sequence
  mRNA product Design b-4 (A100) comprising derived and/or modified sequence from LASV(Lassa virus/H.sapiens-wt/NGA/2016/ISTH_0017;Clade II)__AVO03568__SP-HsALB_NP(2-569) (opt1)
aggagagucccgcagucggcguccagcggcucugcuuguucgugugugugucguugcaggccuuauucaagcuuaccaugaagugggugaccuucaucagccugcucuuccuguucuccagcgccuacuccagcgccuccaaggaggugaaguccuuccuguggacccagagccuccgccgggagcugagcggcuacugcuccagcaucaagcugcaggucgugaaggacgcccaggcgcuccugcacgggcuggacuucuccgaggugagcaacguccagcgccucaugcggaagcagaagcgcgacgacuccgaccugaagcggcugcgcgaccucaaccaggccgugaacaaccugguggagcucaagagcacccagcagaaguccauccugcgggucggcacgcugaccagcgacgaccugcucacccuggccgccgaccuggagaagcucaaguccaaggugauccgcaccgagcggccccugagcuccgggguguacaugggcaaccugagcacgcagcagcucgagcagcgccgggcccugcugaacaugaucgggauggcgggcggcgcccaggggacccagccgggccgcgacggggucgugcgggugugggacgucaagaaccccgaccuccugaacaaccaguucggcaccaugcccucccugacccucgccugccugacgaagcagggccagguggaccugaacgacgccgugcucgcgcugaccgaccuggggcucaucuacaccgccaaguaccccaacagcuccgaccuggaccgccugagccagagccacccgauccucaacauggucgacaccaagaaguccagccugaacaucuccggcuacaacuucagccugggggccgccgugaaggccggcgcgugcaugcucgacgggggcaacaugcuggagacgaucaaggugacgccccagaccauggacggcauccugaaguccauccucaaggucaagcggagccuggggauguucguguccgacgcccccggcgagcgcaaccccuacgagaacauccuguacaagaucugccucagcggggacggcuggccguacaucgccucccggaccagcaucguggggcgcgccugggagaacaccaccgucgaccuggaguccgacggcaagccccagaaggugggcgccaccgggagcaacaagucccugcagagcgcgggcuuccccaccgggcucacguacucccagcugaugacccugaaggacagcaugaugcagcuggaccccuccgccaagaccuggaucgacaucgagggccggccggaggaccccguggaggucgcccucuaccagcccgugagcgggugcuacauccacuucuuccgcgagcccaccgaccugaagcaguucaagcaggacgccaaguacucccacggcaucgacgucgccgaccuguucccggcgcagcccggccucacgagcgccgugaucgaggcccugccccggaacauggugcugaccugccaggggagcgacgacaucaagaagcuccuggacucccagggccgcaaggacaucaagcugaucgacaucgcccucagcaaggccgacucccgccgguucgagaacgcggucugggaccagugcaaggaccugugccacaugcacaccggggugguggucgagaagaagaagcgcggcgggaaggaggagaucacgccccacugcgcccugauggacugcaucauguacgacgccgccgugagcggcggccucaacaucccggugcugcgggcgguccugccccgcgacaugguguuccggaccuccagccccaaggugguccucugaggacuaguaauaaggaaacuguaugaaugucugugggcaggaagugaagagauccuucuguaaagguuuuuggaauuaugucugcugaauaauaaacuuuuuugaaauaauaaaucugguagaaaaaugagaucuaaaaaaaaaaaaaaaaaaaaaaaaaaaaaaaaaaaaaaaaaaaaaaaaaaaaaaaaaaaaaaaaaaaaaaaaaaaaaaaaaaaaaaaaaaaaaaaaaaaa

SEQ ID NO: 20293 - RNA, 2073 nt, Artificial Sequence
  mRNA product Design b-4 (A100) comprising derived and/or modified sequence from LASV(Lassa virus/H.sapiens-wt/NGA/2018/ISTH_0959;Clade II)__AVV65100__SP-HsALB_NP(2-569) (opt1)
aggagagucccgcagucggcguccagcggcucugcuuguucgugugugugucguugcaggccuuauucaagcuuaccaugaagugggugaccuucaucagccugcucuuccuguucuccagcgccuacuccagcgccuccaaggaggugaaguccuuccuguggacccagagccuccgccgggagcugagcggcuacugcuccaacaucaagcugcaggucgugaaggacgcccaggcgcuccugcacgggcuggacuucagcgagguguccaacguccagcgccucaugcggaagcagaagcgcgacgacagcgaccugaagcggcugcgcgaccucaaccaggccgugaacaaccugguggagcugaaguccacccagcagaaguccauccuccgggucggcacccugaccagcgacgaccugcucacccuggccgccgaccuggagaagcucaagagcaaggugauccgcaccgagcggccccuguccagcgggguguacaugggcaaccuguccacgcagcagcucgagcagcgccgggcccugcugaaccucaucgggauggucggcggcgcgcaggggacccagccgggccgcgacgggguggugcgggucugggacgugaagaaccccgaccugcugaacaaccaguucggcaccaugcccagccucacccuggccugccugacgaagcagggccagguggaccucaacgacgucgugcuggcccugaccgaccucgggcugaucuacaccgccaaguaccccaacuccagcgaccuggaccgccucucccagagccacccgauccugaacaugguggacaccaagaaguccagccugaacaucagcggcuucaacuucucccucggggcggccgucaaggccggcgccugcaugcuggacgggggcaacaugcuggagacgaucaaggugacgccccagaccauggacggcauccucaagagcauccugaaggugaagaagucccuggggauguucgucagcgacacccccggcgagcggaaccccuacgagaacauccucuacaagaucugccuguccggggacggcuggccguacaucgccagccgcaccuccaucguggggcgggcgugggagaacaccaccguggaccuggagagcgacggcaagccccacaaggucggcaccgccggguccaacaagagccuccaguccgccggcuuccccacggggcugaccuacagccagcugaugacccugaaggacuccaugaugcagcucgaccccagcgccaagaccuggaucgacaucgagggccgcccggaggaccccguggagaucgcccuguaccagcccauguccgggugcuacauccacuucuuccgggagcccacggaccugaagcaguucaagcaggacgcgaaguacagccacggcaucgacgucgccgaccucuucccggcccagcccggccugaccuccgccgugaucgaggcccugccccgcaacauggugcugaccugccaggggagcgacgacaucaagcggcuccuggacagccagggccgcaaggacaucaagcucaucgacaucgcgcuguccaagaccgacagccgccgguucgagaacgccgucugggaccagugcaaggaccugugccacaugcacacgggggugguggucgagaagaagaagcgcggcgggaaggaggagaucacgccccacugcgcccucauggacugcaucauguacgacgccgccguguccggcggccugaacaucccggugcugcgggcgguccucccccgcgacaugguguuccggaccagcucccccaaggugguccugugaggacuaguaauaaggaaacuguaugaaugucugugggcaggaagugaagagauccuucuguaaagguuuuuggaauuaugucugcugaauaauaaacuuuuuugaaauaauaaaucugguagaaaaaugagaucuaaaaaaaaaaaaaaaaaaaaaaaaaaaaaaaaaaaaaaaaaaaaaaaaaaaaaaaaaaaaaaaaaaaaaaaaaaaaaaaaaaaaaaaaaaaaaaaaaaaa

SEQ ID NO: 20294 - RNA, 2073 nt, Artificial Sequence
  mRNA product Design b-4 (A100) comprising derived and/or modified sequence from LASV(LASV003-NIG-2008;Clade II)__AIT17581__SP-HsALB_NP(2-569) (opt1)
aggagagucccgcagucggcguccagcggcucugcuuguucgugugugugucguugcaggccuuauucaagcuuaccaugaagugggugaccuucaucagccugcucuuccuguucuccagcgccuacuccagcgccuccaaggaggugaaguccuuccuguggacccagagccuccgccgggagcugagcggcuacugcuccagcaucaagcugcaggucgugaaggacgcccaggcgcuccugcacgggcuggacuucuccgaggugagcaacguccagcgccucaugcggaagcagaagcgcgacgacuccgaccugaagcggcugcgcgaccucaaccaggccgugaacaaccugguggagcucaagagcacccagcagaaguccguccugcgggugggcacccugaccagcgacgaccugcucacccuggccgccgaccuggagaagcucaaguccaaggugauccgcaccgagcggccccugagcuccggggucuacaugggcaaccugagcgcccagcagcucgagcagcgccggacgcugcugaacaugaucgggauggugggcggcgcgcaggggacccagccgggccgcgacggggugguccgggugugggacgugaagaaccccgaccuccugaacaaccaguucggcaccaugcccucccugacccucgccugccugacgaagcaggggcaggucgaccugaacgacguggugcucgcccugaccgaccugggccucaucuacaccgccaaguaccccaacagcuccgaccuggaccgccugagccagagccacccgauccucuccauggucgacaccaagaaguccagccugaacaucagcggcuacaacuucucccugggggcggccgugaaggccggcgccugcaugcucgacgggggcaacaugcuggagacgaucaaggugacgccccagaccauggacggcauccucaagagcauccugaaggucaagaagucccuggggauguucgugagcgacacccccggcgagcggaaccccuacgagaacauccuguacaagaucugccucuccggggacggcuggccguacaucgccagccgcaccuccaucguggggcgggcgugggagaacaccaccgucgaccuggagagcgacggcaagccccagaaggugggcaccgccggguccaacaagagccugcaguccgccggcuuccccacggggcucaccuacagccagcugaugacccugaaggacuccaugaugcagcuggaccccagcgccaagaccuggaucgacaucgagggccgcccggaggaccccgucgagaucgcccucuaccagcccauguccgggugcuacauccacuucuuccgggagcccacggaccugaagcaguucaagcaggacgcgaaguacagccacggcaucgacgugaccgaccuguucccggcccagcccggccucaccagcgccgugaucgaggcccugccccgcaacaugguccugaccugccagggguccgacgacaucaagcggcuccuggacagccagggccgccgcgacaucaagcugaucgacaucgcccucuccaaggcggacagccggcgcuucgagaacgccgugugggaccagugcaaggaccugugccacaugcacacggggguggucguggagaagaagaagcggggcgggaaggaggagaucacgccccacugcgcccugauggacugcaucauguacgacgccgccguguccggcggccucaacaucccgguccugcgcgcggugcugccccgggacaugguguuccgcaccagcucccccaaggucgugcucugaggacuaguaauaaggaaacuguaugaaugucugugggcaggaagugaagagauccuucuguaaagguuuuuggaauuaugucugcugaauaauaaacuuuuuugaaauaauaaaucugguagaaaaaugagaucuaaaaaaaaaaaaaaaaaaaaaaaaaaaaaaaaaaaaaaaaaaaaaaaaaaaaaaaaaaaaaaaaaaaaaaaaaaaaaaaaaaaaaaaaaaaaaaaaaaaa

SEQ ID NO: 20295 - RNA, 2073 nt, Artificial Sequence
  mRNA product Design b-4 (A100) comprising derived and/or modified sequence from LASV(LASV035-NIG-2009;Clade II)__AIT17589__SP-HsALB_NP(2-569) (opt1)
aggagagucccgcagucggcguccagcggcucugcuuguucgugugugugucguugcaggccuuauucaagcuuaccaugaagugggugaccuucaucagccugcucuuccuguucuccagcgccuacuccagcgccuccaaggaggugaaguccuuccuguggacccagagccuccgccgggagcugagcggcuacugcuccagcaucaagcugcaggucgugaaggacgcccaggcgcuccugcacgggcuggacuucuccgaggugagcaacguccagcgccucaugcggaagcagaagcgcgacgacuccgaccugaagcggcugcgcgaccucaaccaggccgugaacaaccugguggagcucaagagcacccagcagaaguccauccugcgggucggcacgcugaccagcgacgaccugcucacccuggccgccgaccuggagaagcucaaguccaaggugauccgcaccgagcggccccugagcuccgggguguacaugggcaaccugagcgcccagcagcucgagcagcgccgggcgcugcugaacaugaucgggauggucggcggcgcccaggggacgcagccgggccgcgacgggguggugcgggucugggacgugaagaaccccgaccuccugaacaaccaguucggcaccaugcccucccugacccucgccugccugaccaagcagggccagguggaccugaacgacgccguccucgcgcugacggaccuggggcucaucuacaccgccaaguaccccaacagcuccgaccuggaccgccugagccagagccacccgauccucaacaugguggacaccaagaaguccagccugaacaucuccggcuacaacuucagccugggggccgccgugaaggccggcgcgugcaugcucgacgggggcaacaugcuggagaccaucaaggucacgccccagaccauggacggcauccugaaguccauccucaaggugaagcggagccuggggauguucguguccgacacccccggcgagcgcaaccccuacgagaacauccuguacaagaucugccucagcggggacggcuggccguacaucgccucccggaccagcaucgucgggcgcgccugggagaacacgaccguggaccuggaguccgacggcaagccccagaaggugggcaccaccgggagcaacaagucccugcagagcgccggcuuccccacggggcucaccuacucccagcugaugacccugaaggacagcaugaugcagcuggaccccuccgccaagaccuggaucgacaucgagggccggccggaggaccccgucgagaucgcgcucuaccagcccaugagcgggugcuacauccacuucuuccgcgagcccacggaccugaagcaguucaagcaggacgccaaguacucccacggcaucgacguggccgaccuguucccggcccagcccggccucaccagcgccgucaucgaggcgcugccccggaacauggugcugaccugccaggggagcgacgacaucaagaagcuccuggacucccagggccgccgcgacaucaagcugaucgacaucgcccucagcaaggccgacucccggaaguucgagaacgccgugugggaccagugcaaggaccugugccacaugcacaccggggucgugguggagaagaagaagcgcggcgggaaggaggagaucacgccccacugcgcccugauggacugcaucauguacgacgcggccgucagcggcggccucaacaucccggugcugcgggccgugcugccccgcgacauggucuuccggaccuccagccccaagguggugcucugaggacuaguaauaaggaaacuguaugaaugucugugggcaggaagugaagagauccuucuguaaagguuuuuggaauuaugucugcugaauaauaaacuuuuuugaaauaauaaaucugguagaaaaaugagaucuaaaaaaaaaaaaaaaaaaaaaaaaaaaaaaaaaaaaaaaaaaaaaaaaaaaaaaaaaaaaaaaaaaaaaaaaaaaaaaaaaaaaaaaaaaaaaaaaaaaa

SEQ ID NO: 20296 - RNA, 2073 nt, Artificial Sequence
  mRNA product Design b-4 (A100) comprising derived and/or modified sequence from LASV(LASV1000-NIG-2009;Clade II)__AIT17783__SP-HsALB_NP(2-569) (opt1)
aggagagucccgcagucggcguccagcggcucugcuuguucgugugugugucguugcaggccuuauucaagcuuaccaugaagugggugaccuucaucagccugcucuuccuguucuccagcgccuacuccagcgccuccaaggaggugaaguccuuccuguggacccagagccuccgccgggagcugagcggcuacugcuccaacaucaagcugcaggucgugaaggacgcccaggcgcuccugcacgggcuggacuucagcgagguguccaacguccagcgccucaugcggaagcagaagcgcgacgacagcgaccugaagcggcugcgcgaccucaaccaggccgugaacaaccugguggagcugaaguccacccagcagaaguccauccuccgggucggcacgcugaccagcgacgaccugcucacccuggccgccgaccuggagaagcucaagagcaaggugauccgcaccgagcggccccuguccagcgggguguacaugggcaaccuguccacgcagcagcucgagcagcgccgggcccugcugaacaugaucgggauggucggcggcgcgcaggggacccagccgggccgcgacgggguggugcgggucugggacgugaagaaccccgaccuccugaacaaccaguucggcaccaugcccagccugacccucgccugccugacgaagcagggccagguggaccugaacgacgucgugcucgcccugaccgaccuggggcucaucuacaccgccaaguaccccaacuccagcgaccuggaccgccugucccagagccacccgauccucaacaugguggacaccaagaaguccagccugaacaucagcggcuacaacuucucccugggggcggccgucaaggccggcgccugcaugcucgacgggggcaacaugcuggagacgaucaaggugacgccccagaccauggacggcauccucaagagcauccugaaggugaagaagucccuggggauguucgucagcgacacccccggcgagcggaaccccuacgagaacauccuguacaagaucugccucuccggggacggcuggccguacaucgccagccgcaccuccaucguggggcgggcgugggagaacaccaccguggaccuggagagcgacggcaagccccagaaggucggcaccgccggguccaacaagagccugcaguccgccggcuuccccacggggcucaccuacagccagcugaugacccugaaggacuccaugaugcagcuggaccccagcgccaagaccuggaucgacaucgagggccgcccggaggaccccguggagaucgcccucuaccagcccgucuccgggugcuacauccacuucuuccgggagcccacggaccugaagcaguucaagcaggacgcgaaguacagccacggcaucgacguggccgaccuguucccggcccagcccggccucaccuccgccgugaucgaggcccugccccgcaacaugguccugaccugccaggggagcgacgacaucaagcggcuccuggacagccagggccgccgcgacaucaagcugaucgacaucgcgcucuccaaggccgacagccggcgcuucgagaacgccgugugggaccagugcaaggaccugugccacaugcacaccgggguggucguggagaagaagaagcggggcgggaaggaggagaucacgccccacugcgcccugauggacugcaucauguacgacgccgcgguguccggcggccucaacaucccgguccugcgcgccgugcugccccgggacaugguguuccgcaccagcucccccaaggucgugcucugaggacuaguaauaaggaaacuguaugaaugucugugggcaggaagugaagagauccuucuguaaagguuuuuggaauuaugucugcugaauaauaaacuuuuuugaaauaauaaaucugguagaaaaaugagaucuaaaaaaaaaaaaaaaaaaaaaaaaaaaaaaaaaaaaaaaaaaaaaaaaaaaaaaaaaaaaaaaaaaaaaaaaaaaaaaaaaaaaaaaaaaaaaaaaaaaa

SEQ ID NO: 20297 - RNA, 2073 nt, Artificial Sequence
  mRNA product Design b-4 (A100) comprising derived and/or modified sequence from LASV(LASV221-NIG-2010;Clade II)__AIT17625__SP-HsALB_NP(2-569) (opt1)
aggagagucccgcagucggcguccagcggcucugcuuguucgugugugugucguugcaggccuuauucaagcuuaccaugaagugggugaccuucaucagccugcucuuccuguucuccagcgccuacuccagcgccuccaaggaggugaaguccuuccuguggacccagagccuccgccgggagcugagcggcuacugcuccagcaucaagcugcaggucgugaaggacgcccaggcgcuccugcacgggcuggacuucuccgaggugagcaacguccagcgccucaugcggaagcagcgccgggacgacuccgaccugaagcgccugcgggaccucaaccaggccgugaacaaccugguggagcucaagagcacccagcagaaguccauccugcgcgucggcacgcugaccagcgacgaccugcucacccuggccgccgaccuggagaagcucaaguccaaggugauccggaccgagcgcccccugagcuccgggguguacaugggcaaccugagcacgcagcagcucgagcagcggcgcgcccugcugaacaugaucgggauggucggcggcgcgcaggggacccagccgggccgggacgggguggugcgcgucugggacgugaagaaccccgaccuccugaacaaccaguucggcaccaugcccucccugacccucgccugccugacgaagcagggccagguggaccugaacgacgccguccucgcccugaccgaccuggggcucaucuacaccgcgaaguaccccaacagcuccgaccuggaccggcugagccagagccacccgauccucaacaugguggacaccaagaaguccagccugaacaucuccggcuacaacuucagccugggggccgccgugaaggccggcgccugcaugcucgacgggggcaacaugcuggagacgaucaaggucacgccccagaccguggacggcauccugaaguccauccucaaggugaagcgcagccuggggauguucgucuccgacacccccggcgagcggaaccccuacgagaacauccuguacaagaucugccucagcggggacggcuggccguacaucgcgucccgcaccagcaucguggggcgggccugggagaacaccaccguggaccuggaguccgacggcaagccccagaaggucggcaccgccgggagcaacaagucccugcagagcgccggcuuccccacggggcucaccuacucccagcugaugacccugaaggacagcaugaugcagcuggaccccuccgccaagaccuggaucgacaucgagggccgcccggaggaccccguggagaucgcgcucuaccagcccaugagcgggugcuacauccacuucuuccgggagcccacggaccugaagcaguucaagcaggacgccaaguacucccacggcaucgacgucgccgaccuguucccggcccagcccggccucaccagcgccgugaucgaggcgcugccccgcaacauggugcugaccugccaggggagcgacgacaucaagcgccuccuggacucccagggccggcgcgacaucaagcugaucgacaucgcccucagcaaggccgacucccggaaguucgagaacgccgucugggaccagugcaaggaccugugccacaugcacaccggggugguggucgagaagaagaagcgcggcgggaaggaggagaucacgccccacugcgcccugauggacugcaucauguacgacgcggccgugagcggcggccucaacaucccggugcugcgggccguccugccccgcgacaugguguuccggaccuccagccccaaggugguccucugaggacuaguaauaaggaaacuguaugaaugucugugggcaggaagugaagagauccuucuguaaagguuuuuggaauuaugucugcugaauaauaaacuuuuuugaaauaauaaaucugguagaaaaaugagaucuaaaaaaaaaaaaaaaaaaaaaaaaaaaaaaaaaaaaaaaaaaaaaaaaaaaaaaaaaaaaaaaaaaaaaaaaaaaaaaaaaaaaaaaaaaaaaaaaaaaa

SEQ ID NO: 20298 - RNA, 2073 nt, Artificial Sequence
  mRNA product Design b-4 (A100) comprising derived and/or modified sequence from LASV(LASV237-NIG-2010;Clade II)__AIT17639__SP-HsALB_NP(2-569) (opt1)
aggagagucccgcagucggcguccagcggcucugcuuguucgugugugugucguugcaggccuuauucaagcuuaccaugaagugggugaccuucaucagccugcucuuccuguucuccagcgccuacuccagcgccuccaaggaggugaaguccuuccuguggacccagagccuccgccgggagcugagcggcuacugcuccaacaucaagcugcaggucgugaaggacgcccaggcgcuccugcacgggcuggacuucagcgagguguccaacguccagcgccucaugcggaagcagaagcgcgacgacagcgaccugaagcggcugcgcgaccucaaccaggccgugaacaaccugguggagcugaaguccacccagcagaaguccauccuccgggucggcacccugaccagcgacgaccugcucacccuggccgccgaccuggagaagcucaagagcaaggugauccgcaccgagcggccccuguccagcgggguguacaugggcaaccuguccacgcagcagcucgagcagcgccgggcccugcugaacaugaucgggauggucggcggcgcgcaggggacccagccgggccgcgacgggguggugcgggucugggacgugaagaaccccgaccuccugaacaaccaguucggcaccaugcccagccugacccucgccugccugacgaagcagggccagguggaccugaacgacgccguccucgcccugaccgaccuggggcucaucuacaccgcgaaguaccccaacuccagcgaccuggaccgccugucccagagccacccgauccucaacaugguggacaucaagaaguccagccugaacaucagcggcuacaacuucucccugggggccgccgugaaggccggcgccugcaugcucgacgggggcaacaugcuggagaccaucaaggucacgccccagaccauggacggcauccucaagagcauccugaaggugaagcggucccuggggauguucgugagcgacacccccggcgagcgcaaccccuacgagaacauccuguacaagaucugccucuccggggacggcuggccguacaucgcgagccggaccuccaucgucgggcgcgccugggagaacacgaccguggaccuggagagcgacggcaagccccagaaggugggcuccgccgggagcaacaagucccugcagagcgccggcuuccccaccgggcucaccuacucccagcugaugacgcugaaggacagcaugaugcagcuggaccccuccgccaagaccuggaucgacaucgagggccggccggaggaccccgucgagaucgcgcucuaccagcccaugagcgggugcuacauccacuucuuccgcgagcccaccgaccugaagcaguucaagcaggacgccaaguacucccacggcaucgacguggccgaccuguucccggcccagcccggccucaccagcgccgucaucgaggcgcugccccggaacauggugcugacgugccaggggagcgacgacaucaagcgccuccuggacucccagggccgccgggacaucaagcugaucgacaucgcccucagcaaggccgacucccgccgguucgagaacgccgugugggaccagugcaaggaccugugccacaugcacaccggggucgugguggagaagaagaagcgcggcgggaaggaggagaucacgccccacugcgcccugauggacugcaucauguacgacgcggccgucagcggcggccucaacaucccggugcugcgggccgugcugccccgcgacauggucuuccggaccuccagccccaagguggugcucugaggacuaguaauaaggaaacuguaugaaugucugugggcaggaagugaagagauccuucuguaaagguuuuuggaauuaugucugcugaauaauaaacuuuuuugaaauaauaaaucugguagaaaaaugagaucuaaaaaaaaaaaaaaaaaaaaaaaaaaaaaaaaaaaaaaaaaaaaaaaaaaaaaaaaaaaaaaaaaaaaaaaaaaaaaaaaaaaaaaaaaaaaaaaaaaaa

SEQ ID NO: 20299 - RNA, 2073 nt, Artificial Sequence
  mRNA product Design b-4 (A100) comprising derived and/or modified sequence from LASV(LASV253-NIG-2011;Clade II)__AIT17671__SP-HsALB_NP(2-569) (opt1)
aggagagucccgcagucggcguccagcggcucugcuuguucgugugugugucguugcaggccuuauucaagcuuaccaugaagugggugaccuucaucagccugcucuuccuguucuccagcgccuacuccagcgccuccaaggaggugaaguccuuccuguggacccagagccuccgccgggagcugagcggcuacugcuccagcaucaagcugcaggucgugaaggacgcccaggcgcuccugcacgggcuggacuucuccgaggugagcaacguccagcgccucaugcggaagcagaagcgcgacgacuccgaccugaagcggcugcgcgaccucaaccaggccgugaacaaccugguggagcucaagagcacccagcagaaguccguccugcgggugggcacccugaccagcgacgaccugcucacccuggccgccgaccuggagaagcucaaguccaaggugauccgcaccgagcggccccugagcuccggggucuacaugggcaaccugagcacgcagcagcucgagcagcgccgggcccugcugaacaugaucgggauggugggcggcgcgcaggggacccagccgggccgcgacggggugguccgggugugggacgugaagaaccccgaccuccugaacaaccaguucggcaccaugcccucccugacccucgccugccugacgaagcaggggcaggucgaccugaacgacguggugcucgcccugaccgaccugggccucaucuacaccgccaaguaccccaacagcuccgaccuggaccgccugagccagagccacccgauccucaacauggucgacaccaagaaguccagccugaacaucuccggcuacaacuucagccugggggcggccgugaaggccggcgccugcaugcucgacgggggcaacaugcuggagacgaucaaggugacgccccagaccauggacggcauccugaaguccauccucaaggucaagaagucccuggggauguucgugagcgacacccccggcgagcggaaccccuacgagaacauccuguacaagaucugccucagcggggacggcuggccguacaucgccucccgcaccagcaucguggggcgggcgugggagaacaccaccgucgaccuggaguccgacggcaagccccagaaggugggcaccgccgggagcaacaagucccugcagagcgccggcuuccccacggggcucaccuacucccagcugaugacccugaaggacagcaugaugcagcuggaccccuccgccaagaccuggaucgacaucgagggccgcccggaggaccccgucgagaucgcccucuaccagcccaugagcgggugcuacauccacuucuuccgggagcccacggaccugaagcaguucaagcaggacgcgaaguacucccacggcaucgacgugaccgaccuguucccggcccagcccggccucaccagcgccgugaucgaggcccugccccgcaacaugguccugaccugccaggggagcgacgacaucaagcggcuccuggacucccagggccgccgcgacaucaagcugaucgacaucgcccucagcaaggcggacucccggcgcuucgagaacgccgugugggaccagugcaaggaccugugccacaugcacacggggguggucguggagaagaagaagcggggcgggaaggaggagaucacgccccacugcgcccugauggacugcaucauguacgacgccgccgugagcggcggccucaacaucccgguccugcgcgcggugcugccccgggacaugguguuccgcaccuccagccccaaggucgugcucugaggacuaguaauaaggaaacuguaugaaugucugugggcaggaagugaagagauccuucuguaaagguuuuuggaauuaugucugcugaauaauaaacuuuuuugaaauaauaaaucugguagaaaaaugagaucuaaaaaaaaaaaaaaaaaaaaaaaaaaaaaaaaaaaaaaaaaaaaaaaaaaaaaaaaaaaaaaaaaaaaaaaaaaaaaaaaaaaaaaaaaaaaaaaaaaaa

SEQ ID NO: 20300 - RNA, 2073 nt, Artificial Sequence
  mRNA product Design b-4 (A100) comprising derived and/or modified sequence from LASV(LASV254-NIG-2011;Clade II)__AIT17675__SP-HsALB_NP(2-569) (opt1)
aggagagucccgcagucggcguccagcggcucugcuuguucgugugugugucguugcaggccuuauucaagcuuaccaugaagugggugaccuucaucagccugcucuuccuguucuccagcgccuacuccagcgccuccaaggaggugaaguccuuccuguggacccagagccuccgccgggagcugagcggcuacugcuccagcaucaagcugcaggucgugaaggacgcccaggcgcuccugcacgggcuggacuucuccgaggugagcaacguccagcgccucaugcggaagcagaagcgcgacgacuccgaccugaagcggcugcgcgaccucaaccaggccgugaacaaccugguggagcucaagagcacccagcagaaguccguccugcgggugggcacgcugaccagcgacgaccugcucacccuggccgccgaccuggagaagcucaaguccaaggugauccgcaccgagcggccccugagcuccggggucuacaugggcaaccugagcacgcagcagcucgagcagcgccgggcccugcugaacaugaucgggauggugggcggcgcgcaggggacccagccgggccgcgacggggugguccgggugugggacgugaagaaccccgaccuccugaacaaccaguucggcaccaugcccucccugacccucgccugccugacgaagcaggggcaggucgaccugaacgacgccgugcucgcccugaccgaccugggccucaucuacaccgcgaaguaccccaacagcuccgaccuggaccgccugagccagagccacccgauccucaacaugguggacaccaagaaguccagccugaacaucuccggcuacaacuucagccugggggccgccgucaaggccggcgccugcaugcucgacgggggcaacaugcuggagacgaucaaggugacgccccagaccauggacggcauccugaaguccauccucaaggugaagaagucccuggggauguucgucagcgacacccccggcgagcggaaccccuacgagaacauccuguacaagaucugccucagcggggacggcuggccguacaucgcgucccgcaccagcaucguggggcgggccugggagaacaccaucguggaccuggaguccgacggcaagccccagaaggucggcaccgccgggagcaacaagucccugcagagcgccggcuuccccaccgggcucacguacucccagcugaugacccugaaggacagcaugaugcagcuggaccccuccgccaagaccuggaucgacaucgagggccgcccggaggaccccguggagaucgcgcucuaccagcccaugagcgggugcuacauccacuucuuccgggagcccaccgaccugaagcaguucaagcaggacgccaaguacucccacggcaucgacgucgccgaccuguucccggcccagcccggccucacgagcgccgugaucgaggcgcugccccgcaacauggugcugaccugccaggggagcgacgacaucaagcggcuccuggacucccagggccgccgcgacaucaagcugaucgacaucgcccucagcaaggccgacucccggcgcuucgagaacgccgucugggaccagugcaaggaccugugccacaugcacaccggggugguggucgagaagaagaagcggggcgggaaggaggagaucacgccccacugcgcccugauggacugcaucauguacgacgcggccgugagcggcggccucaacaucccggugcugcgcgccguccugccccgggacaugguguuccgcaccuccagccccaaggugguccucugaggacuaguaauaaggaaacuguaugaaugucugugggcaggaagugaagagauccuucuguaaagguuuuuggaauuaugucugcugaauaauaaacuuuuuugaaauaauaaaucugguagaaaaaugagaucuaaaaaaaaaaaaaaaaaaaaaaaaaaaaaaaaaaaaaaaaaaaaaaaaaaaaaaaaaaaaaaaaaaaaaaaaaaaaaaaaaaaaaaaaaaaaaaaaaaaa

SEQ ID NO: 20301 - RNA, 2073 nt, Artificial Sequence
  mRNA product Design b-4 (A100) comprising derived and/or modified sequence from LASV(Nig08-04;Clade II)__ADU56611__SP-HsALB_NP(2-569) (opt1)
aggagagucccgcagucggcguccagcggcucugcuuguucgugugugugucguugcaggccuuauucaagcuuaccaugaagugggugaccuucaucagccugcucuuccuguucuccagcgccuacuccagcgccuccaaggaggugaaguccuuccuguggacccagagccuccgccgggagcugagcggcuacugcuccaacaucaagcugcaggucgugaaggacgcccaggcgcuccugcacgggcuggacuucagcgagguguccaacguccagcgccucaugcggaagcagaagcgcgacgacggcgaccugaagcggcugcgcgaccucaaccaggccgugaacaaccugguggagcucaagagcacccagcagaaguccguccugcggguggggacccugaccagcgacgaccugcucacccuggccgccgaccuggagaagcucaaguccaaggugauccgcaccgagcggccccugagcuccggcgucuacauggggaaccugagcacgcagcagcucgagcagcgcaaggcccugcuguccaugaucggcauggugggcggggcgcagggcacccagccggggcgggacggcgugguccgcgugugggacgugaagaaccccgaccuccugaacaaccaguucgggaccaugcccagccugacccucgccugccugacgaagcagggccaggucgaccugaacgacgccgugcucgcccugaccgaccugggccucaucuacaccgcgaaguaccccaacuccagcgaccuggaccggcugucccagagccacccgauccucaacaugguggacaccaagaaguccagccugaacaucagcggguacaacuucucccugggcgccgccgucaaggccggggccugcaugcucgacggcggcaacaugcuggagacgaucaaggugacgccccagaccauggacgggauccucaagagcauccugaaggugaagcgcucccugggcauguucgucagcgacacccccggggagcggaaccccuacgagaacauccuguacaagaucugccucuccggcgacggguggccguacaucgcgagccgcaccuccaucgugggccgggccugggagaacaccaccguggaccuggagagcgacggcaagccccagaaggucgggaccgccggcuccaacaagagccugcaguccgccggguuccccacgggccucaccuacagccagcugaugacccugaaggacuccaugaugcagcuggaccccagcgccaagaccuggaucgacaucgaggggcgcccggaggaccccguggagaucgcgcucuaccagcccauguccggcugcuacauccacuucuuccgggagcccacggaccugaagcaguucaagcaggacgccaaguacagccacggcaucgacgucaccgaccuguucuccgcccagccggggcucaccagcgccgugaucgaggcccugccccgcaacauggugcugaccugccagggcagcgacgacaucaagaagcuccuggacucccaggggcggcgcgacaucaagcugaucgacaucagccucaacaaggcggacucccgccgguucgagaacgccgucugggaccagugcaaggaccugugccacaugcacacgggcgugguggucgagaagaagaagcgcgggggcaaggaggagaucacgccccacugcgcccugauggacugcaucauguucgacgccgccgugagcggcgggcucaacauccccauccugcgggcggugcugccgcgcgacauggucuuccggaccuccagccccaagguggugcucugaggacuaguaauaaggaaacuguaugaaugucugugggcaggaagugaagagauccuucuguaaagguuuuuggaauuaugucugcugaauaauaaacuuuuuugaaauaauaaaucugguagaaaaaugagaucuaaaaaaaaaaaaaaaaaaaaaaaaaaaaaaaaaaaaaaaaaaaaaaaaaaaaaaaaaaaaaaaaaaaaaaaaaaaaaaaaaaaaaaaaaaaaaaaaaaaa

SEQ ID NO: 20302 - RNA, 2076 nt, Artificial Sequence
  mRNA product Design b-4 (A100) comprising derived and/or modified sequence from LASV(GA391;Clade III)__AAA46284__SP-HsALB_NP(2-570) (opt1)
aggagagucccgcagucggcguccagcggcucugcuuguucgugugugugucguugcaggccuuauucaagcuuaccaugaagugggugaccuucaucagccugcucuuccuguucuccagcgccuacuccagcgccuccaaggaggugcgcagcugccuguggacccagucccuccggcgcgagcugagcggcuacugcuccaacaucaagcugcaggucgugaaggacgcccaggcgcuccugcacgggcuggacuucagcgagguguccaacguccagcggcucaugcgcaagcagaagcgggacgacggcgaccugaagcgccugcgggaccucaaccaggccgugaacaaccugguggagcugaaguccacccagcagaaguccguccuccgcguggggacgcugagcuccgacgaccugcucauccuggccgccgaccuggagaagcucaagagcaaggugacccggaccgagcgcccccuguccagcggcgucuacauggggaaccuguccagccagcagcucgaccagcggcgcgcccugcugaacaugaucggcaugaccggcguguccgggggcgggaagggcgcgagcaacgggaucgugcgggucugggacgugaagaacgccgagcuccugaacaaccaguucggcacgaugccgucccugacccucgccugccugaccaagcagggccagguggaccugaacgacgccguccaggcgcucaccgaccuggggcugaucuacacggccaaguaccccaacagcagcgaccucgaccgccugucccagagccaccccauccugaacaugaucgacaccaagaaguccagccucaacaucuccggcuacaacuucagccugggggccgccgugaaggccggcgcgugcaugcuggacggcgggaacaugcucgagaccaucaaggugagcccccagaccauggacggcauccucaagagcauccugaaggucaagaagucccuggggauguucgugagcgacacgccgggcgagcggaaccccuacgagaacauccuguacaagaucugccuguccggggacggcuggagcuacaucgccucccgcaccagcaucgugggccgggccugggagaacaccgucguggaccucgagcaggacaacaagccccagaagaucgggaacggcggguccaacaagagccugcaguccgccggcuucgccgcggggcugaucuacagccagcucaugacccugaaggacuucaagugcuucaaccugauccccaacgccaagacguggauggacaucgagggccgcccggaggaccccguggagaucgcccuguaccagcccuccagcggcugcuacguccacuucuuccgggagcccaccgaccucaagcaguucaagcaggacgccaaguacagccacgggcgcgacgugaccgaccuguucgccgcgcagccgggccugaccuccgccgucaucgaggcccucccccggaacauggugaucacgugccaggggagcgaggacauccgcaagcugcuggagucccagggccgccgggacaucaagcucaucgacaucacccugagcaaggccgacucccgcaaguucgagaacgccgugugggaccaguucaaggaccugugccacaugcacaccggggucgugguggagaagaagaagcggggcggcaaggaggagaucacgccccacugcgcgcucauggacugcaucauguucgacgccgccgucagcgggggccuggacgccaaggugcugcgcgugguccucccccgggacaugguguuccgcaccuccaccccgaaggugguccugugaggacuaguaauaaggaaacuguaugaaugucugugggcaggaagugaagagauccuucuguaaagguuuuuggaauuaugucugcugaauaauaaacuuuuuugaaauaauaaaucugguagaaaaaugagaucuaaaaaaaaaaaaaaaaaaaaaaaaaaaaaaaaaaaaaaaaaaaaaaaaaaaaaaaaaaaaaaaaaaaaaaaaaaaaaaaaaaaaaaaaaaaaaaaaaaaa

SEQ ID NO: 20303 - RNA, 2073 nt, Artificial Sequence
  mRNA product Design b-4 (A100) comprising derived and/or modified sequence from LASV(Nig08-A19;Clade III)__ADU56619__SP-HsALB_NP(2-569) (opt1)
aggagagucccgcagucggcguccagcggcucugcuuguucgugugugugucguugcaggccuuauucaagcuuaccaugaagugggugaccuucaucagccugcucuuccuguucuccagcgccuacuccagcgccuccaaggaggugaaguccuuccuguggacccagucccuccgccgggagcugagcggcuacugcuccaacaucaagcugcaggucgugaaggacgcccaggcgcuccugcacgggcuggacuucagcgagguguccaacguccagcgccucaugcggaagcagaagcgcgacgacggcgaccugaagcggcugcgcgaccucaaccaggccgugaacaaccugguggagcucaagagcacccagcagaaguccguccugcggguggggacccugagcuccgacgaccugcucgugcuggccgccgaccuggagaagcucaagagcaaggucgugcgcaccgagcggccccuguccagcggcaucuacauggggaaccuguccagccagcagcucgaccagcgcaaggcccugcugaacaugaucggcaugaccggcgggaacggcgggcggaacaccacguccgacggcaucgugcgcgucugggacgugaagaacgcggagcuccugaacaaccaguucgggaccaugccgagccugacccucgccugccugaccaagcagggccagguggaccugaacgacgccguccaggcccucacggaccugggccugaucuacaccgcgaaguaccccaacuccagcgaccucgaccggcuggcccagagccaccccauccugaacaugaucgacaccaagaaguccagccucaacaucuccggguacaacuucagccugggcgccgccgugaaggccggggcgugcaugcuggacggcggcaacaugcucgagaccaucaaggugagcccccagacgauggacgggauccucaagagcauccugaaggucaagcgcucccugggcauguucaucagcgacaccccgggggagcggaaccccuacgagaacauccuguacaagaucugccuguccggcgacggguggcccuacaucgccagccgcaccuccaucgugggccgggccugggagaacaccguggucgaccucgagagcgacaacaagccccagaagacgggcaacgggggcuccaacaagagccugcaguccgccggguucgccgcgggccugaccuacagccagcucaugacccugaaggacuccaugcugcagcuggacccgaacgccaagaccuggauggacaucgaggggcgccccgaggaccccguggagaucgcccucuaccagcccagcuccggcugcuacauccacuucuuccgggagccgacggaccugaagcaguucaagcaggacgccaaguacagccacggcaucgacgugaccgaccuguucgccgcgcagcccgggcucaccagcgccgucaucgaggcccugccccgcaacauggugaucacgugccagggcuccgaggacauccggaagcugcucgagagccaggggcgccgcgacaucaagcugaucgacaucucccugagcaaggucgacucccggaaguucgagaacgccgugugggaccaguucaaggaccucugccacaugcacaccggcaucguggucgagaagaagaagcgcgggggcaaggaggagaucacgccccacugcgcccugauggacugcaucauguucgacgcggccgugagcggcgggguggacgccaagguccugcgggccgugcucccgcgcgacaugguguuccggaccuccacccccaaggucgugcugugaggacuaguaauaaggaaacuguaugaaugucugugggcaggaagugaagagauccuucuguaaagguuuuuggaauuaugucugcugaauaauaaacuuuuuugaaauaauaaaucugguagaaaaaugagaucuaaaaaaaaaaaaaaaaaaaaaaaaaaaaaaaaaaaaaaaaaaaaaaaaaaaaaaaaaaaaaaaaaaaaaaaaaaaaaaaaaaaaaaaaaaaaaaaaaaaa

SEQ ID NO: 20304 - RNA, 2073 nt, Artificial Sequence
  mRNA product Design b-4 (A100) comprising derived and/or modified sequence from LASV(G1180-SLE-2010;Clade IV)__AIT17169__SP-HsALB_NP(2-569) (opt1)
aggagagucccgcagucggcguccagcggcucugcuuguucgugugugugucguugcaggccuuauucaagcuuaccaugaagugggugaccuucaucagccugcucuuccuguucuccagcgccuacuccagcgccuccaaggagaucaagagcuuccuguggacccagucccuccgccgggagcugagcggcuacugcuccaacaucaagcuccagguggucaaggacgcccaggcgcugcugcacgggcuggacuucagcgagguguccaacgugcagcgccucaugcggaaggagcgccgggacgacaacgaccugaagcgccugcgggaccucaaccaggccgucaacaaccugguggagcucaagagcacccagcagaaguccauccugcgcgugggcacccugaccagcgacgaccugcucauccuggccgccgaccuggagaagcucaaguccaaggucauccggaccgagcgcccccugagcgccgggguguacaugggcaaccuguccagccagcagcucgaccagcggcgcgcgcugcuguccaugaucgggaugagcuccggcaaccagcgggcccaggccggccgcgacggggugguccgggugugggacgugaagaacgucgagcuccugaacaaccaguucggcaccaugccgagccugacgcucgccugccugaccaagcagggccagguggaccugaacgacgcggugcaggcccucaccgaccuggggcugaucuacaccgccaaguaccccaacacguccgaccucgaccgccugacccagagccaccccauccugaacaugaucgacaccaagaaguccagccucaacaucagcggguacaacuucucccugggcgccgccgucaaggcgggcgccugcaugcuggacgggggcaacaugcucgagaccaucaaggugagcccccagacgauggacgggauccugaaguccauccugaaggugaagaaggcccucggcauguucaucagcgacaccccgggcgagcggaaccccuacgagaacauccuguacaagaucugccuguccggggacggcuggcccuacaucgccagccgcaccuccaucaccgggcgggccugggagaacacggucguggaccucgagagcgacggcaagccccagaaggcgggguccaacaacagcaacaagucccugcagagcgugggcuucaccgccggccugaccuacucccagcucaugacccugaaggacgccaugcugcagcuggacccgaacgccaagacguggauggacaucgaggggcgccccgaggaccccgucgagaucgcccucuaccagcccagcuccggcugcuacauccacuucuuccgggagccgaccgaccugaagcaguucaagcaggacgcgaaguacagccacgggaucgacgugaccgaccuguucgccgcccagcccggccucaccuccgccgugaucgacgcccugccccgcaacauggucaucacgugccaggggagcgacgacauccgcaagcugcucgagagccagggccggaaggacaucaagcugaucgacaucgcgcuguccaagaccgacagccgcaaguacgagaacgccgugugggaccaguacaaggaccucugccacaugcacaccggcgucgugguggagaagaagaagcgcgggggcaaggaggagaucacgccccacugcgcccugauggacugcaucauguucgacgccgcggucuccgggggccugaacaccagcgugcuccgggccgugcugccgcgggacauggucuuccgcaccuccacgccccggguggugcugugaggacuaguaauaaggaaacuguaugaaugucugugggcaggaagugaagagauccuucuguaaagguuuuuggaauuaugucugcugaauaauaaacuuuuuugaaauaauaaaucugguagaaaaaugagaucuaaaaaaaaaaaaaaaaaaaaaaaaaaaaaaaaaaaaaaaaaaaaaaaaaaaaaaaaaaaaaaaaaaaaaaaaaaaaaaaaaaaaaaaaaaaaaaaaaaaa

SEQ ID NO: 20305 - RNA, 2073 nt, Artificial Sequence
  mRNA product Design b-4 (A100) comprising derived and/or modified sequence from LASV(G1442-SLE-2011;Clade IV)__AIT17181__SP-HsALB_NP(2-569) (opt1)
aggagagucccgcagucggcguccagcggcucugcuuguucgugugugugucguugcaggccuuauucaagcuuaccaugaagugggugaccuucaucagccugcucuuccuguucuccagcgccuacuccagcgccuccaaggaggugaaguccuuccuguggacccagagccuccgccgggagcugagcggcuacugcuccaacaucaagcugcaggucgugaaggacgcccaggcgcuccugcacgggcuggacuucagcgagguguccaacguccagcgccucaugcggaagcagcgccgggacgacaacgaccugaagcgccugcgggaccucaaccaggccgugaacaaccugguggagcucaagagcacccagcagaaguccguccugcgcgugggcacccugaccagcgacgaccugcucgugcuggccgccgaccuggagaagcucaaguccaaggucauccggaccgagcgcccccugagcgccgggguguacaugggcaaccuguccagccagcagcucgaccagcggcgcgcgcugcugaacaugaucgggauguccggcggcauccaggggacccggacgggccgcgacggggugguccgggugugggacgugaagaacgccgaccuccugaacaaccaguucggcaccaugccgagccugacccucgccugccugaccaagcaggggcaggucgaccugaacgacguggugcaggcccucacggaccugggccugaucuacaccgcgaaguaccccaacgccuccgaccucgaccgccugacccagagccaccccauccugaacaugaucgacaccaagaaguccagccucaacaucagcggcuacaacuucucccugggggccgccgucaaggccggcgcgugcaugcuggacgggggcaacaugcucgagacgaucaaggugagcccccagaccauggacggcauccugaaguccauccugaaggugaagaagacccucgggauguucaucagcgacaccccgggcgagcggaaccccuacgagaacauccuguacaagaucugccuguccggggacggcuggcccuacaucgccagccgcacguccaucaccgggcgggccugggagaacaccgucguggaccucgagagcgacggcaagccccagaaggccggcuccaacaacagcaacaagucccugcagagcgccggguucgcggccggccugaccuacucccagcucaugacgcugaaggacgccaugcugcagcuggacccgaacgccaagaccuggauggacaucgaggggcgccccgaggaccccguggagaucgcccucuaccagcccagcuccggcugcuacauccacuucuuccgggagccgaccgaccugaagcaguucaagcaggacgcgaaguacagccacgggaucgacgucaccgaccuguucgccgcccagcccggccucacguccgccgugaucgaggcccugccccgcaacauggucaucacgugccagggcagcgacgacaucaagaagcugcucgagucccaggggcgcaaggacaucaagcugaucgacaucgcgcugagcaagaccgacagccggaaguacgagaacgccgugugggaccaguacaaggaccucugccacaugcacaccggcguggucguggagaagaagaagcgcgggggcaaggaggagaucaccccgcacugcgcccugauggacugcaucauguucgacgccgcgguguccgggggccugaacacccucguccugcgggccgugcugccccgcgacaugguguuccggaccagcacgccccgcgucgugcucugaggacuaguaauaaggaaacuguaugaaugucugugggcaggaagugaagagauccuucuguaaagguuuuuggaauuaugucugcugaauaauaaacuuuuuugaaauaauaaaucugguagaaaaaugagaucuaaaaaaaaaaaaaaaaaaaaaaaaaaaaaaaaaaaaaaaaaaaaaaaaaaaaaaaaaaaaaaaaaaaaaaaaaaaaaaaaaaaaaaaaaaaaaaaaaaaa

SEQ ID NO: 20306 - RNA, 2073 nt, Artificial Sequence
  mRNA product Design b-4 (A100) comprising derived and/or modified sequence from LASV(G3010-SLE-2013;Clade IV)__AIT17345__SP-HsALB_NP(2-569) (opt1)
aggagagucccgcagucggcguccagcggcucugcuuguucgugugugugucguugcaggccuuauucaagcuuaccaugaagugggugaccuucaucagccugcucuuccuguucuccagcgccuacuccagcgccuccaaggagaucaagagcuuccuguggacccagucccuccgccgggagcugagcggcuacugcuccaacaucaagcuccagguggucaaggacgcccaggcgcugcugcacgggcuggacuucagcgagguguccaacgugcagcgccucaugcggaaggagcgccgggacgacaacgaccugaagcgccugcgggaccucaaccaggccgucaacaaccugguggagcucaagagcacccagcagaaguccauccugcgcgugggcacccugaccagcgacgaccugcucauccuggccgccgaccuggagaagcucaaguccaaggucacccggaccgagcgcccccugagcgccgggguguacaugggcaaccuguccagccagcagcucgaccagcggcgcgcgcugcuguccaugaucgggaugagcuccggcgugcagggcgcccgggccgggcgcgacggcgucgugcgggugugggacgucaagaacgccgagcuccugaacaaccaguucgggacgaugccgagccugacccucgcgugccugaccaagcagggccagguggaccugaacgacgugguccaggcccucaccgaccuggggcugaucuacacggccaaguaccccaacaccuccgaccucgaccgccugacccagagccaccccauccugaacaugaucgacaccaagaaguccagccucaacaucagcggcuacaacuucucccugggcgccgccgugaaggcgggggccugcaugcuggacggcgggaacaugcucgagacgaucaaggugagcccccagaccauggacggcauccugaaguccauccugaaggucaagaaggcccucggcauguucaucagcgagaccccgggggagcggaaccccuacgagaacauccuguacaagaucugccuguccggcgacggguggcccuacaucgccagccgcaccuccaucacgggccgggccugggagaacaccgugguggaccucgagagcgacgggaagccccagaaggcgggcuccaacaacagcaacaagucccugcagagcgccggcuucaccgccgggcugaccuacucccagcucaugacgcugaaggacgccaugcugcagcuggacccgaacgccaagaccuggauggacaucgagggccgccccgaggaccccgucgagguggcgcucuaccagcccagcuccgggugcuacauccacuucuuccgggagccgaccgaccugaagcaguucaagcaggacgccaaguacagccacggcaucgacgugaccgaccuguucgccgcccagcccgggcucacguccgccgucaucgacgcgcugccccgcaacauggugaucacgugccagggcagcgacgacaucaagaagcugcucgagagccagggccgcaaggacaucaagcugaucgacaucgcccuguccaagaccgacagccggaaguacgagaacgccgucugggaccaguacaaggaccucugccacaugcacaccggggugguggucgagaagaagaagcgcggcgggaaggaggagaucaccccgcacugcgcccugauggacugcaucauguucgacgcggccguguccggcgggcugaacaccagcgugcuccgggccguccugccccgcgacaugguguuccggaccuccacgccccgcgugguccugugaggacuaguaauaaggaaacuguaugaaugucugugggcaggaagugaagagauccuucuguaaagguuuuuggaauuaugucugcugaauaauaaacuuuuuugaaauaauaaaucugguagaaaaaugagaucuaaaaaaaaaaaaaaaaaaaaaaaaaaaaaaaaaaaaaaaaaaaaaaaaaaaaaaaaaaaaaaaaaaaaaaaaaaaaaaaaaaaaaaaaaaaaaaaaaaaa

SEQ ID NO: 20307 - RNA, 2073 nt, Artificial Sequence
  mRNA product Design b-4 (A100) comprising derived and/or modified sequence from LASV(G502-SLE-2009;Clade IV)__AIT17127__SP-HsALB_NP(2-569) (opt1)
aggagagucccgcagucggcguccagcggcucugcuuguucgugugugugucguugcaggccuuauucaagcuuaccaugaagugggugaccuucaucagccugcucuuccuguucuccagcgccuacuccagcgccuccaaggagaucaagagcuuccuguggacccagucccuccgccgggagcugagcggcuacugcuccaacaucaagcuccagguggucaaggacgcccaggcgcugcugcacgggcuggacuucagcgagguguccaacgugcagcgccucaugcggaaggagcgccgggacgacaacgaccugaagcgccugcgggaccucaaccaggccgucaacaaccugguggagcucaagagcacccagcagaaguccauccugcgcgugggcacccugaccagcgacgaccugcucauccuggccgccgaccuggagaagcucaaguccaaggucauccggaccgagcgcccccugagcgccgggguguacaugggcaaccuguccagccagcagcucgaccagcggcgcgcgcugcuguccaugaucgggaugagcggcggcaaccagggggugcgggccggcaaggacggggucgugcgcgugugggacgucaagaacgccgagcuccugaacaaccaguucggcaccaugccgucccugacgcucgccugccugaccaagcagggccagguggaccugaacgacgcggugcaggcccucaccgaccuggggcugaucuacaccgccaaguaccccaacacgagcgaccucgaccggcugacccagucccaccccauccugaacaugaucgacaccaagaaguccagccucaacaucuccggcuacaacuucagccugggggccgccgucaaggcgggcgccugcaugcuggacgggggcaacaugcucgagaccaucaaggugagcccccagacgauggacggcauccucaagagcauccugaaggugaagaaggcccuggggauguucaucuccgacaccccgggcgagcgcaaccccuacgagaacauccuguacaagaucugccugagcggggacggcuggcccuacaucgccucccggaccagcaucaccgggcgcgccugggagaacacggucguggaccucgaguccgacggcaagccccagaaggcgggcagcaacaacuccaacaagagccugcaguccgccggguucaccgccggccugaccuacagccagcucaugacccugaaggacgccaugcugcagcuggacccgaacacgaagaccuggauggacaucgaggggcggcccgaggaccccguggagaucgcccucuaccagcccuccagcggcugcuacauccacuucuuccgcgagccgaccgaccugaagcaguucaagcaggacgcgaaguacucccacgggaucgacgucaccgaccuguucgccgcccagcccggccucacgagcgccgugaucgacgcccugccccggaacauggugaucacgugccagggcuccgacgacauccgcaagcugcucgagagccaggggcgcaaggacaucaagcugaucgacaucgcgcugaacaagaccgacagccggaaguacgagaacgccgucugggaccaguacaaggaccucugccacaugcacaccggcguggucguggagaagaagaagcgcgggggcaaggaggagaucaccccgcacugcgcccugauggacugcaucauguucgacgccgcgguguccgggggccugaacaccagcguccuccgggccgugcugccccgcgacaugguguuccggaccuccacgccccgcgucgugcugugaggacuaguaauaaggaaacuguaugaaugucugugggcaggaagugaagagauccuucuguaaagguuuuuggaauuaugucugcugaauaauaaacuuuuuugaaauaauaaaucugguagaaaaaugagaucuaaaaaaaaaaaaaaaaaaaaaaaaaaaaaaaaaaaaaaaaaaaaaaaaaaaaaaaaaaaaaaaaaaaaaaaaaaaaaaaaaaaaaaaaaaaaaaaaaaaa

SEQ ID NO: 20308 - RNA, 2073 nt, Artificial Sequence
  mRNA product Design b-4 (A100) comprising derived and/or modified sequence from LASV(G733-SLE-2010;Clade IV)__AIT17155__SP-HsALB_NP(2-569) (opt1)
aggagagucccgcagucggcguccagcggcucugcuuguucgugugugugucguugcaggccuuauucaagcuuaccaugaagugggugaccuucaucagccugcucuuccuguucuccagcgccuacuccagcgccuccaaggagaucaagagcuuccuguggacccagucccuccgccgggagcugagcggcuacugcuccaacaucaagcuccagguggucaaggacgcccaggcgcugcugcacgggcuggacuucagcgagguguccaacgugcagcgccucaugcggaaggagcgccgggacgacaacgaccugaagcgccugcgggaccucaaccaggccgucaacaaccugguggagcucaagagcacccagcagaaguccgugcugcgcgucggcacccugaccagcgacgagcugcucgugcuggccgccgaccuggagaagcucaaguccaaggugauccggaccgagcgcccccugagcgccggggucuacaugggcaaccuguccagccagcagcucgaccagcggcgcgcgcugcuguccaugaucgggaugagcggcggcaaccagggggcccggaccggccgcgacgggguggugcgggucugggacgugaagaacgccgagcuccugaacaaccaguucggcaccaugccgucccugacccucgccugccugaccaagcagggccagguggaccugaacgacgcgguccaggcccucaccgaccuggggcugaucuacacggccaaguaccccaacaccagcgaccucgaccgccugacccagucccaccccauccugaacaugaucgacaccaagaaguccagccucaacaucuccggcuacaacuucagccugggggccgccgugaaggcgggcgccugcaugcuggacgggggcaacaugcucgagacgaucaaggugagcccccagaccauggacggcauccucaagagcauccugaaggucaagaaggcccuggggauguucaucuccgacaccccgggcgagcggaaccccuacgagaacauccuguacaagaucugccugagcggggacggcuggcccuacaucgccucccgcaccagcaucacggggcgggccugggagaacaccgugguggaccucgaguccgacggcaagccccagaaggcgggcagcaacaacuccaacaagagccugcaguccgccggguucaccgccggccugaccuacagccagcucaugacgcugaaggacgccaugcugcagcuggacccgaacgccaagaccuggauggacaucgaggggcgccccgaggaccccgucgagaucgcgcucuaccagcccuccagcggcugcuacauccacuucuuccgggagccgaccgaccugaagcaguucaagcaggacgccaaguacucccacgggaucgacgugaccgaccuguucgccgcccagcccggccucacgagcgccgugaucgacgcgcugccccgcaacauggucaucacgugccagggcuccgacgacauccgcaagcugcucgagagccaggggcggaaggacaucaagcugaucgacaucgcccugagcaagaucgacucccgcaaguacgagaacgccgugugggaccaguacaaggaccucugccacaugcacaccggcgucgugguggagaagaagaagcgcgggggcaaggaggagaucacgccccacugcgcccugauggacugcaucauguucgacgcggccgucagcgggggccugaacucccucgugcugcgggccgugcugccgcgggacauggucuuccgcaccagcacgccccggguggugcucugaggacuaguaauaaggaaacuguaugaaugucugugggcaggaagugaagagauccuucuguaaagguuuuuggaauuaugucugcugaauaauaaacuuuuuugaaauaauaaaucugguagaaaaaugagaucuaaaaaaaaaaaaaaaaaaaaaaaaaaaaaaaaaaaaaaaaaaaaaaaaaaaaaaaaaaaaaaaaaaaaaaaaaaaaaaaaaaaaaaaaaaaaaaaaaaaa

SEQ ID NO: 20309 - RNA, 2073 nt, Artificial Sequence
  mRNA product Design b-4 (A100) comprising derived and/or modified sequence from MOPV/LASV reassortant(IGS-1;Clade IV)__AFY05578__SP-HsALB_NP(2-569) (opt1)
aggagagucccgcagucggcguccagcggcucugcuuguucgugugugugucguugcaggccuuauucaagcuuaccaugaagugggugaccuucaucagccugcucuuccuguucuccagcgccuacuccagcgccuccaaggagaucaagagcuuccuguggacccagucccuccgccgggagcugagcggcuacugcuccaacaucaagcuccagguggucaaggacgcccaggcgcugcugcacgggcuggacuucagcgagguguccaacgugcagcgccucaugcggaaggagcgccgggacgacaacgaccugaagcgccugcgggaccucaaccaggccgucaacaaccugguggagcucaagagcacccagcagaaguccauccugcgcgugggcacccugaccagcgacgaccugcucauccuggccgccgaccuggagaagcuccgguccaaggucauccgcaccgagcggccccugagcgccgggguguacaugggcaaccuguccagccagcagcucgaccagcgccgggcgcugcugaacaugaucgggauguccggcggcaaccagggggcccgcgccggccgggacggggugguccgcgugugggacgugaagaacgccgagcuccugagcaaccaguucggcaccaugccgucccugacgcucgcgugccugaccaagcaggggcaggucgaccugaacgacgccgugcaggcccucaccgaccugggccugaucuacaccgccaaguaccccaacacgagcgaccucgaccggcugacccagucccaccccauccugaacaugaucgacaccaagaaguccagccucaacaucuccggcuacaacuucagccugggggccgcggugaaggccggcgccugcaugcuggacgggggcaacaugcucgagaccaucaaggucagcccccagacgauggacggcauccucaagagcauccugaaggugaagaaggcccuggggauguucaucuccgacaccccgggcgagcgcaaccccuacgagaacauccuguacaagaucugccugagcggggacggcuggcccuacaucgccucccggaccagcaucaccgggcgcgcgugggagaacacgguggucgaccucgaguccgacggcaagccccagaaggccgacagcaacaacuccagcaagucccugcagagcgccggcuucaccgccgggcugaccuacucccagcucaugacccugaaggacgccaugcugcagcuggacccgaacgcgaagacguggauggacaucgagggccggcccgaggaccccguggagaucgcccucuaccagcccagcuccgggugcuacauccacuucuuccgcgagccgaccgaccugaagcaguucaagcaggacgccaaguacagccacggcaucgacgugaccgaccuguucgccacccagcccgggcucacguccgccgucaucgacgcgcugccccgcaacauggugaucacgugccagggcagcgacgacauccggaagcugcucgagagccagggccgcaaggacaucaagcugaucgacaucgaccuguccaagaccgacagccggaaguacgagaacgccgugugggaccaguacaaggaccucugccacaugcacaccggggucguggucgagaagaagaagcgcggcgggaaggaggagaucaccccgcacugcgcccugauggacugcaucauguucgacgccgcgguguccggcgggcugaacaccagcgugcuccgggccguccugccccgcgacaugguguuccggaccuccacgccccgcgugguccugugaggacuaguaauaaggaaacuguaugaaugucugugggcaggaagugaagagauccuucuguaaagguuuuuggaauuaugucugcugaauaauaaacuuuuuugaaauaauaaaucugguagaaaaaugagaucuaaaaaaaaaaaaaaaaaaaaaaaaaaaaaaaaaaaaaaaaaaaaaaaaaaaaaaaaaaaaaaaaaaaaaaaaaaaaaaaaaaaaaaaaaaaaaaaaaaaa

SEQ ID NO: 20310 - RNA, 2073 nt, Artificial Sequence
  mRNA product Design b-4 (A100) comprising derived and/or modified sequence from LASV(LM765-SLE-2012;Clade IV)__AIT17815__SP-HsALB_NP(2-569) (opt1)
aggagagucccgcagucggcguccagcggcucugcuuguucgugugugugucguugcaggccuuauucaagcuuaccaugaagugggugaccuucaucagccugcucuuccuguucuccagcgccuacuccagcgccuccaaggagaucaagagcuuccuguggacccagucccuccgccgggagcugagcggcuacugcuccaacaucaagcuccagguggucaaggacgcccaggcgcugcugcacgggcuggacuucagcgagguguccaacgugcagcgccucaugcggaaggagcgccgggacgacaacgaccugaagcgccugcgggaccucaaccaggccgucaacaaccugguggagcucaagagcacccagcagaaguccauccugcgcgugggcacccugaccagcgacgaccugcucauccuggccgccgaccuggagaagcucaaguccaaggucacccggaccgagcgcccccugagcgccgggguguacaugggcaaccuguccagccagcagcucgaccagcggcgcgcgcugcuggacaugaucgggauguccggcagcaaccagggcgcccgggccgggcgcgacggcgugguccgggugugggacgugaagaacgccgagcuccugaacaaccaguucgggacgaugccgucccugacccucgcgugccugaccaagcagggccaggucgaccugaacgacgccgugcaggcccucaccgaccuggggcugaucuacacggccaaguaccccaacaccagcgaccucgaccgccugacccagucccaccccauccugaacaugaucgacaccaagaaguccagccucaacaucuccggcuacaacuucagccugggcgccgcggugaaggccggggccugcaugcuggacggcgggaacaugcucgagacgaucaaggucagcccccagaccauggacggcauccucaagagcauccugaaggugaagaaggcccugggcauguucaucuccgacgccccgggggagcggaaccccuacgagaacauccuguacaagaucugccugagcggcgacggguggcccuacaucgcgucccgcaccagcaucaccggccgggccugggagaacacgguggucgaccucgaguccgacgggaagccccagaaggccggcagcaacggcuccaacaagagccugcaguccgccggguucaccgccggccugaccuacagccagcucaugacccugaaggacgcgaugcugcagcuggacccgaacgccaagacguggauggacaucgaggggcgccccgaggaccccguggagaucgcccucuaccagcccuccagcggcugcuacauccacuucuuccgggagccgaccgaccugaagcaguucaagcaggacgccaaguacucccacgggaucgacgugaccgaccuguucgccgcgcagcccggccucaccagcgccgucaucgacgcccugccccgcaacauggugaucacgugccagggcuccgacgacauccgcaagcuguucgagagccaggggcggaaggacaucaagcucaucgacaucgcccugagcaagaccgacucccgcaaguacgagaacgcggugugggaccaguacaaggaccugugccacaugcacaccggcaucgucguggagaagaagaagcgcgggggcaaggaggagaucacgccccacugcgcccucauggacugcaucauguucgacgccgccgucagcgggggccugaacaccuccgugcugcgggccgugcucccgcgggacauggucuuccgcaccagcacgccccggguggugcugugaggacuaguaauaaggaaacuguaugaaugucugugggcaggaagugaagagauccuucuguaaagguuuuuggaauuaugucugcugaauaauaaacuuuuuugaaauaauaaaucugguagaaaaaugagaucuaaaaaaaaaaaaaaaaaaaaaaaaaaaaaaaaaaaaaaaaaaaaaaaaaaaaaaaaaaaaaaaaaaaaaaaaaaaaaaaaaaaaaaaaaaaaaaaaaaaa

SEQ ID NO: 20311 - RNA, 2073 nt, Artificial Sequence
  mRNA product Design b-4 (A100) comprising derived and/or modified sequence from LASV(LM776-SLE-2012;Clade IV)__AIT17825__SP-HsALB_NP(2-569) (opt1)
aggagagucccgcagucggcguccagcggcucugcuuguucgugugugugucguugcaggccuuauucaagcuuaccaugaagugggugaccuucaucagccugcucuuccuguucuccagcgccuacuccagcgccuccaaggagaucaagagcuuccuguggacccagucccuccgccgggagcugagcuccuacugcagcaacaucaagcuccagguggucaaggacgcccaggcgcugcugcacggccuggacuucuccgaggugagcaacgugcagcgccucaugcggaaggagcgccgggacgacaacgaccugaagcgccugcgggaccucaaccaggccgucaacaaccugguggagcugaaguccacccagcagaaguccauccuccgcguggggacccugaccuccgacgaccugcucauccuggccgccgaccuggagaagcucaagagcaaggucacccggaccgagcgcccccuguccgccggcguguacauggggaaccugagcucccagcagcucgaccagcggcgcgcgcugcugagcaugaucggcauguccgggagcaaccagggcgcccgggccggccgcgacggggugguccgggugugggacgugaagaacgccgagcuccugaacaaccaguucggcacgaugccgucccugacccucgcgugccugaccaagcaggggcaggucgaccugaacgacgccgugcaggcccucaccgaccugggccugaucuacacggccaaguaccccaacaccagcgaccucgaccgccugacccagagccaccccauccugaacaugaucgacaccaagaaguccagccucaacaucuccggguacaacuucagccugggcgccgcggugaaggccggcgccugcaugcuggacgggggcaacaugcucgagacgaucaaggucagcccccagaccauggacgggauccucaagagcauccugaaggugaagaaggcccugggcauguucaucuccgacaccccgggcgagcggaaccccuacgagaacauccuguacaagaucugccugagcggggacggcuggcccuacaucgccucccgcaccagcaucacggggcgggcgugggagaacaccguggucgaccucgaguccgacggcaagccccagaaggccgggagcaacaacuccaacaagagccugcaguccgccggcuucaccgccggccugaccuacagccagcucaugacgcugaaggacgccaugcugcagcuggacccgaacgcgaagaccuggauggacaucgaggggcgccccgaggaccccguggagguggcccucuaccagcccuccagcggcugcuacauccacuucuuccgggagccgaccgaccugaagcaguucaagcaggacgccaaguacucccacgggaucgacgucaccgaccuguucgccgcccagcccggccucacgagcgcggugaucgacgcccugccccgcaacauggugaucacgugccaggggagcgacgacauccgcaagcugcucgagucccagggccggaaggacaucaagcugaucgacaucgcccugagcaagaccgacucccgcaaguacgagaacgccgucugggaccaguacaaggaccucugccacaugcacaccggcguggucguggagaagaagaagcgcgggggcaaggaggagaucaccccgcacugcgcgcugauggacugcaucauguucgacgccgccgugagcgggggccugaacaccuccguccuccgggccgugcugccccgggacaugguguuccgcaccagcacgccccgggucgugcugugaggacuaguaauaaggaaacuguaugaaugucugugggcaggaagugaagagauccuucuguaaagguuuuuggaauuaugucugcugaauaauaaacuuuuuugaaauaauaaaucugguagaaaaaugagaucuaaaaaaaaaaaaaaaaaaaaaaaaaaaaaaaaaaaaaaaaaaaaaaaaaaaaaaaaaaaaaaaaaaaaaaaaaaaaaaaaaaaaaaaaaaaaaaaaaaaa

SEQ ID NO: 20312 - RNA, 2073 nt, Artificial Sequence
  mRNA product Design b-4 (A100) comprising derived and/or modified sequence from LASV(Mad39;Clade IV)__ANH09723__SP-HsALB_NP(2-569) (opt1)
aggagagucccgcagucggcguccagcggcucugcuuguucgugugugugucguugcaggccuuauucaagcuuaccaugaagugggugaccuucaucagccugcucuuccuguucuccagcgccuacuccagcgccuccaaggagaucaagagcuuccuguggacccagucccuccgccgggagcugagcggcuacugcuccaacaucaagcuccagguggucaaggacgcccaggcgcugcugcacgggcuggacuucagcgagguguccaacgugcagcgccucaugcggaagcagcgccgggacgacaacgaccugaagcgccugcgggaccucaaccaggccgucaacaaccugguggagcugaaguccacccagcagaaguccgugcuccgcgucggcacgcugaccagcgacgaccugcucacccuggccgccgaccuggagaagcucaaguccaaggugacccggacggagcgcccccugaccgccgggguguacaugggcaaccugagcucccagcagcucgaccagcggcgcgcgcugcugaacaugaucgggaugagcggcggcaaccagggggcccggaccggccgcgacggggucgugcgggugugggacgucaagaacgccgagcuccugaacaaccaguucggcaccaugccgucccugacgcucgccugccugaccaagcagggccagguggaccugaacgacgugguccaggcgcucaccgaccuggggcugaucuacaccgccaaguaccccaacacgagcgaccucgaccgccugacccagucccaccccauccugaacaugaucgacaccaacaagagcucccucaacaucagcggcuacaacuucagccugggggccgccgugaaggccggcgcgugcaugcuggacgggggcaacaugcucgagaccaucaaggugagcccccagacgauggacggcauccucaagagcauccugaaggucaagaagucccuggggauguucaucagcgacaccccgggcgagcggaaccccuacgagaacauccuguacaagaucugccuguccggggacggcuggcccuacaucgccagccgcaccuccaucaccgggcgggccugggagaacacggugguggaccucgagagcggcggcaagccccagaaggccggguccaacaacagcaacaagucccugcagagcgccggcuucgcggccgggcugaccuacucccagcucaugacccugaaggacgccaugcugcagcuggacccgaacgccaagaccuggauggacaucgagggccgccccgaggaccccgucgagaucgcccucuaccagcccaucagcgggugcuacauccacuucuuccgggagccgacggaccugaagcaguucaagcaggacgcgaaguacucccacggcaucgacgugaccgaccuguucgccgcccagcccggccucaccagcgccgugaucgaggcccugccccgcaacauggucaucacgugccagggguccgacgacauccgcaagcuguucgagagccagggccggaaggacaucaagcucaucgacaucgcgcuguccaagaccgacagccgcaaguacgagaacgccgugugggaccaguacaaggaccugugccacaugcacaccggggucgugguggagaagaagaagaagggcgggaaggaggagaucacgccccacugcgcccucauggacugcaucauguucgacgccgcggucagcggcggccugaacacccuggugcuccgggccgugcugccgcgcgacauggucuuccggaccuccacccccaagguggugcugugaggacuaguaauaaggaaacuguaugaaugucugugggcaggaagugaagagauccuucuguaaagguuuuuggaauuaugucugcugaauaauaaacuuuuuugaaauaauaaaucugguagaaaaaugagaucuaaaaaaaaaaaaaaaaaaaaaaaaaaaaaaaaaaaaaaaaaaaaaaaaaaaaaaaaaaaaaaaaaaaaaaaaaaaaaaaaaaaaaaaaaaaaaaaaaaaa

SEQ ID NO: 20313 - RNA, 2073 nt, Artificial Sequence
  mRNA product Design b-4 (A100) comprising derived and/or modified sequence from LASV(Z0947-SLE-2011;Clade IV)__AIT17841__SP-HsALB_NP(2-569) (opt1)
aggagagucccgcagucggcguccagcggcucugcuuguucgugugugugucguugcaggccuuauucaagcuuaccaugaagugggugaccuucaucagccugcucuuccuguucuccagcgccuacuccagcgccuccaaggagaucaagagcuuccuguggacccagucccuccgccgggagcugagcggcuacugcuccaacaucaagcuccagguggucaaggacgcccaggcgcugcugcacgggcuggacuucagcgagguguccaacgugcagcgccucaugcggaaggagcgccgggacgacaacgaccugaagcgccugcgggaccucaaccaggccgucaacaaccugguggagcucaagagcacccagcagaaguccauccugcgcgugggcacccugaccagcgacgaccugcucauccuggccgccgaccuggagaagcucaaguccaaggucacccggaccgagcgcccccugagcgccgggguguacaugggcaaccuguccagccagcagcucgaccagcggcgcgcgcugcugaacaugaucgggauguccggcagcaaccagggcgcccggacggggcgcgacggcgugguccgggugugggacgugaagaacgccgagcuccugaacaaccaguucgggaccaugccgucccugacccucgccugccugaccaagcagggccaggucgaccugaacgacgcggugcaggcccucacggaccuggggcugaucuacaccgccaaguaccccaacaccagcgaccucgaccgccugacccagucccaccccauccugaacaugaucgacacgaagaaguccagccucaacaucuccggcuacaacuucagccugggcgccgccgugaaggcgggggccugcaugcuggacggcgggaacaugcucgagaccaucaaggucagcccccagaccauggacggcauccucaagagcauccugaaggugaagaaggcccugggcauguucaucuccgacgccccgggggagcggaaccccuacgagaacauccuguacaagaucugccugagcggcgacggguggcccuacaucgccucccgcaccagcaucacgggccgggcgugggagaacaccguggucgaccucgaguccgacgggaagccccagaaggccggcagcaacggcuccaacaagagccugcaguccgccggguucaccgccggccugaccuacagccagcucaugacgcugaaggacgccaugcugcagcuggacccgaacgcgaagaccuggauggacaucgaggggcgccccgaggaccccguggagaucgcccucuaccagcccuccagcggcugcuacauccacuucuuccgggagccgaccgaccugaagcaguucaagcaggacgccaaguacucccacgggaucgacgugaccgaccuguucgccgcccagcccggccucacgagcgcggucaucgacgcccugccccgcaacauggugaucacgugccagggcuccgacgacauccgcaagcuguucgagagccaggggcggaaggacaucaagcucaucgacaucgcccugagcaagaccgacucccgcaaguacgagaacgccgugugggaccaguacaaggaccugugccacaugcacaccggcaucgucguggagaagaagaagcgcgggggcaaggaggagaucaccccgcacugcgcgcucauggacugcaucauguucgacgccgccgucagcgggggccugaacaccuccgugcugcgggccgugcucccccgggacauggucuuccgcaccagcacgccccggguggugcugugaggacuaguaauaaggaaacuguaugaaugucugugggcaggaagugaagagauccuucuguaaagguuuuuggaauuaugucugcugaauaauaaacuuuuuugaaauaauaaaucugguagaaaaaugagaucuaaaaaaaaaaaaaaaaaaaaaaaaaaaaaaaaaaaaaaaaaaaaaaaaaaaaaaaaaaaaaaaaaaaaaaaaaaaaaaaaaaaaaaaaaaaaaaaaaaaa

SEQ ID NO: 20314 - RNA, 2073 nt, Artificial Sequence
  mRNA product Design b-4 (A100) comprising derived and/or modified sequence from LASV(Josiah;Clade IV)__NP_694869__SP-HsALB_NP(2-569) (opt4)
aggagagucccgcagucggcguccagcggcucugcuuguucgugugugugucguugcaggccuuauucaagcuuaccaugaagugggugaccuucaucagccugcuguuccuguucagcagcgccuacagcagcgccagcaaggagaucaagagcuuccuguggacccagagccugagaagagagcugagcggcuacugcagcaacaucaagcugcagguggugaaggacgcccaggcccugcugcacggccuggacuucagcgaggugagcaacgugcagagacugaugagaaaggagagaagagacgacaacgaccugaagagacugagagaccugaaccaggccgugaacaaccugguggagcugaagagcacccagcagaagagcauccugagagugggcacccugaccagcgacgaccugcugauccuggccgccgaccuggagaagcugaagagcaaggugaucagaaccgagagaccccugagcgccggcguguacaugggcaaccugagcagccagcagcuggaccagagaagagcccugcugaacaugaucggcaugagcggcggcaaccagggcgccagagccggcagagacggcguggugagagugugggacgugaagaacgccgagcugcugaacaaccaguucggcaccaugcccagccugacccuggccugccugaccaagcagggccagguggaccugaacgacgccgugcaggcccugaccgaccugggccugaucuacaccgccaaguaccccaacaccagcgaccuggacagacugacccagagccaccccauccugaacaugaucgacaccaagaagagcagccugaacaucagcggcuacaacuucagccugggcgccgccgugaaggccggcgccugcaugcuggacggcggcaacaugcuggagaccaucaaggugagcccccagaccauggacggcauccugaagagcauccugaaggugaagaaggcccugggcauguucaucagcgacacccccggcgagagaaaccccuacgagaacauccuguacaagaucugccugagcggcgacggcuggcccuacaucgccagcagaaccagcaucaccggcagagccugggagaacaccgugguggaccuggagagcgacggcaagccccagaaggccgacagcaacaacagcagcaagagccugcagagcgccggcuucaccgccggccugaccuacagccagcugaugacccugaaggacgccaugcugcagcuggaccccaacgccaagaccuggauggacaucgagggcagacccgaggaccccguggagaucgcccuguaccagcccagcagcggcugcuacauccacuucuucagagagcccaccgaccugaagcaguucaagcaggacgccaaguacagccacggcaucgacgugaccgaccuguucgccacccagcccggccugaccagcgccgugaucgacgcccugcccagaaacauggugaucaccugccagggcagcgacgacaucagaaagcugcuggagagccagggcagaaaggacaucaagcugaucgacaucgcccugagcaagaccgacagcagaaaguacgagaacgccgugugggaccaguacaaggaccugugccacaugcacaccggcguggugguggagaagaagaagagaggcggcaaggaggagaucaccccccacugcgcccugauggacugcaucauguucgacgccgccgugagcggcggccugaacaccagcgugcugagagccgugcugcccagagacaugguguucagaaccagcacccccagaguggugcugugaggacuaguaauaaggaaacuguaugaaugucugugggcaggaagugaagagauccuucuguaaagguuuuuggaauuaugucugcugaauaauaaacuuuuuugaaauaauaaaucugguagaaaaaugagaucuaaaaaaaaaaaaaaaaaaaaaaaaaaaaaaaaaaaaaaaaaaaaaaaaaaaaaaaaaaaaaaaaaaaaaaaaaaaaaaaaaaaaaaaaaaaaaaaaaaaa

SEQ ID NO: 20315 - RNA, 2073 nt, Artificial Sequence
  mRNA product Design b-4 (A100) comprising derived and/or modified sequence from LASV(LP;Clade I)__AAF86702__SP-HsALB_NP(2-569) (opt4)
aggagagucccgcagucggcguccagcggcucugcuuguucgugugugugucguugcaggccuuauucaagcuuaccaugaagugggugaccuucaucagccugcuguuccuguucagcagcgccuacagcagcaacagcaaggagaucaagagcuuccuguggacccagagccugagaagagagcugagcggcuacugcagcaacaucaagcugcagguggugaaggacgcccaggcccugcugcacggccuggacuucagcgaggugagcaacgugcagagacugaugagaaagcagaagagagacgacgccgaccugaagagacugagagaccugaaccaggccgugaacaaccugguggagcugaagagcacccagcagaagaacgugcugagagugggcacccugagcagcgacgaccugaucacccuggccgccgaccuggagaagcugaagagcaaggugaucagaaccgagagaccccugagcagcggcguguacaugggcaaccugagcagccagcagcuggaccagagaagagcccugcugagcaugaucggcaugagcggcggcccccagggcaacagaaccggcggcgacggcguggugagagugugggacgugaagaacgccgagcugcugaacaaccaguucggcaccaugcccagccugacccuggccugccugaccaagcagggccagguggaccugaacgacgccgugcaggcccugaccgaccugggccugaucuacaccgccaaguaccccaacagcagcgaccuggacaugcugacccagagccaccccauccugggcaugguggacaccaagaagagcagccugaacaucagcggcuacaacuucagccugggcgccgccgugaaggccggcgccugcaugcuggacggcggcaacaugcuggagaccaucaaggugagcccccagaccauggacggcauccugaagagcauccugaaggugaagagaagccugggcauguucaucagcgacacccccggcgagagaaaccccuacgagaacauccuguacaagaucugccugagcggcgagggcuggcccuacaucgccagcagaaccagcaucaccggcagagccugggagaacacccugguggaccuggagagcgacaacaagccccccaagcugaacagcgccggcagcaacaagagccugcaggccgccggccugaacgccggccugaccuacagccagcugaugacccugaaggacugcaugcugcagcuggaccccagcagcaagaccuggaucgacaucgagggcagacccgaggaccccguggagaucgcccuguuccagcccagcagcggcugcuacauccacuucuucagagagcccaccgaccugaagcaguucaagcaggacgccaaguacagccacggcaucgacgugaccgaccuguucagcacccagcccggccugaccagcgccgugaucgaggcccugcccagaaacauggugcugaccugccagggcagcgacgacaucaagaagcugcuggagagccagggcagaagagacaucaagcugaucgacaucagccugagcaaggccgacagcagaaaguucgagaacgccgugugggaccaguacaaggaccugugccacaugcacaccggcguggugguggagaagaagaagagaggcggcaaggaggagaucaccccccacugcgcccugcuggacugcaucauguucgacgccgccaccaccggcagccugaacaucaccacccugagagccgugcugcccagagacaugguguucagaaccagcacccccaagguggugcugugaggacuaguaauaaggaaacuguaugaaugucugugggcaggaagugaagagauccuucuguaaagguuuuuggaauuaugucugcugaauaauaaacuuuuuugaaauaauaaaucugguagaaaaaugagaucuaaaaaaaaaaaaaaaaaaaaaaaaaaaaaaaaaaaaaaaaaaaaaaaaaaaaaaaaaaaaaaaaaaaaaaaaaaaaaaaaaaaaaaaaaaaaaaaaaaaa

SEQ ID NO: 20316 - RNA, 2073 nt, Artificial Sequence
  mRNA product Design b-4 (A100) comprising derived and/or modified sequence from LASV(803213;Clade II)__AAF86704__SP-HsALB_NP(2-569) (opt4)
aggagagucccgcagucggcguccagcggcucugcuuguucgugugugugucguugcaggccuuauucaagcuuaccaugaagugggugaccuucaucagccugcuguuccuguucagcagcgccuacagcagcgccagcaaggaggugaagagcuuccuguggacccagagccugagaagagagcugagcggcuacugcagcaacaucaagcugcagguggugaaggacgcccaggcccugcugcacggccuggacuucagcgaggugaacaacgugcagagacugaugagaaagcagaagagagacgacggcgaccugaagagacugagagaccugaaccaggccgugaacaaccugguggagcugaagagcacccagcagaagagcauccugagagugggcacccugaccagcgacgaccugcugacccuggccgccgaccuggagaagcugaagagcaaggugaucagaaccgagagaccccugagcagcggcguguacaugggcaaccugagcacccagcagcuggagcagagaagagcccugcugaacaugaucggcauggugggcggcgcccagggcacccagcccggcagagacggcguggugagagugugggacgugaagaaccccgaccugcugaacaaccaguucggcaccaugcccagccugacccuggccugccugaccaagcagggccagguggaccugaacgacgccgugcuggcccugaccgaccugggccugaucuacaccgccaaguaccccaacagcagcgaccuggacagacugagccagagccaccccauccugaacaugguggacaccaagaagagcagccugaacaucagcggcuacaacuucagccugggcgccgccgugaaggccggcgccugcaugcuggacggcggcaacaugcuggagaccaucaaggugaccccccagaccauggacggcauccugaagagcauccugaaggugaagagaagccugggcauguucgugagcgacacccccggcgagagaaaccccuacgagaacauccuguacaagaucugccugagcggcgacggcuggcccuacaucgccagcagaaccagcaucgugggcagagccugggagaacaccaccguggaccuggagagcgacggcaagccccagaaggugggcaccgccggcagcaacaagagccugcagagcgccggcuuccccaccggccugaccuacagccagcugaugacccugaaggacagcaugaugcagcuggaccccagcgccaagaccuggaucgacaucgagggcagacccgaggaccccguggagaucgcccuguaccagcccaugagcggcugcuacauccacuucuucagagagcccaccgaccugaagcaguucaagcaggacgccaaguacagccacggcaucgacguggccgaccuguuccccgcccagcccggccugaccagcgccgugaucgaggcccugcccagaaacauggugcugaccugccagggcagcgacgacaucaagaagcugcuggacagccagggcagaagagacaucaagcugaucgacaucagccugagcaagguggacagcagaaaguucgagaacgccgugugggaccagugcaaggaccugugccacaugcacaccggcguggugguggagaagaagaagagaggcggcaaggaggagaucaccccccacugcgcccugauggacugcaucauguucgacgccgccgugagcggcggccugaacauccccgugcugagagccgugcugcccagagacaugguguucagaaccagcagccccaagguggugcugugaggacuaguaauaaggaaacuguaugaaugucugugggcaggaagugaagagauccuucuguaaagguuuuuggaauuaugucugcugaauaauaaacuuuuuugaaauaauaaaucugguagaaaaaugagaucuaaaaaaaaaaaaaaaaaaaaaaaaaaaaaaaaaaaaaaaaaaaaaaaaaaaaaaaaaaaaaaaaaaaaaaaaaaaaaaaaaaaaaaaaaaaaaaaaaaaa

SEQ ID NO: 20317 - RNA, 2076 nt, Artificial Sequence
  mRNA product Design b-4 (A100) comprising derived and/or modified sequence from LASV(GA391;Clade III)__CAA36646__SP-HsALB_NP(2-570) (opt4)
aggagagucccgcagucggcguccagcggcucugcuuguucgugugugugucguugcaggccuuauucaagcuuaccaugaagugggugaccuucaucagccugcuguuccuguucagcagcgccuacagcagcgccagcaaggaggugagaagcuuccuguggacccagagccugagaagagagcugagcggcuacugcagcaacaucaagcugcagguggugaaggacgcccaggcccugcugcacggccuggacuucagcgaggugagcaacgugcagagacugaugagaaagcagaagagagacgacggcgaccugaagagacugagagaccugaaccaggccgugaacaaccugguggagcugaagagcacccagcagaagagcgugcugagagugggcacccugagcagcgacgaccugcugauccuggccgccgaccuggagaagcugaagagcaaggugaccagaaccgagagaccccugagcagcggcguguacaugggcaaccugagcagccagcagcuggaccagagaagagcccugcugaacaugaucggcaugaccggcgugagcggcggcggcaagggcgccagcgacggcaucgugagagugugggacgugaagaacgccgagcugcugaacaaccaguucggcaccaugcccagccugacccuggccugccugaccaagcagggccagguggaccugaacgacgccgugcaggcccugaccgaccugggccugaucuacaccgccaaguaccccaacagcagcgaccuggacagacugagccagagccaccccauccugaacaugaucgacaccaagaagagcagccugaacaucagcggcuacaacuucagccugggcgccgccgugaaggccggcgccugcaugcuggacggcggcaacaugcuggagaccaucaaggugagcccccagaccauggacggcauccugaagagcauccugaaggugaagaagagccugggcauguucgugagcgacacccccggcgagagaaaccccuacgagaacauccuguacaagaucugccugagcggcgacggcuggcccuacaucgccagcagaaccagcaucgugggcagagccugggagaacaccgugguggaccuggagcaggacaacaagccccagaagaucggcaacggcggcagcaacaagagccugcagagcgccggcuucgccgccggccugaccuacagccagcugaugacccugaaggacuucaagugcuucaaccugauccccaacgccaagaccuggauggacaucgagggcagacccgaggaccccguggagaucgcccuguaccagcccagcagcggcugcuacgugcacuucuucagagagcccaccgaccugaagcaguucaagcaggacgccaaguacagccacggcaucgacgugaccgaccuguucgccgcccagcccggccugaccagcgccgugaucgaggcccugcccagaaacauggugaucaccugccagggcagcgaggacaucagaaagcugcuggagagccagggcagaagagacaucaagcugaucgacaucacccugagcaaggccgacagcagaaaguucgagaacgccgugugggaccaguucaaggaccugugccacaugcacaccggcguggugguggagaagaagaagagaggcggcaaggaggagaucaccccccacugcgcccugauggacugcaucauguucgacgccgccgugagcggcggccuggacgccaaggugcugagaguggugcugcccagagacaugguguucagaaccagcacccccaagguggugcugugaggacuaguaauaaggaaacuguaugaaugucugugggcaggaagugaagagauccuucuguaaagguuuuuggaauuaugucugcugaauaauaaacuuuuuugaaauaauaaaucugguagaaaaaugagaucuaaaaaaaaaaaaaaaaaaaaaaaaaaaaaaaaaaaaaaaaaaaaaaaaaaaaaaaaaaaaaaaaaaaaaaaaaaaaaaaaaaaaaaaaaaaaaaaaaaaa

SEQ ID NO: 20318 - RNA, 2073 nt, Artificial Sequence
  mRNA product Design b-4 (A100) comprising derived and/or modified sequence from LASV(AV;Clade V)__CCA30315__SP-HsALB_NP(2-569) (opt4)
aggagagucccgcagucggcguccagcggcucugcuuguucgugugugugucguugcaggccuuauucaagcuuaccaugaagugggugaccuucaucagccugcuguuccuguucagcagcgccuacagcagcgccagcaaggaggugaagagcuuccuguggacccagagccugagaagagagcugagcggcuacugcagcaacaucaagcugcagguggugaaggacgcccaggcccugcugcacggccuggacuucagcgaggugagcaacgugcagagacugaugagaaagcagagaagagacgacagcgaccugaagagacugagagaccugaaccaggccgugaacaaccugguggagcugaagagcacccagcagaagagcgugcugagagugggcacccugagcagcgacgaccugcugacccuggccgccgaccuggagaagcugaagagcaaggugaccagaaccgagagaccccugagcagcggcguguacaugggcaaccugagcagccagcagcuggaccagagaagagcccugcugaaccugaucggcaugaccaacggcagccagggcagccaggccggcagagacggcguggugagagugugggacgugaagaacgccgagcugcugaacaaccaguucggcaccaugcccagccugacccuggccugccugaccaagcagggccagguggaccugaacgacguggugcaggcccugaccgaccugggccugaucuacaccgccaaguaccccaacaccagcgaccuggacagacugacccagagccaccccauccugaacaugaucgacaccaagaagagcagccugaacaucagcggcuacaacuucagccugggcgccgccgugaaggccggcgccugcaugcuggacggcggcaacaugcuggagaccaucaaggugagcccccagagcauggacggcauccugaagagcauccugaaggugaagagagcccugggcauguucgugagcgacacccccggcgagagaaaccccuacgagaacauccuguacaagaucugccugagcggcgacggcuggcccuacaucgccagcagaaccagcaucgugggcagagccugggagaacaccgugguggaccuggagaccgacggcaagccccagaagaucggcagcggcaacagcaacaagagccugcagagcgccggcuucagcgccggccugaccuacagccagcugaugacccugaaggacgccaugcugcagcuggaccccaacgccaagaccuggauggacaucgagggcagacccgaggaccccguggagguggcccuguaccagcccaucagcggcugcuacauccacuucuucagagagcccaccgaccugaagcaguucaagcaggacgccaaguacagccacggcaucgacaucgccgaccuguucgccgcccagcccggccugaccagcgccgugaucgaggcccugcccagaaacauggugaucaccugccagggcagcgaggacaucaagaagcugcuggagagccagggcagaaaggacaucaagcugaucgacaucgcccugagcaagaucgacagcagaaaguucgagaacgccgugugggaccaguacaaggaccugugccacaugcacaccggcguggugguggagaagaagaagagaggcggcaaggaggagaucaccccccacugcgcccugauggacugcaucauguucgacgccgccgugagcggcggccugaacacccuggugcugagagccgugcugcccagagacaugguguucagaaccagcacccccagaguggugcugugaggacuaguaauaaggaaacuguaugaaugucugugggcaggaagugaagagauccuucuguaaagguuuuuggaauuaugucugcugaauaauaaacuuuuuugaaauaauaaaucugguagaaaaaugagaucuaaaaaaaaaaaaaaaaaaaaaaaaaaaaaaaaaaaaaaaaaaaaaaaaaaaaaaaaaaaaaaaaaaaaaaaaaaaaaaaaaaaaaaaaaaaaaaaaaaaa

SEQ ID NO: 20319 - RNA, 2073 nt, Artificial Sequence
  mRNA product Design b-4 (A100) comprising derived and/or modified sequence from LASV(Togo/2016/7082;Clade VI)__AMR44578__SP-HsALB_NP(2-569) (opt4)
aggagagucccgcagucggcguccagcggcucugcuuguucgugugugugucguugcaggccuuauucaagcuuaccaugaagugggugaccuucaucagccugcuguuccuguucagcagcgccuacagcagcaacagcaaggaggugaagagcuuccuguggacccagagccugagaagagagcugagcggcuacugcagcaacaucaagcugcagguggugaaggacgcccaggcccugcugcacggccuggacuucagcgaggugagcaacgugcagagacugaugagaaagcagaagagagacgacggcgaccugaagagacugagagaccugaaccaggccgugaacaaccugguggagcugaagagcgugcagcagaagagcauccugagagugggcacccugaccagcgacgaccugcugacccuggccgccgaccuggagaagcugaagagcaaggugaccagaaccgagagaccccugagcagcggcguguacaugggcaaccugagcagccagcagcuggaccagagaagagcccugcugagcaugaucggcaugagcggcggcaaccagaacagccagcccaagggcgacggcguggugagagugugggacgugaagaacgccgaccugcugaacaaccaguucggcaccaugcccagccugacccuggccugccugaccaagcagggccagguggaccugaacgacgccgugcaggcccugaccgaccugggccugaucuacaccgccaaguaccccaacagcagcgaccuggacagacugagccagagccaccccauccugaacaugaucgacaccaagaagagcagccugaacaucagcggcuacaacuucagccugggcgccgccaucaagaccggcgccugcaugcuggacggcggcaacaugcuggagaccaucaaggugaccccccagaccauggacggcauccugaagagcauccugaaggugaagagaagccugggcauguucaucagcgacacccccggcgagagaaaccccuacgagaacauccuguacaagaucugccugagcggcgacggcuggcccuacaucgccagcagaaccgccaucaucggcagagccugggagaacaccgugguggaccuggagagcgacagcaagccccagaagaucggcagcaacggcagcaacaagagccugcagagcgccggcuucgcccccggccugaccuacagccagcugaugacccugaaggacagcaugcugcagcuggaccccaacgccaagaccuggaucgacaucgagggcagacccgaggaccccguggagguggcccuguuccagcccaucagcggcugcuacauccacuucuucagagagcccaccgaccugaagcaguucaagcaggacgccaaguacagccacggcaucgacgugaccgaccuguucgccgcccagcccggccugaccagcgccgugaucgaggcccugcccagaaacauggugcugaccugccagggcagcgacgacaucaagaagcugcuggacagccagggcagaagagacaucaagcugaucgacgugagccugaacaagaucgacagcagaaaguucgagaacgccgugugggaccaguacaaggaccugugccacaugcacaccggcguggugguggagaagaagaagaagggcggcaaggaggagaucaccccccacugcgcccugcuggacugcaucauguucgacgccgccgugagcggcggccugaacgccaccgugcugagagccgugcugcccagagacaugguguucagaaccagcagccccaagguggugcugugaggacuaguaauaaggaaacuguaugaaugucugugggcaggaagugaagagauccuucuguaaagguuuuuggaauuaugucugcugaauaauaaacuuuuuugaaauaauaaaucugguagaaaaaugagaucuaaaaaaaaaaaaaaaaaaaaaaaaaaaaaaaaaaaaaaaaaaaaaaaaaaaaaaaaaaaaaaaaaaaaaaaaaaaaaaaaaaaaaaaaaaaaaaaaaaaa

SEQ ID NO: 20320 - RNA, 2073 nt, Artificial Sequence
  mRNA product Design b-4 (A100) comprising derived and/or modified sequence from LASV(KAK-428;Clade n.d. (VII))__ANH09741__SP-HsALB_NP(2-569) (opt4)
aggagagucccgcagucggcguccagcggcucugcuuguucgugugugugucguugcaggccuuauucaagcuuaccaugaagugggugaccuucaucagccugcuguuccuguucagcagcgccuacagcagcaacagcaaggaggugaagagcuuccuguggacccagagccugagaagagagcugagcggcuacugcaccaacaucaagcugcagguggugaaggacgcccaggcccugcugcacggccuggacuucagcgaggugagcaacgugcagagacugaugagaaagcagaagagagacgacaacgaccugaagagacugagagaccugaaccaggccgugaacaaccugguggagcugaagagcgugcagcagaagagcgugcugaaggugggcacccugaacagcgacgaccugcugacccuggccgccgaccuggagaagcugaagagcaagguggugagaaccgagagaccccugagcagcggcguguacaugggcaaccugagcagccagcagcuggaccagagaagagcccugcugaacaugaucggcauggccggcggcagccagggcaaccagcccagcagagacggcguggugagagugugggacgugaagaacgccgaccugcugaacaaccaguucggcaccaugcccagccugacccuggccugccugaccaagcagggccagguggaccugaacgacguggugcuggcccugaccgaccugggccugaucuacaccgccaaguaccccaacagcagcgaccuggacagacugagccagaaccaccccgugcugaacaugaucgacgugaacaagagcagccugaacaucagcggcuacaacuucagccugggcgccgccgugaaggccggcgccugcaugcuggacggcggcaacaugcuggagaccaucaagaucagcccccagaccguggacggcauccugaagagcauccugaaggugaagagagcccugggcauguucgugagcgacacccccggcgagagaaaccccuacgagaacauccuguacaaggugugccugagcggcaacggcuggcccuacaucgccagcagaaccagcaucgugggcagagccugggagaacaccgugguggaccuggagagcaacaagaaccagcccaaggugggcaacaacggcagcaacaagaugcugcagagcagcggcuucgccaccggccugaccuacagccagcugaugacccugagagacagcaugcugcagcuggaccccaccgccaagaccuggaucgacaucgagggcagacccgaggaccccguggagcuggcccuguuccagcccagcagcggcugcuacauccacuucuucagagagcccaccgaccugaagcaguucaagcaggacgccaaguacagccacggcaucgacgugaacgaccuguucagcgcccagcccggccugaccagcgccgugcuggaggcccugcccagaaacauggugcugaccugccagggcagcgacgacaucagaaagcugcuggacagccaggacagaaaggacaucaagcugaucgacaucagccugagcaaggccgacgccagaaaguucgagaacgacgugugggaccaguucaaggaccugugccacaugcacaccggcaucgugguggagaagaagaagaagggcggcaagcaggagaugaccccccacugcgcccugcuggacugcaucauguucgacgccgccgugagcggcggccugaacgugcccacccugagagccgugcugcccaccgacaugguguucagaaccaucaccaccaagguggugcugugaggacuaguaauaaggaaacuguaugaaugucugugggcaggaagugaagagauccuucuguaaagguuuuuggaauuaugucugcugaauaauaaacuuuuuugaaauaauaaaucugguagaaaaaugagaucuaaaaaaaaaaaaaaaaaaaaaaaaaaaaaaaaaaaaaaaaaaaaaaaaaaaaaaaaaaaaaaaaaaaaaaaaaaaaaaaaaaaaaaaaaaaaaaaaaaaa

SEQ ID NO: 20321 - RNA, 2073 nt, Artificial Sequence; identical to SEQ ID NO: 20315
  mRNA product Design b-4 (A100) comprising derived and/or modified sequence from LASV(Pinneo-NIG-1969;Clade I)__AIT17837__SP-HsALB_NP(2-569) (opt4)

SEQ ID NO: 20322 - RNA, 2073 nt, Artificial Sequence
  mRNA product Design b-4 (A100) comprising derived and/or modified sequence from LASV(ISTH0009-NIG-2011;Clade II)__AIT17405__SP-HsALB_NP(2-569) (opt4)
aggagagucccgcagucggcguccagcggcucugcuuguucgugugugugucguugcaggccuuauucaagcuuaccaugaagugggugaccuucaucagccugcuguuccuguucagcagcgccuacagcagcgugagcaaggaggugaagagcuuccuguggacccagagccugagaagagagcugagcggcuacugcagcaacaucaagcugcagguggugaaggacgcccaggcccugcugcacggccuggacuucagcgaggugagcaacgugcagagacugaugagaaagcagaagagagacgacagcgaccugaagagacugagagaccugaaccaggccgugaacaaccugguggagcugaagagcacccagcagaagagcauccugagagugggcacccugaccagcgacgaccugcugacccuggccgccgaccuggagaagcugaagagcaaggugaucagaaccgagagaccccugagcagcggcguguacaugggcaaccugagcacccagcagcuggagcagagaagagcccugcugaacaugaucggcauggugggcggcgcccagggcacccagcccggcagagacggcguggugagagugugggacgugaagaaccccgaccugcugaacaaccaguucggcaccaugcccagccugacccuggccugccugaccaagcagggccagguggaccugaacgacgccgugcuggcccugaccgaccugggccugaucuacaccgccaaguaccccaacagcagcgaccuggacagacugagccagagccaccccauccugaacaugguggacaucaagaagagcagccugaacaucagcggcuacaacuucagccugggcgccgccgugaaggccggcgccugcaugcuggacggcggcaacaugcuggagaccaucaaggugaccccccagaccauggacggcauccugaagagcauccugaaggugaagagaagccugggcauguucgugagcgacacccccggcgagagaaaccccuacgagaacauccuguacaagaucugccugagcggcgacggcuggcccuacaucgccagcagaaccagcaucgugggcagagccugggagaacaccaccguggaccuggagagcgacggcaagccccagaaggugggcagcgccggcagcaacaagagccugcagagcgccggcuuccccaccggccugaccuacagccagcugaugacccugaaggacagcaugaugcagcuggaccccagcgccaagaccuggaucgacaucgagggcagacccgaggaccccguggagaucgcccuguaccagcccaugagcggcugcuacauccacuucuucagagagcccaccgaccugaagcaguucaagcaggacgccaaguacagccacggcaucgacguggccgaccuguuccccgcccagcccggccugaccagcgccgugaucgaggcccugcccagaaacauggugcugaccugccagggcagcgacgacaucaagagacugcuggacagccagggcagaagagacaucaagcugaucgacaucgcccugagcaaggccgacagcagaagauucgagaacgccgugugggaccagugcaaggaccugugccacaugcacaccggcguggugguggagaagaagaagagaggcggcaaggaggagaucaccccccacugcgcccugauggacugcaucauguacgacgccgccgugagcggcggccugaacauccccgugcugagagccgugcugcccagagacaugguguucagaaccagcagccccaagguggugcugugaggacuaguaauaaggaaacuguaugaaugucugugggcaggaagugaagagauccuucuguaaagguuuuuggaauuaugucugcugaauaauaaacuuuuuugaaauaauaaaucugguagaaaaaugagaucuaaaaaaaaaaaaaaaaaaaaaaaaaaaaaaaaaaaaaaaaaaaaaaaaaaaaaaaaaaaaaaaaaaaaaaaaaaaaaaaaaaaaaaaaaaaaaaaaaaaa

SEQ ID NO: 20323 - RNA, 2073 nt, Artificial Sequence
  mRNA product Design b-4 (A100) comprising derived and/or modified sequence from LASV(ISTH2010-NIG-2012;Clade II)__AIT17483__SP-HsALB_NP(2-569) (opt4)
aggagagucccgcagucggcguccagcggcucugcuuguucgugugugugucguugcaggccuuauucaagcuuaccaugaagugggugaccuucaucagccugcuguuccuguucagcagcgccuacagcagcgccagcaaggaggugaagagcuuccuguggacccagagccugagaagagagcugagcggcuacugcagcaacaucaagcugcagguggugaaggacgcccaggcccugcugcacggccuggacuucagcgaggugagcaacgugcagagacugaugagaaagcagaagagagacgacagcgaccugaagagacugagagaccugaaccaggccgugaacaaccugguggagcugaagagcacccagcagaagagcauccugagagugggcacccugaccagcgacgaccugcugacccuggccgccgaccuggagaagcugaagagcaaggugaucagaaccgagagaccccugagcagcggcguguacaugggcaaccugagcacccagcagcuggagcagagaagagcccugcugaaccugaucggcauggugggcggcgcccagggcacccagcccggcagagacggcguggugagagugugggacgugaagaaccccgaccugcugaacaaccaguucggcaccaugcccagccugacccuggccugccugaccaagcagggccagguggaccugaacgacgccgugcuggcccugaccgaccugggccugaucuacaccgccaaguaccccaacagcagcgaccuggacagacugagccagagccaccccauccugaacaugguggacaccaagaagagcagccugaacaucagcggcuucaacuucagccugggcgccgccgugaaggccggcgccugcaugcuggacggcggcaacaugcuggagaccaucaaggugaccccccagaccauggacggcauccugaagagcauccugaaggugaagaagagccugggcauguucgugagcgacacccccggcgagagaaaccccuacgagaacauccuguacaagaucugccugagcggcgacggcuggcccuacaucgccagcagaaccagcaucgugggcagagccugggagaacaccaccguggaccuggagagcgacggcaagccccacaaggugggcaccgccggcagcaacaagagccugcagagcgccggcuuccccaccggccugaccuacagccagcugaugacccugaaggacagcaugaugcagcuggaccccagcgccaagaccuggaucgacaucgagggcagacccgaggaccccguggagaucgcccuguaccagcccaugagcggcugcuacauccacuucuucagagagcccaccgaccugaagcaguucaagcaggacgccaaguacagccacggcaucgacguggccgaccuguuccccgcccagcccggccugaccagcgccgugaucgaggcccugcccagaaacauggugcugaccugccagggcagcgacgacaucaagagacugcuggacagccagggcagaagagacaucaagcugaucgacaucgcccugagcaaggccgacagcagaagauucgagaacgccgugugggaccagugcaaggaccugugccacaugcacaccggcguggugguggagaagaagaagagaggcggcaaggaggagaucaccccccacugcgcccugauggacugcaucauguacgacgccgccgugagcggcggccugaacauccccgugcugagagccgugcugcccagagacaugguguucagaaccagcagccccaagguggugcugugaggacuaguaauaaggaaacuguaugaaugucugugggcaggaagugaagagauccuucuguaaagguuuuuggaauuaugucugcugaauaauaaacuuuuuugaaauaauaaaucugguagaaaaaugagaucuaaaaaaaaaaaaaaaaaaaaaaaaaaaaaaaaaaaaaaaaaaaaaaaaaaaaaaaaaaaaaaaaaaaaaaaaaaaaaaaaaaaaaaaaaaaaaaaaaaaa

SEQ ID NO: 20324 - RNA, 2073 nt, Artificial Sequence
  mRNA product Design b-4 (A100) comprising derived and/or modified sequence from LASV(Lassa virus/H.sapiens-wt/NGA/2015/ISTH_0543;Clade II)__AVO03640__SP-HsALB_NP(2-569) (opt4)
aggagagucccgcagucggcguccagcggcucugcuuguucgugugugugucguugcaggccuuauucaagcuuaccaugaagugggugaccuucaucagccugcuguuccuguucagcagcgccuacagcagcgccagcaaggaggugaagagcuuccuguggacccagagccugagaagagagcugagcggcuacugcagcaacaucaagcugcagguggugaaggacgcccaggcccugcugcacggccuggacuucagcgaggugagcaacgugcagagacugaugagaaagcagaagagagacgacagcgaccugaagagacugagagaccugaaccaggccgugaacaaccugguggagcugaagagcacccagcagaagagcauccugagagugggcacccugaccagcgacgaccugcugacccuggccgccgaccuggagaagcugaagagcaaggugaucagaaccgagagaccccugagcagcggcguguacaugggcaaccugagcacccagcagcuggagcagagaagagcccugcugaacaugaucggcauggugggcggcgcccagggcacccagcccggcagagacggcguggugagagugugggacgugaagaaccccgaccugcugaacaaccaguucggcaccaugcccagccugacccuggccugccugaccaagcagggccagguggaccugaacgacgccgugcuggcccugaccgaccugggccugaucuacaccgccaaguaccccaacagcagcgaccuggacagacugagccagagccaccccauccugaacaugguggacaccaagaagagcagccugaacaucagcggcuacaacuucagccugggcgccgccgugaaggccggcgccugcaugcuggacggcggcaacaugcuggagaccaucaaggugaccccccagaccauggacggcauccugaagagcauccugaaggugaagaagagccugggcauguucgugagcgacacccccggcgagagaaaccccuacgagaacauccuguacaagaucugccugagcggcgacggcuggcccuacaucgccagcagaaccagcaucgugggcagagccugggagaacaccaccguggaccuggagagcgacggcaagccccagaaggugggcagcgccggcagcaacaagagccugcagagcgccggcuuccccaccggccugaccuacagccagcugaugacccugaaggacagcaugaugcagcuggaccccagcgccaagaccuggaucgacaucgagggcagacccgaggaccccguggagaucgcccuguaccagcccaugagcggcugcuacauccacuucuucagagagcccaccgaccugaagcaguucaagcaggacgccaaguacagccacggcaucgacguggccgaccuguuccccgcccagcccggccugaccagcgccgugaucgaggcccugcccagaaacauggugcugaccugccagggcagcgacgacaucaagagacugcuggacagccagggcagaaaggacaucaagcugaucgacaucgcccugagcaaggccgacagcagaagauucgagaacgccgugugggaccagugcaaggaccugugccacaugcacaccggcguggugguggagaagaagaagagaggcggcaaggaggagaucaccccccacugcgcccugauggacugcaucauguacgacgccgccgugagcggcggccugaacauccccgugcugagagccgugcugcccagagacaugguguucagaaccagcagccccaagguggugcugugaggacuaguaauaaggaaacuguaugaaugucugugggcaggaagugaagagauccuucuguaaagguuuuuggaauuaugucugcugaauaauaaacuuuuuugaaauaauaaaucugguagaaaaaugagaucuaaaaaaaaaaaaaaaaaaaaaaaaaaaaaaaaaaaaaaaaaaaaaaaaaaaaaaaaaaaaaaaaaaaaaaaaaaaaaaaaaaaaaaaaaaaaaaaaaaaa

SEQ ID NO: 20325 - RNA, 2073 nt, Artificial Sequence
  mRNA product Design b-4 (A100) comprising derived and/or modified sequence from LASV(Lassa virus/H.sapiens-wt/NGA/2016/ISTH_0009;Clade II)__AVO03572__SP-HsALB_NP(2-569) (opt4)
aggagagucccgcagucggcguccagcggcucugcuuguucgugugugugucguugcaggccuuauucaagcuuaccaugaagugggugaccuucaucagccugcuguuccuguucagcagcgccuacagcagcgccagcaaggaggugaagagcuuccuguggacccagagccugagaagagagcugagcggcuacugcagcaacaucaagcugcagguggugaaggacgcccaggcccugcugcacggccuggacuucagcgaggugagcaacgugcagagacugaugagaaagcagaagagagacgacagcgaccugaagagacugagagaccugaaccaggccgugaacaaccugguggagcugaagagcacccagcagaagagcauccugagagugggcacccugaccagcgacgaccugcugacccuggccgccgaccuggagaagcugaagagcaaggugaucagaaccgagagaccccugagcagcggcguguacaugggcaaccugagcacccagcagcuggagcagagaagagcccugcugaacaugaucggcauggugggcggcgcccagggcacccagcccggcagagacggcguggugagagugugggacgugaagaaccccgaccugcugaacaaccaguucggcaccaugcccagccugacccuggccugccugaccaagcagggccagguggaccugaacgacgccgugcuggcccugaccgaccugggccugaucuacaccgccaaguaccccaacagcagcgaccuggacagacugagccagagccaccccauccugaacaugguggacaccaagaagagcagccugaacaucagcggcuacaacuucagccugggcgccgccgugaaggccggcgccugcaugcuggacggcggcaacaugcuggagaccaucaaggugaccccccagaccauggacggcauccugaagagcauccugaaggugaagaagagccugggcauguucgugagcgacacccccggcgagagaaaccccuacgagaacauccuguacaagaucugccugagcggcgacggcuggcccuacaucgccagcagaaccagcaucgugggcagagccugggagaacaccaccguggaccuggagagcgacggcaagccccagaaggugggcagcgccggcagcaacaagagccugcagagcgccggcuuccccaccggccugaccuacagccagcugaugacccugaaggacagcaugaugcagcuggaccccagcgccaagaccuggaucgacaucgagggcagacccgaggaccccguggagaucgcccuguaccagcccaugagcggcugcuacauccacuucuucagagagcccaccgaccugaagcaguucaagcaggacgccaaguacagccacggcaucgacguggccgaccuguuccccgcccagcccggccugaccagcgccgugaucgaggcccugcccagaaacauggugcugaccugccagggcagcgacgacaucaagagacugcuggacagccagggcagaagagacaucaagcugaucgacaucgcccugagcaaggccgacagcagaagauucgagaacgccgugugggaccagugcaaggaccugugccacaugcacaccggcguggugguggagaagaagaagagaggcggcaaggaggagaucaccccccacugcgcccugauggacugcaucauguacgacgccgccgugagcggcggccugaacauccccgugcugagagccgugcugcccagagacaugguguucagaaccagcagccccaagguggugcugugaggacuaguaauaaggaaacuguaugaaugucugugggcaggaagugaagagauccuucuguaaagguuuuuggaauuaugucugcugaauaauaaacuuuuuugaaauaauaaaucugguagaaaaaugagaucuaaaaaaaaaaaaaaaaaaaaaaaaaaaaaaaaaaaaaaaaaaaaaaaaaaaaaaaaaaaaaaaaaaaaaaaaaaaaaaaaaaaaaaaaaaaaaaaaaaaa

SEQ ID NO: 20326 - RNA, 2073 nt, Artificial Sequence
  mRNA product Design b-4 (A100) comprising derived and/or modified sequence from LASV(Lassa virus/H.sapiens-wt/NGA/2016/ISTH_0017;Clade II)__AVO03568__SP-HsALB_NP(2-569) (opt4)
aggagagucccgcagucggcguccagcggcucugcuuguucgugugugugucguugcaggccuuauucaagcuuaccaugaagugggugaccuucaucagccugcuguuccuguucagcagcgccuacagcagcgccagcaaggaggugaagagcuuccuguggacccagagccugagaagagagcugagcggcuacugcagcagcaucaagcugcagguggugaaggacgcccaggcccugcugcacggccuggacuucagcgaggugagcaacgugcagagacugaugagaaagcagaagagagacgacagcgaccugaagagacugagagaccugaaccaggccgugaacaaccugguggagcugaagagcacccagcagaagagcauccugagagugggcacccugaccagcgacgaccugcugacccuggccgccgaccuggagaagcugaagagcaaggugaucagaaccgagagaccccugagcagcggcguguacaugggcaaccugagcacccagcagcuggagcagagaagagcccugcugaacaugaucggcauggccggcggcgcccagggcacccagcccggcagagacggcguggugagagugugggacgugaagaaccccgaccugcugaacaaccaguucggcaccaugcccagccugacccuggccugccugaccaagcagggccagguggaccugaacgacgccgugcuggcccugaccgaccugggccugaucuacaccgccaaguaccccaacagcagcgaccuggacagacugagccagagccaccccauccugaacaugguggacaccaagaagagcagccugaacaucagcggcuacaacuucagccugggcgccgccgugaaggccggcgccugcaugcuggacggcggcaacaugcuggagaccaucaaggugaccccccagaccauggacggcauccugaagagcauccugaaggugaagagaagccugggcauguucgugagcgacgcccccggcgagagaaaccccuacgagaacauccuguacaagaucugccugagcggcgacggcuggcccuacaucgccagcagaaccagcaucgugggcagagccugggagaacaccaccguggaccuggagagcgacggcaagccccagaaggugggcgccaccggcagcaacaagagccugcagagcgccggcuuccccaccggccugaccuacagccagcugaugacccugaaggacagcaugaugcagcuggaccccagcgccaagaccuggaucgacaucgagggcagacccgaggaccccguggagguggcccuguaccagcccgugagcggcugcuacauccacuucuucagagagcccaccgaccugaagcaguucaagcaggacgccaaguacagccacggcaucgacguggccgaccuguuccccgcccagcccggccugaccagcgccgugaucgaggcccugcccagaaacauggugcugaccugccagggcagcgacgacaucaagaagcugcuggacagccagggcagaaaggacaucaagcugaucgacaucgcccugagcaaggccgacagcagaagauucgagaacgccgugugggaccagugcaaggaccugugccacaugcacaccggcguggugguggagaagaagaagagaggcggcaaggaggagaucaccccccacugcgcccugauggacugcaucauguacgacgccgccgugagcggcggccugaacauccccgugcugagagccgugcugcccagagacaugguguucagaaccagcagccccaagguggugcugugaggacuaguaauaaggaaacuguaugaaugucugugggcaggaagugaagagauccuucuguaaagguuuuuggaauuaugucugcugaauaauaaacuuuuuugaaauaauaaaucugguagaaaaaugagaucuaaaaaaaaaaaaaaaaaaaaaaaaaaaaaaaaaaaaaaaaaaaaaaaaaaaaaaaaaaaaaaaaaaaaaaaaaaaaaaaaaaaaaaaaaaaaaaaaaaaa

SEQ ID NO: 20327 - RNA, 2073 nt, Artificial Sequence
  mRNA product Design b-4 (A100) comprising derived and/or modified sequence from LASV(Lassa virus/H.sapiens-wt/NGA/2018/ISTH_0959;Clade II)__AVV65100__SP-HsALB_NP(2-569) (opt4)
aggagagucccgcagucggcguccagcggcucugcuuguucgugugugugucguugcaggccuuauucaagcuuaccaugaagugggugaccuucaucagccugcuguuccuguucagcagcgccuacagcagcgccagcaaggaggugaagagcuuccuguggacccagagccugagaagagagcugagcggcuacugcagcaacaucaagcugcagguggugaaggacgcccaggcccugcugcacggccuggacuucagcgaggugagcaacgugcagagacugaugagaaagcagaagagagacgacagcgaccugaagagacugagagaccugaaccaggccgugaacaaccugguggagcugaagagcacccagcagaagagcauccugagagugggcacccugaccagcgacgaccugcugacccuggccgccgaccuggagaagcugaagagcaaggugaucagaaccgagagaccccugagcagcggcguguacaugggcaaccugagcacccagcagcuggagcagagaagagcccugcugaaccugaucggcauggugggcggcgcccagggcacccagcccggcagagacggcguggugagagugugggacgugaagaaccccgaccugcugaacaaccaguucggcaccaugcccagccugacccuggccugccugaccaagcagggccagguggaccugaacgacguggugcuggcccugaccgaccugggccugaucuacaccgccaaguaccccaacagcagcgaccuggacagacugagccagagccaccccauccugaacaugguggacaccaagaagagcagccugaacaucagcggcuucaacuucagccugggcgccgccgugaaggccggcgccugcaugcuggacggcggcaacaugcuggagaccaucaaggugaccccccagaccauggacggcauccugaagagcauccugaaggugaagaagagccugggcauguucgugagcgacacccccggcgagagaaaccccuacgagaacauccuguacaagaucugccugagcggcgacggcuggcccuacaucgccagcagaaccagcaucgugggcagagccugggagaacaccaccguggaccuggagagcgacggcaagccccacaaggugggcaccgccggcagcaacaagagccugcagagcgccggcuuccccaccggccugaccuacagccagcugaugacccugaaggacagcaugaugcagcuggaccccagcgccaagaccuggaucgacaucgagggcagacccgaggaccccguggagaucgcccuguaccagcccaugagcggcugcuacauccacuucuucagagagcccaccgaccugaagcaguucaagcaggacgccaaguacagccacggcaucgacguggccgaccuguuccccgcccagcccggccugaccagcgccgugaucgaggcccugcccagaaacauggugcugaccugccagggcagcgacgacaucaagagacugcuggacagccagggcagaaaggacaucaagcugaucgacaucgcccugagcaagaccgacagcagaagauucgagaacgccgugugggaccagugcaaggaccugugccacaugcacaccggcguggugguggagaagaagaagagaggcggcaaggaggagaucaccccccacugcgcccugauggacugcaucauguacgacgccgccgugagcggcggccugaacauccccgugcugagagccgugcugcccagagacaugguguucagaaccagcagccccaagguggugcugugaggacuaguaauaaggaaacuguaugaaugucugugggcaggaagugaagagauccuucuguaaagguuuuuggaauuaugucugcugaauaauaaacuuuuuugaaauaauaaaucugguagaaaaaugagaucuaaaaaaaaaaaaaaaaaaaaaaaaaaaaaaaaaaaaaaaaaaaaaaaaaaaaaaaaaaaaaaaaaaaaaaaaaaaaaaaaaaaaaaaaaaaaaaaaaaaa

SEQ ID NO: 20328 - RNA, 2073 nt, Artificial Sequence
  mRNA product Design b-4 (A100) comprising derived and/or modified sequence from LASV(LASV003-NIG-2008;Clade II)__AIT17581__SP-HsALB_NP(2-569) (opt4)
aggagagucccgcagucggcguccagcggcucugcuuguucgugugugugucguugcaggccuuauucaagcuuaccaugaagugggugaccuucaucagccugcuguuccuguucagcagcgccuacagcagcgccagcaaggaggugaagagcuuccuguggacccagagccugagaagagagcugagcggcuacugcagcagcaucaagcugcagguggugaaggacgcccaggcccugcugcacggccuggacuucagcgaggugagcaacgugcagagacugaugagaaagcagaagagagacgacagcgaccugaagagacugagagaccugaaccaggccgugaacaaccugguggagcugaagagcacccagcagaagagcgugcugagagugggcacccugaccagcgacgaccugcugacccuggccgccgaccuggagaagcugaagagcaaggugaucagaaccgagagaccccugagcagcggcguguacaugggcaaccugagcgcccagcagcuggagcagagaagaacccugcugaacaugaucggcauggugggcggcgcccagggcacccagcccggcagagacggcguggugagagugugggacgugaagaaccccgaccugcugaacaaccaguucggcaccaugcccagccugacccuggccugccugaccaagcagggccagguggaccugaacgacguggugcuggcccugaccgaccugggccugaucuacaccgccaaguaccccaacagcagcgaccuggacagacugagccagagccaccccauccugagcaugguggacaccaagaagagcagccugaacaucagcggcuacaacuucagccugggcgccgccgugaaggccggcgccugcaugcuggacggcggcaacaugcuggagaccaucaaggugaccccccagaccauggacggcauccugaagagcauccugaaggugaagaagagccugggcauguucgugagcgacacccccggcgagagaaaccccuacgagaacauccuguacaagaucugccugagcggcgacggcuggcccuacaucgccagcagaaccagcaucgugggcagagccugggagaacaccaccguggaccuggagagcgacggcaagccccagaaggugggcaccgccggcagcaacaagagccugcagagcgccggcuuccccaccggccugaccuacagccagcugaugacccugaaggacagcaugaugcagcuggaccccagcgccaagaccuggaucgacaucgagggcagacccgaggaccccguggagaucgcccuguaccagcccaugagcggcugcuacauccacuucuucagagagcccaccgaccugaagcaguucaagcaggacgccaaguacagccacggcaucgacgugaccgaccuguuccccgcccagcccggccugaccagcgccgugaucgaggcccugcccagaaacauggugcugaccugccagggcagcgacgacaucaagagacugcuggacagccagggcagaagagacaucaagcugaucgacaucgcccugagcaaggccgacagcagaagauucgagaacgccgugugggaccagugcaaggaccugugccacaugcacaccggcguggugguggagaagaagaagagaggcggcaaggaggagaucaccccccacugcgcccugauggacugcaucauguacgacgccgccgugagcggcggccugaacauccccgugcugagagccgugcugcccagagacaugguguucagaaccagcagccccaagguggugcugugaggacuaguaauaaggaaacuguaugaaugucugugggcaggaagugaagagauccuucuguaaagguuuuuggaauuaugucugcugaauaauaaacuuuuuugaaauaauaaaucugguagaaaaaugagaucuaaaaaaaaaaaaaaaaaaaaaaaaaaaaaaaaaaaaaaaaaaaaaaaaaaaaaaaaaaaaaaaaaaaaaaaaaaaaaaaaaaaaaaaaaaaaaaaaaaaa

SEQ ID NO: 20329 - RNA, 2073 nt, Artificial Sequence
  mRNA product Design b-4 (A100) comprising derived and/or modified sequence from LASV(LASV035-NIG-2009;Clade II)__AIT17589__SP-HsALB_NP(2-569) (opt4)
aggagagucccgcagucggcguccagcggcucugcuuguucgugugugugucguugcaggccuuauucaagcuuaccaugaagugggugaccuucaucagccugcuguuccuguucagcagcgccuacagcagcgccagcaaggaggugaagagcuuccuguggacccagagccugagaagagagcugagcggcuacugcagcagcaucaagcugcagguggugaaggacgcccaggcccugcugcacggccuggacuucagcgaggugagcaacgugcagagacugaugagaaagcagaagagagacgacagcgaccugaagagacugagagaccugaaccaggccgugaacaaccugguggagcugaagagcacccagcagaagagcauccugagagugggcacccugaccagcgacgaccugcugacccuggccgccgaccuggagaagcugaagagcaaggugaucagaaccgagagaccccugagcagcggcguguacaugggcaaccugagcgcccagcagcuggagcagagaagagcccugcugaacaugaucggcauggugggcggcgcccagggcacccagcccggcagagacggcguggugagagugugggacgugaagaaccccgaccugcugaacaaccaguucggcaccaugcccagccugacccuggccugccugaccaagcagggccagguggaccugaacgacgccgugcuggcccugaccgaccugggccugaucuacaccgccaaguaccccaacagcagcgaccuggacagacugagccagagccaccccauccugaacaugguggacaccaagaagagcagccugaacaucagcggcuacaacuucagccugggcgccgccgugaaggccggcgccugcaugcuggacggcggcaacaugcuggagaccaucaaggugaccccccagaccauggacggcauccugaagagcauccugaaggugaagagaagccugggcauguucgugagcgacacccccggcgagagaaaccccuacgagaacauccuguacaagaucugccugagcggcgacggcuggcccuacaucgccagcagaaccagcaucgugggcagagccugggagaacaccaccguggaccuggagagcgacggcaagccccagaaggugggcaccaccggcagcaacaagagccugcagagcgccggcuuccccaccggccugaccuacagccagcugaugacccugaaggacagcaugaugcagcuggaccccagcgccaagaccuggaucgacaucgagggcagacccgaggaccccguggagaucgcccuguaccagcccaugagcggcugcuacauccacuucuucagagagcccaccgaccugaagcaguucaagcaggacgccaaguacagccacggcaucgacguggccgaccuguuccccgcccagcccggccugaccagcgccgugaucgaggcccugcccagaaacauggugcugaccugccagggcagcgacgacaucaagaagcugcuggacagccagggcagaagagacaucaagcugaucgacaucgcccugagcaaggccgacagcagaaaguucgagaacgccgugugggaccagugcaaggaccugugccacaugcacaccggcguggugguggagaagaagaagagaggcggcaaggaggagaucaccccccacugcgcccugauggacugcaucauguacgacgccgccgugagcggcggccugaacauccccgugcugagagccgugcugcccagagacaugguguucagaaccagcagccccaagguggugcugugaggacuaguaauaaggaaacuguaugaaugucugugggcaggaagugaagagauccuucuguaaagguuuuuggaauuaugucugcugaauaauaaacuuuuuugaaauaauaaaucugguagaaaaaugagaucuaaaaaaaaaaaaaaaaaaaaaaaaaaaaaaaaaaaaaaaaaaaaaaaaaaaaaaaaaaaaaaaaaaaaaaaaaaaaaaaaaaaaaaaaaaaaaaaaaaaa

SEQ ID NO: 20330 - RNA, 2073 nt, Artificial Sequence
  mRNA product Design b-4 (A100) comprising derived and/or modified sequence from LASV(LASV1000-NIG-2009;Clade II)__AIT17783__SP-HsALB_NP(2-569) (opt4)
aggagagucccgcagucggcguccagcggcucugcuuguucgugugugugucguugcaggccuuauucaagcuuaccaugaagugggugaccuucaucagccugcuguuccuguucagcagcgccuacagcagcgccagcaaggaggugaagagcuuccuguggacccagagccugagaagagagcugagcggcuacugcagcaacaucaagcugcagguggugaaggacgcccaggcccugcugcacggccuggacuucagcgaggugagcaacgugcagagacugaugagaaagcagaagagagacgacagcgaccugaagagacugagagaccugaaccaggccgugaacaaccugguggagcugaagagcacccagcagaagagcauccugagagugggcacccugaccagcgacgaccugcugacccuggccgccgaccuggagaagcugaagagcaaggugaucagaaccgagagaccccugagcagcggcguguacaugggcaaccugagcacccagcagcuggagcagagaagagcccugcugaacaugaucggcauggugggcggcgcccagggcacccagcccggcagagacggcguggugagagugugggacgugaagaaccccgaccugcugaacaaccaguucggcaccaugcccagccugacccuggccugccugaccaagcagggccagguggaccugaacgacguggugcuggcccugaccgaccugggccugaucuacaccgccaaguaccccaacagcagcgaccuggacagacugagccagagccaccccauccugaacaugguggacaccaagaagagcagccugaacaucagcggcuacaacuucagccugggcgccgccgugaaggccggcgccugcaugcuggacggcggcaacaugcuggagaccaucaaggugaccccccagaccauggacggcauccugaagagcauccugaaggugaagaagagccugggcauguucgugagcgacacccccggcgagagaaaccccuacgagaacauccuguacaagaucugccugagcggcgacggcuggcccuacaucgccagcagaaccagcaucgugggcagagccugggagaacaccaccguggaccuggagagcgacggcaagccccagaaggugggcaccgccggcagcaacaagagccugcagagcgccggcuuccccaccggccugaccuacagccagcugaugacccugaaggacagcaugaugcagcuggaccccagcgccaagaccuggaucgacaucgagggcagacccgaggaccccguggagaucgcccuguaccagcccgugagcggcugcuacauccacuucuucagagagcccaccgaccugaagcaguucaagcaggacgccaaguacagccacggcaucgacguggccgaccuguuccccgcccagcccggccugaccagcgccgugaucgaggcccugcccagaaacauggugcugaccugccagggcagcgacgacaucaagagacugcuggacagccagggcagaagagacaucaagcugaucgacaucgcccugagcaaggccgacagcagaagauucgagaacgccgugugggaccagugcaaggaccugugccacaugcacaccggcguggugguggagaagaagaagagaggcggcaaggaggagaucaccccccacugcgcccugauggacugcaucauguacgacgccgccgugagcggcggccugaacauccccgugcugagagccgugcugcccagagacaugguguucagaaccagcagccccaagguggugcugugaggacuaguaauaaggaaacuguaugaaugucugugggcaggaagugaagagauccuucuguaaagguuuuuggaauuaugucugcugaauaauaaacuuuuuugaaauaauaaaucugguagaaaaaugagaucuaaaaaaaaaaaaaaaaaaaaaaaaaaaaaaaaaaaaaaaaaaaaaaaaaaaaaaaaaaaaaaaaaaaaaaaaaaaaaaaaaaaaaaaaaaaaaaaaaaaa

SEQ ID NO: 20331 - RNA, 2073 nt, Artificial Sequence
  mRNA product Design b-4 (A100) comprising derived and/or modified sequence from LASV(LASV221-NIG-2010;Clade II)__AIT17625__SP-HsALB_NP(2-569) (opt4)
aggagagucccgcagucggcguccagcggcucugcuuguucgugugugugucguugcaggccuuauucaagcuuaccaugaagugggugaccuucaucagccugcuguuccuguucagcagcgccuacagcagcgccagcaaggaggugaagagcuuccuguggacccagagccugagaagagagcugagcggcuacugcagcagcaucaagcugcagguggugaaggacgcccaggcccugcugcacggccuggacuucagcgaggugagcaacgugcagagacugaugagaaagcagagaagagacgacagcgaccugaagagacugagagaccugaaccaggccgugaacaaccugguggagcugaagagcacccagcagaagagcauccugagagugggcacccugaccagcgacgaccugcugacccuggccgccgaccuggagaagcugaagagcaaggugaucagaaccgagagaccccugagcagcggcguguacaugggcaaccugagcacccagcagcuggagcagagaagagcccugcugaacaugaucggcauggugggcggcgcccagggcacccagcccggcagagacggcguggugagagugugggacgugaagaaccccgaccugcugaacaaccaguucggcaccaugcccagccugacccuggccugccugaccaagcagggccagguggaccugaacgacgccgugcuggcccugaccgaccugggccugaucuacaccgccaaguaccccaacagcagcgaccuggacagacugagccagagccaccccauccugaacaugguggacaccaagaagagcagccugaacaucagcggcuacaacuucagccugggcgccgccgugaaggccggcgccugcaugcuggacggcggcaacaugcuggagaccaucaaggugaccccccagaccguggacggcauccugaagagcauccugaaggugaagagaagccugggcauguucgugagcgacacccccggcgagagaaaccccuacgagaacauccuguacaagaucugccugagcggcgacggcuggcccuacaucgccagcagaaccagcaucgugggcagagccugggagaacaccaccguggaccuggagagcgacggcaagccccagaaggugggcaccgccggcagcaacaagagccugcagagcgccggcuuccccaccggccugaccuacagccagcugaugacccugaaggacagcaugaugcagcuggaccccagcgccaagaccuggaucgacaucgagggcagacccgaggaccccguggagaucgcccuguaccagcccaugagcggcugcuacauccacuucuucagagagcccaccgaccugaagcaguucaagcaggacgccaaguacagccacggcaucgacguggccgaccuguuccccgcccagcccggccugaccagcgccgugaucgaggcccugcccagaaacauggugcugaccugccagggcagcgacgacaucaagagacugcuggacagccagggcagaagagacaucaagcugaucgacaucgcccugagcaaggccgacagcagaaaguucgagaacgccgugugggaccagugcaaggaccugugccacaugcacaccggcguggugguggagaagaagaagagaggcggcaaggaggagaucaccccccacugcgcccugauggacugcaucauguacgacgccgccgugagcggcggccugaacauccccgugcugagagccgugcugcccagagacaugguguucagaaccagcagccccaagguggugcugugaggacuaguaauaaggaaacuguaugaaugucugugggcaggaagugaagagauccuucuguaaagguuuuuggaauuaugucugcugaauaauaaacuuuuuugaaauaauaaaucugguagaaaaaugagaucuaaaaaaaaaaaaaaaaaaaaaaaaaaaaaaaaaaaaaaaaaaaaaaaaaaaaaaaaaaaaaaaaaaaaaaaaaaaaaaaaaaaaaaaaaaaaaaaaaaaa

SEQ ID NO: 20332 - RNA, 2073 nt, Artificial Sequence
  mRNA product Design b-4 (A100) comprising derived and/or modified sequence from LASV(LASV237-NIG-2010;Clade II)__AIT17639__SP-HsALB_NP(2-569) (opt4)
aggagagucccgcagucggcguccagcggcucugcuuguucgugugugugucguugcaggccuuauucaagcuuaccaugaagugggugaccuucaucagccugcuguuccuguucagcagcgccuacagcagcgccagcaaggaggugaagagcuuccuguggacccagagccugagaagagagcugagcggcuacugcagcaacaucaagcugcagguggugaaggacgcccaggcccugcugcacggccuggacuucagcgaggugagcaacgugcagagacugaugagaaagcagaagagagacgacagcgaccugaagagacugagagaccugaaccaggccgugaacaaccugguggagcugaagagcacccagcagaagagcauccugagagugggcacccugaccagcgacgaccugcugacccuggccgccgaccuggagaagcugaagagcaaggugaucagaaccgagagaccccugagcagcggcguguacaugggcaaccugagcacccagcagcuggagcagagaagagcccugcugaacaugaucggcauggugggcggcgcccagggcacccagcccggcagagacggcguggugagagugugggacgugaagaaccccgaccugcugaacaaccaguucggcaccaugcccagccugacccuggccugccugaccaagcagggccagguggaccugaacgacgccgugcuggcccugaccgaccugggccugaucuacaccgccaaguaccccaacagcagcgaccuggacagacugagccagagccaccccauccugaacaugguggacaucaagaagagcagccugaacaucagcggcuacaacuucagccugggcgccgccgugaaggccggcgccugcaugcuggacggcggcaacaugcuggagaccaucaaggugaccccccagaccauggacggcauccugaagagcauccugaaggugaagagaagccugggcauguucgugagcgacacccccggcgagagaaaccccuacgagaacauccuguacaagaucugccugagcggcgacggcuggcccuacaucgccagcagaaccagcaucgugggcagagccugggagaacaccaccguggaccuggagagcgacggcaagccccagaaggugggcagcgccggcagcaacaagagccugcagagcgccggcuuccccaccggccugaccuacagccagcugaugacccugaaggacagcaugaugcagcuggaccccagcgccaagaccuggaucgacaucgagggcagacccgaggaccccguggagaucgcccuguaccagcccaugagcggcugcuacauccacuucuucagagagcccaccgaccugaagcaguucaagcaggacgccaaguacagccacggcaucgacguggccgaccuguuccccgcccagcccggccugaccagcgccgugaucgaggcccugcccagaaacauggugcugaccugccagggcagcgacgacaucaagagacugcuggacagccagggcagaagagacaucaagcugaucgacaucgcccugagcaaggccgacagcagaagauucgagaacgccgugugggaccagugcaaggaccugugccacaugcacaccggcguggugguggagaagaagaagagaggcggcaaggaggagaucaccccccacugcgcccugauggacugcaucauguacgacgccgccgugagcggcggccugaacauccccgugcugagagccgugcugcccagagacaugguguucagaaccagcagccccaagguggugcugugaggacuaguaauaaggaaacuguaugaaugucugugggcaggaagugaagagauccuucuguaaagguuuuuggaauuaugucugcugaauaauaaacuuuuuugaaauaauaaaucugguagaaaaaugagaucuaaaaaaaaaaaaaaaaaaaaaaaaaaaaaaaaaaaaaaaaaaaaaaaaaaaaaaaaaaaaaaaaaaaaaaaaaaaaaaaaaaaaaaaaaaaaaaaaaaaa

SEQ ID NO: 20333 - RNA, 2073 nt, Artificial Sequence
  mRNA product Design b-4 (A100) comprising derived and/or modified sequence from LASV(LASV253-NIG-2011;Clade II)__AIT17671__SP-HsALB_NP(2-569) (opt4)
aggagagucccgcagucggcguccagcggcucugcuuguucgugugugugucguugcaggccuuauucaagcuuaccaugaagugggugaccuucaucagccugcuguuccuguucagcagcgccuacagcagcgccagcaaggaggugaagagcuuccuguggacccagagccugagaagagagcugagcggcuacugcagcagcaucaagcugcagguggugaaggacgcccaggcccugcugcacggccuggacuucagcgaggugagcaacgugcagagacugaugagaaagcagaagagagacgacagcgaccugaagagacugagagaccugaaccaggccgugaacaaccugguggagcugaagagcacccagcagaagagcgugcugagagugggcacccugaccagcgacgaccugcugacccuggccgccgaccuggagaagcugaagagcaaggugaucagaaccgagagaccccugagcagcggcguguacaugggcaaccugagcacccagcagcuggagcagagaagagcccugcugaacaugaucggcauggugggcggcgcccagggcacccagcccggcagagacggcguggugagagugugggacgugaagaaccccgaccugcugaacaaccaguucggcaccaugcccagccugacccuggccugccugaccaagcagggccagguggaccugaacgacguggugcuggcccugaccgaccugggccugaucuacaccgccaaguaccccaacagcagcgaccuggacagacugagccagagccaccccauccugaacaugguggacaccaagaagagcagccugaacaucagcggcuacaacuucagccugggcgccgccgugaaggccggcgccugcaugcuggacggcggcaacaugcuggagaccaucaaggugaccccccagaccauggacggcauccugaagagcauccugaaggugaagaagagccugggcauguucgugagcgacacccccggcgagagaaaccccuacgagaacauccuguacaagaucugccugagcggcgacggcuggcccuacaucgccagcagaaccagcaucgugggcagagccugggagaacaccaccguggaccuggagagcgacggcaagccccagaaggugggcaccgccggcagcaacaagagccugcagagcgccggcuuccccaccggccugaccuacagccagcugaugacccugaaggacagcaugaugcagcuggaccccagcgccaagaccuggaucgacaucgagggcagacccgaggaccccguggagaucgcccuguaccagcccaugagcggcugcuacauccacuucuucagagagcccaccgaccugaagcaguucaagcaggacgccaaguacagccacggcaucgacgugaccgaccuguuccccgcccagcccggccugaccagcgccgugaucgaggcccugcccagaaacauggugcugaccugccagggcagcgacgacaucaagagacugcuggacagccagggcagaagagacaucaagcugaucgacaucgcccugagcaaggccgacagcagaagauucgagaacgccgugugggaccagugcaaggaccugugccacaugcacaccggcguggugguggagaagaagaagagaggcggcaaggaggagaucaccccccacugcgcccugauggacugcaucauguacgacgccgccgugagcggcggccugaacauccccgugcugagagccgugcugcccagagacaugguguucagaaccagcagccccaagguggugcugugaggacuaguaauaaggaaacuguaugaaugucugugggcaggaagugaagagauccuucuguaaagguuuuuggaauuaugucugcugaauaauaaacuuuuuugaaauaauaaaucugguagaaaaaugagaucuaaaaaaaaaaaaaaaaaaaaaaaaaaaaaaaaaaaaaaaaaaaaaaaaaaaaaaaaaaaaaaaaaaaaaaaaaaaaaaaaaaaaaaaaaaaaaaaaaaaa

SEQ ID NO: 20334 - RNA, 2073 nt, Artificial Sequence
  mRNA product Design b-4 (A100) comprising derived and/or modified sequence from LASV(LASV254-NIG-2011;Clade II)__AIT17675__SP-HsALB_NP(2-569) (opt4)
aggagagucccgcagucggcguccagcggcucugcuuguucgugugugugucguugcaggccuuauucaagcuuaccaugaagugggugaccuucaucagccugcuguuccuguucagcagcgccuacagcagcgccagcaaggaggugaagagcuuccuguggacccagagccugagaagagagcugagcggcuacugcagcagcaucaagcugcagguggugaaggacgcccaggcccugcugcacggccuggacuucagcgaggugagcaacgugcagagacugaugagaaagcagaagagagacgacagcgaccugaagagacugagagaccugaaccaggccgugaacaaccugguggagcugaagagcacccagcagaagagcgugcugagagugggcacccugaccagcgacgaccugcugacccuggccgccgaccuggagaagcugaagagcaaggugaucagaaccgagagaccccugagcagcggcguguacaugggcaaccugagcacccagcagcuggagcagagaagagcccugcugaacaugaucggcauggugggcggcgcccagggcacccagcccggcagagacggcguggugagagugugggacgugaagaaccccgaccugcugaacaaccaguucggcaccaugcccagccugacccuggccugccugaccaagcagggccagguggaccugaacgacgccgugcuggcccugaccgaccugggccugaucuacaccgccaaguaccccaacagcagcgaccuggacagacugagccagagccaccccauccugaacaugguggacaccaagaagagcagccugaacaucagcggcuacaacuucagccugggcgccgccgugaaggccggcgccugcaugcuggacggcggcaacaugcuggagaccaucaaggugaccccccagaccauggacggcauccugaagagcauccugaaggugaagaagagccugggcauguucgugagcgacacccccggcgagagaaaccccuacgagaacauccuguacaagaucugccugagcggcgacggcuggcccuacaucgccagcagaaccagcaucgugggcagagccugggagaacaccaucguggaccuggagagcgacggcaagccccagaaggugggcaccgccggcagcaacaagagccugcagagcgccggcuuccccaccggccugaccuacagccagcugaugacccugaaggacagcaugaugcagcuggaccccagcgccaagaccuggaucgacaucgagggcagacccgaggaccccguggagaucgcccuguaccagcccaugagcggcugcuacauccacuucuucagagagcccaccgaccugaagcaguucaagcaggacgccaaguacagccacggcaucgacguggccgaccuguuccccgcccagcccggccugaccagcgccgugaucgaggcccugcccagaaacauggugcugaccugccagggcagcgacgacaucaagagacugcuggacagccagggcagaagagacaucaagcugaucgacaucgcccugagcaaggccgacagcagaagauucgagaacgccgugugggaccagugcaaggaccugugccacaugcacaccggcguggugguggagaagaagaagagaggcggcaaggaggagaucaccccccacugcgcccugauggacugcaucauguacgacgccgccgugagcggcggccugaacauccccgugcugagagccgugcugcccagagacaugguguucagaaccagcagccccaagguggugcugugaggacuaguaauaaggaaacuguaugaaugucugugggcaggaagugaagagauccuucuguaaagguuuuuggaauuaugucugcugaauaauaaacuuuuuugaaauaauaaaucugguagaaaaaugagaucuaaaaaaaaaaaaaaaaaaaaaaaaaaaaaaaaaaaaaaaaaaaaaaaaaaaaaaaaaaaaaaaaaaaaaaaaaaaaaaaaaaaaaaaaaaaaaaaaaaaa

SEQ ID NO: 20335 - RNA, 2073 nt, Artificial Sequence
  mRNA product Design b-4 (A100) comprising derived and/or modified sequence from LASV(Nig08-04;Clade II)__ADU56611__SP-HsALB_NP(2-569) (opt4)
aggagagucccgcagucggcguccagcggcucugcuuguucgugugugugucguugcaggccuuauucaagcuuaccaugaagugggugaccuucaucagccugcuguuccuguucagcagcgccuacagcagcgccagcaaggaggugaagagcuuccuguggacccagagccugagaagagagcugagcggcuacugcagcaacaucaagcugcagguggugaaggacgcccaggcccugcugcacggccuggacuucagcgaggugagcaacgugcagagacugaugagaaagcagaagagagacgacggcgaccugaagagacugagagaccugaaccaggccgugaacaaccugguggagcugaagagcacccagcagaagagcgugcugagagugggcacccugaccagcgacgaccugcugacccuggccgccgaccuggagaagcugaagagcaaggugaucagaaccgagagaccccugagcagcggcguguacaugggcaaccugagcacccagcagcuggagcagagaaaggcccugcugagcaugaucggcauggugggcggcgcccagggcacccagcccggcagagacggcguggugagagugugggacgugaagaaccccgaccugcugaacaaccaguucggcaccaugcccagccugacccuggccugccugaccaagcagggccagguggaccugaacgacgccgugcuggcccugaccgaccugggccugaucuacaccgccaaguaccccaacagcagcgaccuggacagacugagccagagccaccccauccugaacaugguggacaccaagaagagcagccugaacaucagcggcuacaacuucagccugggcgccgccgugaaggccggcgccugcaugcuggacggcggcaacaugcuggagaccaucaaggugaccccccagaccauggacggcauccugaagagcauccugaaggugaagagaagccugggcauguucgugagcgacacccccggcgagagaaaccccuacgagaacauccuguacaagaucugccugagcggcgacggcuggcccuacaucgccagcagaaccagcaucgugggcagagccugggagaacaccaccguggaccuggagagcgacggcaagccccagaaggugggcaccgccggcagcaacaagagccugcagagcgccggcuuccccaccggccugaccuacagccagcugaugacccugaaggacagcaugaugcagcuggaccccagcgccaagaccuggaucgacaucgagggcagacccgaggaccccguggagaucgcccuguaccagcccaugagcggcugcuacauccacuucuucagagagcccaccgaccugaagcaguucaagcaggacgccaaguacagccacggcaucgacgugaccgaccuguucagcgcccagcccggccugaccagcgccgugaucgaggcccugcccagaaacauggugcugaccugccagggcagcgacgacaucaagaagcugcuggacagccagggcagaagagacaucaagcugaucgacaucagccugaacaaggccgacagcagaagauucgagaacgccgugugggaccagugcaaggaccugugccacaugcacaccggcguggugguggagaagaagaagagaggcggcaaggaggagaucaccccccacugcgcccugauggacugcaucauguucgacgccgccgugagcggcggccugaacauccccauccugagagccgugcugcccagagacaugguguucagaaccagcagccccaagguggugcugugaggacuaguaauaaggaaacuguaugaaugucugugggcaggaagugaagagauccuucuguaaagguuuuuggaauuaugucugcugaauaauaaacuuuuuugaaauaauaaaucugguagaaaaaugagaucuaaaaaaaaaaaaaaaaaaaaaaaaaaaaaaaaaaaaaaaaaaaaaaaaaaaaaaaaaaaaaaaaaaaaaaaaaaaaaaaaaaaaaaaaaaaaaaaaaaaa

SEQ ID NO: 20336 - RNA, 2076 nt, Artificial Sequence
  mRNA product Design b-4 (A100) comprising derived and/or modified sequence from LASV(GA391;Clade III)__AAA46284__SP-HsALB_NP(2-570) (opt4)
aggagagucccgcagucggcguccagcggcucugcuuguucgugugugugucguugcaggccuuauucaagcuuaccaugaagugggugaccuucaucagccugcuguuccuguucagcagcgccuacagcagcgccagcaaggaggugagaagcugccuguggacccagagccugagaagagagcugagcggcuacugcagcaacaucaagcugcagguggugaaggacgcccaggcccugcugcacggccuggacuucagcgaggugagcaacgugcagagacugaugagaaagcagaagagagacgacggcgaccugaagagacugagagaccugaaccaggccgugaacaaccugguggagcugaagagcacccagcagaagagcgugcugagagugggcacccugagcagcgacgaccugcugauccuggccgccgaccuggagaagcugaagagcaaggugaccagaaccgagagaccccugagcagcggcguguacaugggcaaccugagcagccagcagcuggaccagagaagagcccugcugaacaugaucggcaugaccggcgugagcggcggcggcaagggcgccagcaacggcaucgugagagugugggacgugaagaacgccgagcugcugaacaaccaguucggcaccaugcccagccugacccuggccugccugaccaagcagggccagguggaccugaacgacgccgugcaggcccugaccgaccugggccugaucuacaccgccaaguaccccaacagcagcgaccuggacagacugagccagagccaccccauccugaacaugaucgacaccaagaagagcagccugaacaucagcggcuacaacuucagccugggcgccgccgugaaggccggcgccugcaugcuggacggcggcaacaugcuggagaccaucaaggugagcccccagaccauggacggcauccugaagagcauccugaaggugaagaagagccugggcauguucgugagcgacacccccggcgagagaaaccccuacgagaacauccuguacaagaucugccugagcggcgacggcuggagcuacaucgccagcagaaccagcaucgugggcagagccugggagaacaccgugguggaccuggagcaggacaacaagccccagaagaucggcaacggcggcagcaacaagagccugcagagcgccggcuucgccgccggccugaucuacagccagcugaugacccugaaggacuucaagugcuucaaccugauccccaacgccaagaccuggauggacaucgagggcagacccgaggaccccguggagaucgcccuguaccagcccagcagcggcugcuacgugcacuucuucagagagcccaccgaccugaagcaguucaagcaggacgccaaguacagccacggcagagacgugaccgaccuguucgccgcccagcccggccugaccagcgccgugaucgaggcccugcccagaaacauggugaucaccugccagggcagcgaggacaucagaaagcugcuggagagccagggcagaagagacaucaagcugaucgacaucacccugagcaaggccgacagcagaaaguucgagaacgccgugugggaccaguucaaggaccugugccacaugcacaccggcguggugguggagaagaagaagagaggcggcaaggaggagaucaccccccacugcgcccugauggacugcaucauguucgacgccgccgugagcggcggccuggacgccaaggugcugagaguggugcugcccagagacaugguguucagaaccagcacccccaagguggugcugugaggacuaguaauaaggaaacuguaugaaugucugugggcaggaagugaagagauccuucuguaaagguuuuuggaauuaugucugcugaauaauaaacuuuuuugaaauaauaaaucugguagaaaaaugagaucuaaaaaaaaaaaaaaaaaaaaaaaaaaaaaaaaaaaaaaaaaaaaaaaaaaaaaaaaaaaaaaaaaaaaaaaaaaaaaaaaaaaaaaaaaaaaaaaaaaaa

SEQ ID NO: 20337 - RNA, 2073 nt, Artificial Sequence
  mRNA product Design b-4 (A100) comprising derived and/or modified sequence from LASV(Nig08-A19;Clade III)__ADU56619__SP-HsALB_NP(2-569) (opt4)
aggagagucccgcagucggcguccagcggcucugcuuguucgugugugugucguugcaggccuuauucaagcuuaccaugaagugggugaccuucaucagccugcuguuccuguucagcagcgccuacagcagcgccagcaaggaggugaagagcuuccuguggacccagagccugagaagagagcugagcggcuacugcagcaacaucaagcugcagguggugaaggacgcccaggcccugcugcacggccuggacuucagcgaggugagcaacgugcagagacugaugagaaagcagaagagagacgacggcgaccugaagagacugagagaccugaaccaggccgugaacaaccugguggagcugaagagcacccagcagaagagcgugcugagagugggcacccugagcagcgacgaccugcuggugcuggccgccgaccuggagaagcugaagagcaagguggugagaaccgagagaccccugagcagcggcaucuacaugggcaaccugagcagccagcagcuggaccagagaaaggcccugcugaacaugaucggcaugaccggcggcaacggcggcagaaacaccaccagcgacggcaucgugagagugugggacgugaagaacgccgagcugcugaacaaccaguucggcaccaugcccagccugacccuggccugccugaccaagcagggccagguggaccugaacgacgccgugcaggcccugaccgaccugggccugaucuacaccgccaaguaccccaacagcagcgaccuggacagacuggcccagagccaccccauccugaacaugaucgacaccaagaagagcagccugaacaucagcggcuacaacuucagccugggcgccgccgugaaggccggcgccugcaugcuggacggcggcaacaugcuggagaccaucaaggugagcccccagaccauggacggcauccugaagagcauccugaaggugaagagaagccugggcauguucaucagcgacacccccggcgagagaaaccccuacgagaacauccuguacaagaucugccugagcggcgacggcuggcccuacaucgccagcagaaccagcaucgugggcagagccugggagaacaccgugguggaccuggagagcgacaacaagccccagaagaccggcaacggcggcagcaacaagagccugcagagcgccggcuucgccgccggccugaccuacagccagcugaugacccugaaggacagcaugcugcagcuggaccccaacgccaagaccuggauggacaucgagggcagacccgaggaccccguggagaucgcccuguaccagcccagcagcggcugcuacauccacuucuucagagagcccaccgaccugaagcaguucaagcaggacgccaaguacagccacggcaucgacgugaccgaccuguucgccgcccagcccggccugaccagcgccgugaucgaggcccugcccagaaacauggugaucaccugccagggcagcgaggacaucagaaagcugcuggagagccagggcagaagagacaucaagcugaucgacaucagccugagcaagguggacagcagaaaguucgagaacgccgugugggaccaguucaaggaccugugccacaugcacaccggcaucgugguggagaagaagaagagaggcggcaaggaggagaucaccccccacugcgcccugauggacugcaucauguucgacgccgccgugagcggcggcguggacgccaaggugcugagagccgugcugcccagagacaugguguucagaaccagcacccccaagguggugcugugaggacuaguaauaaggaaacuguaugaaugucugugggcaggaagugaagagauccuucuguaaagguuuuuggaauuaugucugcugaauaauaaacuuuuuugaaauaauaaaucugguagaaaaaugagaucuaaaaaaaaaaaaaaaaaaaaaaaaaaaaaaaaaaaaaaaaaaaaaaaaaaaaaaaaaaaaaaaaaaaaaaaaaaaaaaaaaaaaaaaaaaaaaaaaaaaa

SEQ ID NO: 20338 - RNA, 2073 nt, Artificial Sequence
  mRNA product Design b-4 (A100) comprising derived and/or modified sequence from LASV(G1180-SLE-2010;Clade IV)__AIT17169__SP-HsALB_NP(2-569) (opt4)
aggagagucccgcagucggcguccagcggcucugcuuguucgugugugugucguugcaggccuuauucaagcuuaccaugaagugggugaccuucaucagccugcuguuccuguucagcagcgccuacagcagcgccagcaaggagaucaagagcuuccuguggacccagagccugagaagagagcugagcggcuacugcagcaacaucaagcugcagguggugaaggacgcccaggcccugcugcacggccuggacuucagcgaggugagcaacgugcagagacugaugagaaaggagagaagagacgacaacgaccugaagagacugagagaccugaaccaggccgugaacaaccugguggagcugaagagcacccagcagaagagcauccugagagugggcacccugaccagcgacgaccugcugauccuggccgccgaccuggagaagcugaagagcaaggugaucagaaccgagagaccccugagcgccggcguguacaugggcaaccugagcagccagcagcuggaccagagaagagcccugcugagcaugaucggcaugagcagcggcaaccagagagcccaggccggcagagacggcguggugagagugugggacgugaagaacguggagcugcugaacaaccaguucggcaccaugcccagccugacccuggccugccugaccaagcagggccagguggaccugaacgacgccgugcaggcccugaccgaccugggccugaucuacaccgccaaguaccccaacaccagcgaccuggacagacugacccagagccaccccauccugaacaugaucgacaccaagaagagcagccugaacaucagcggcuacaacuucagccugggcgccgccgugaaggccggcgccugcaugcuggacggcggcaacaugcuggagaccaucaaggugagcccccagaccauggacggcauccugaagagcauccugaaggugaagaaggcccugggcauguucaucagcgacacccccggcgagagaaaccccuacgagaacauccuguacaagaucugccugagcggcgacggcuggcccuacaucgccagcagaaccagcaucaccggcagagccugggagaacaccgugguggaccuggagagcgacggcaagccccagaaggccggcagcaacaacagcaacaagagccugcagagcgugggcuucaccgccggccugaccuacagccagcugaugacccugaaggacgccaugcugcagcuggaccccaacgccaagaccuggauggacaucgagggcagacccgaggaccccguggagaucgcccuguaccagcccagcagcggcugcuacauccacuucuucagagagcccaccgaccugaagcaguucaagcaggacgccaaguacagccacggcaucgacgugaccgaccuguucgccgcccagcccggccugaccagcgccgugaucgacgcccugcccagaaacauggugaucaccugccagggcagcgacgacaucagaaagcugcuggagagccagggcagaaaggacaucaagcugaucgacaucgcccugagcaagaccgacagcagaaaguacgagaacgccgugugggaccaguacaaggaccugugccacaugcacaccggcguggugguggagaagaagaagagaggcggcaaggaggagaucaccccccacugcgcccugauggacugcaucauguucgacgccgccgugagcggcggccugaacaccagcgugcugagagccgugcugcccagagacaugguguucagaaccagcacccccagaguggugcugugaggacuaguaauaaggaaacuguaugaaugucugugggcaggaagugaagagauccuucuguaaagguuuuuggaauuaugucugcugaauaauaaacuuuuuugaaauaauaaaucugguagaaaaaugagaucuaaaaaaaaaaaaaaaaaaaaaaaaaaaaaaaaaaaaaaaaaaaaaaaaaaaaaaaaaaaaaaaaaaaaaaaaaaaaaaaaaaaaaaaaaaaaaaaaaaaa

SEQ ID NO: 20339 - RNA, 2073 nt, Artificial Sequence
  mRNA product Design b-4 (A100) comprising derived and/or modified sequence from LASV(G1442-SLE-2011;Clade IV)__AIT17181__SP-HsALB_NP(2-569) (opt4)
aggagagucccgcagucggcguccagcggcucugcuuguucgugugugugucguugcaggccuuauucaagcuuaccaugaagugggugaccuucaucagccugcuguuccuguucagcagcgccuacagcagcgccagcaaggaggugaagagcuuccuguggacccagagccugagaagagagcugagcggcuacugcagcaacaucaagcugcagguggugaaggacgcccaggcccugcugcacggccuggacuucagcgaggugagcaacgugcagagacugaugagaaagcagagaagagacgacaacgaccugaagagacugagagaccugaaccaggccgugaacaaccugguggagcugaagagcacccagcagaagagcgugcugagagugggcacccugaccagcgacgaccugcuggugcuggccgccgaccuggagaagcugaagagcaaggugaucagaaccgagagaccccugagcgccggcguguacaugggcaaccugagcagccagcagcuggaccagagaagagcccugcugaacaugaucggcaugagcggcggcauccagggcaccagaaccggcagagacggcguggugagagugugggacgugaagaacgccgaccugcugaacaaccaguucggcaccaugcccagccugacccuggccugccugaccaagcagggccagguggaccugaacgacguggugcaggcccugaccgaccugggccugaucuacaccgccaaguaccccaacgccagcgaccuggacagacugacccagagccaccccauccugaacaugaucgacaccaagaagagcagccugaacaucagcggcuacaacuucagccugggcgccgccgugaaggccggcgccugcaugcuggacggcggcaacaugcuggagaccaucaaggugagcccccagaccauggacggcauccugaagagcauccugaaggugaagaagacccugggcauguucaucagcgacacccccggcgagagaaaccccuacgagaacauccuguacaagaucugccugagcggcgacggcuggcccuacaucgccagcagaaccagcaucaccggcagagccugggagaacaccgugguggaccuggagagcgacggcaagccccagaaggccggcagcaacaacagcaacaagagccugcagagcgccggcuucgccgccggccugaccuacagccagcugaugacccugaaggacgccaugcugcagcuggaccccaacgccaagaccuggauggacaucgagggcagacccgaggaccccguggagaucgcccuguaccagcccagcagcggcugcuacauccacuucuucagagagcccaccgaccugaagcaguucaagcaggacgccaaguacagccacggcaucgacgugaccgaccuguucgccgcccagcccggccugaccagcgccgugaucgaggcccugcccagaaacauggugaucaccugccagggcagcgacgacaucaagaagcugcuggagagccagggcagaaaggacaucaagcugaucgacaucgcccugagcaagaccgacagcagaaaguacgagaacgccgugugggaccaguacaaggaccugugccacaugcacaccggcguggugguggagaagaagaagagaggcggcaaggaggagaucaccccccacugcgcccugauggacugcaucauguucgacgccgccgugagcggcggccugaacacccuggugcugagagccgugcugcccagagacaugguguucagaaccagcacccccagaguggugcugugaggacuaguaauaaggaaacuguaugaaugucugugggcaggaagugaagagauccuucuguaaagguuuuuggaauuaugucugcugaauaauaaacuuuuuugaaauaauaaaucugguagaaaaaugagaucuaaaaaaaaaaaaaaaaaaaaaaaaaaaaaaaaaaaaaaaaaaaaaaaaaaaaaaaaaaaaaaaaaaaaaaaaaaaaaaaaaaaaaaaaaaaaaaaaaaaa

SEQ ID NO: 20340 - RNA, 2073 nt, Artificial Sequence
  mRNA product Design b-4 (A100) comprising derived and/or modified sequence from LASV(G3010-SLE-2013;Clade IV)__AIT17345__SP-HsALB_NP(2-569) (opt4)
aggagagucccgcagucggcguccagcggcucugcuuguucgugugugugucguugcaggccuuauucaagcuuaccaugaagugggugaccuucaucagccugcuguuccuguucagcagcgccuacagcagcgccagcaaggagaucaagagcuuccuguggacccagagccugagaagagagcugagcggcuacugcagcaacaucaagcugcagguggugaaggacgcccaggcccugcugcacggccuggacuucagcgaggugagcaacgugcagagacugaugagaaaggagagaagagacgacaacgaccugaagagacugagagaccugaaccaggccgugaacaaccugguggagcugaagagcacccagcagaagagcauccugagagugggcacccugaccagcgacgaccugcugauccuggccgccgaccuggagaagcugaagagcaaggugaccagaaccgagagaccccugagcgccggcguguacaugggcaaccugagcagccagcagcuggaccagagaagagcccugcugagcaugaucggcaugagcagcggcgugcagggcgccagagccggcagagacggcguggugagagugugggacgugaagaacgccgagcugcugaacaaccaguucggcaccaugcccagccugacccuggccugccugaccaagcagggccagguggaccugaacgacguggugcaggcccugaccgaccugggccugaucuacaccgccaaguaccccaacaccagcgaccuggacagacugacccagagccaccccauccugaacaugaucgacaccaagaagagcagccugaacaucagcggcuacaacuucagccugggcgccgccgugaaggccggcgccugcaugcuggacggcggcaacaugcuggagaccaucaaggugagcccccagaccauggacggcauccugaagagcauccugaaggugaagaaggcccugggcauguucaucagcgagacccccggcgagagaaaccccuacgagaacauccuguacaagaucugccugagcggcgacggcuggcccuacaucgccagcagaaccagcaucaccggcagagccugggagaacaccgugguggaccuggagagcgacggcaagccccagaaggccggcagcaacaacagcaacaagagccugcagagcgccggcuucaccgccggccugaccuacagccagcugaugacccugaaggacgccaugcugcagcuggaccccaacgccaagaccuggauggacaucgagggcagacccgaggaccccguggagguggcccuguaccagcccagcagcggcugcuacauccacuucuucagagagcccaccgaccugaagcaguucaagcaggacgccaaguacagccacggcaucgacgugaccgaccuguucgccgcccagcccggccugaccagcgccgugaucgacgcccugcccagaaacauggugaucaccugccagggcagcgacgacaucaagaagcugcuggagagccagggcagaaaggacaucaagcugaucgacaucgcccugagcaagaccgacagcagaaaguacgagaacgccgugugggaccaguacaaggaccugugccacaugcacaccggcguggugguggagaagaagaagagaggcggcaaggaggagaucaccccccacugcgcccugauggacugcaucauguucgacgccgccgugagcggcggccugaacaccagcgugcugagagccgugcugcccagagacaugguguucagaaccagcacccccagaguggugcugugaggacuaguaauaaggaaacuguaugaaugucugugggcaggaagugaagagauccuucuguaaagguuuuuggaauuaugucugcugaauaauaaacuuuuuugaaauaauaaaucugguagaaaaaugagaucuaaaaaaaaaaaaaaaaaaaaaaaaaaaaaaaaaaaaaaaaaaaaaaaaaaaaaaaaaaaaaaaaaaaaaaaaaaaaaaaaaaaaaaaaaaaaaaaaaaaa

SEQ ID NO: 20341 - RNA, 2073 nt, Artificial Sequence
  mRNA product Design b-4 (A100) comprising derived and/or modified sequence from LASV(G502-SLE-2009;Clade IV)__AIT17127__SP-HsALB_NP(2-569) (opt4)
aggagagucccgcagucggcguccagcggcucugcuuguucgugugugugucguugcaggccuuauucaagcuuaccaugaagugggugaccuucaucagccugcuguuccuguucagcagcgccuacagcagcgccagcaaggagaucaagagcuuccuguggacccagagccugagaagagagcugagcggcuacugcagcaacaucaagcugcagguggugaaggacgcccaggcccugcugcacggccuggacuucagcgaggugagcaacgugcagagacugaugagaaaggagagaagagacgacaacgaccugaagagacugagagaccugaaccaggccgugaacaaccugguggagcugaagagcacccagcagaagagcauccugagagugggcacccugaccagcgacgaccugcugauccuggccgccgaccuggagaagcugaagagcaaggugaucagaaccgagagaccccugagcgccggcguguacaugggcaaccugagcagccagcagcuggaccagagaagagcccugcugagcaugaucggcaugagcggcggcaaccagggcgugagagccggcaaggacggcguggugagagugugggacgugaagaacgccgagcugcugaacaaccaguucggcaccaugcccagccugacccuggccugccugaccaagcagggccagguggaccugaacgacgccgugcaggcccugaccgaccugggccugaucuacaccgccaaguaccccaacaccagcgaccuggacagacugacccagagccaccccauccugaacaugaucgacaccaagaagagcagccugaacaucagcggcuacaacuucagccugggcgccgccgugaaggccggcgccugcaugcuggacggcggcaacaugcuggagaccaucaaggugagcccccagaccauggacggcauccugaagagcauccugaaggugaagaaggcccugggcauguucaucagcgacacccccggcgagagaaaccccuacgagaacauccuguacaagaucugccugagcggcgacggcuggcccuacaucgccagcagaaccagcaucaccggcagagccugggagaacaccgugguggaccuggagagcgacggcaagccccagaaggccggcagcaacaacagcaacaagagccugcagagcgccggcuucaccgccggccugaccuacagccagcugaugacccugaaggacgccaugcugcagcuggaccccaacaccaagaccuggauggacaucgagggcagacccgaggaccccguggagaucgcccuguaccagcccagcagcggcugcuacauccacuucuucagagagcccaccgaccugaagcaguucaagcaggacgccaaguacagccacggcaucgacgugaccgaccuguucgccgcccagcccggccugaccagcgccgugaucgacgcccugcccagaaacauggugaucaccugccagggcagcgacgacaucagaaagcugcuggagagccagggcagaaaggacaucaagcugaucgacaucgcccugaacaagaccgacagcagaaaguacgagaacgccgugugggaccaguacaaggaccugugccacaugcacaccggcguggugguggagaagaagaagagaggcggcaaggaggagaucaccccccacugcgcccugauggacugcaucauguucgacgccgccgugagcggcggccugaacaccagcgugcugagagccgugcugcccagagacaugguguucagaaccagcacccccagaguggugcugugaggacuaguaauaaggaaacuguaugaaugucugugggcaggaagugaagagauccuucuguaaagguuuuuggaauuaugucugcugaauaauaaacuuuuuugaaauaauaaaucugguagaaaaaugagaucuaaaaaaaaaaaaaaaaaaaaaaaaaaaaaaaaaaaaaaaaaaaaaaaaaaaaaaaaaaaaaaaaaaaaaaaaaaaaaaaaaaaaaaaaaaaaaaaaaaaa

SEQ ID NO: 20342 - RNA, 2073 nt, Artificial Sequence
  mRNA product Design b-4 (A100) comprising derived and/or modified sequence from LASV(G733-SLE-2010;Clade IV)__AIT17155__SP-HsALB_NP(2-569) (opt4)
aggagagucccgcagucggcguccagcggcucugcuuguucgugugugugucguugcaggccuuauucaagcuuaccaugaagugggugaccuucaucagccugcuguuccuguucagcagcgccuacagcagcgccagcaaggagaucaagagcuuccuguggacccagagccugagaagagagcugagcggcuacugcagcaacaucaagcugcagguggugaaggacgcccaggcccugcugcacggccuggacuucagcgaggugagcaacgugcagagacugaugagaaaggagagaagagacgacaacgaccugaagagacugagagaccugaaccaggccgugaacaaccugguggagcugaagagcacccagcagaagagcgugcugagagugggcacccugaccagcgacgagcugcuggugcuggccgccgaccuggagaagcugaagagcaaggugaucagaaccgagagaccccugagcgccggcguguacaugggcaaccugagcagccagcagcuggaccagagaagagcccugcugagcaugaucggcaugagcggcggcaaccagggcgccagaaccggcagagacggcguggugagagugugggacgugaagaacgccgagcugcugaacaaccaguucggcaccaugcccagccugacccuggccugccugaccaagcagggccagguggaccugaacgacgccgugcaggcccugaccgaccugggccugaucuacaccgccaaguaccccaacaccagcgaccuggacagacugacccagagccaccccauccugaacaugaucgacaccaagaagagcagccugaacaucagcggcuacaacuucagccugggcgccgccgugaaggccggcgccugcaugcuggacggcggcaacaugcuggagaccaucaaggugagcccccagaccauggacggcauccugaagagcauccugaaggugaagaaggcccugggcauguucaucagcgacacccccggcgagagaaaccccuacgagaacauccuguacaagaucugccugagcggcgacggcuggcccuacaucgccagcagaaccagcaucaccggcagagccugggagaacaccgugguggaccuggagagcgacggcaagccccagaaggccggcagcaacaacagcaacaagagccugcagagcgccggcuucaccgccggccugaccuacagccagcugaugacccugaaggacgccaugcugcagcuggaccccaacgccaagaccuggauggacaucgagggcagacccgaggaccccguggagaucgcccuguaccagcccagcagcggcugcuacauccacuucuucagagagcccaccgaccugaagcaguucaagcaggacgccaaguacagccacggcaucgacgugaccgaccuguucgccgcccagcccggccugaccagcgccgugaucgacgcccugcccagaaacauggugaucaccugccagggcagcgacgacaucagaaagcugcuggagagccagggcagaaaggacaucaagcugaucgacaucgcccugagcaagaucgacagcagaaaguacgagaacgccgugugggaccaguacaaggaccugugccacaugcacaccggcguggugguggagaagaagaagagaggcggcaaggaggagaucaccccccacugcgcccugauggacugcaucauguucgacgccgccgugagcggcggccugaacagccuggugcugagagccgugcugcccagagacaugguguucagaaccagcacccccagaguggugcugugaggacuaguaauaaggaaacuguaugaaugucugugggcaggaagugaagagauccuucuguaaagguuuuuggaauuaugucugcugaauaauaaacuuuuuugaaauaauaaaucugguagaaaaaugagaucuaaaaaaaaaaaaaaaaaaaaaaaaaaaaaaaaaaaaaaaaaaaaaaaaaaaaaaaaaaaaaaaaaaaaaaaaaaaaaaaaaaaaaaaaaaaaaaaaaaaa

SEQ ID NO: 20343 - RNA, 2073 nt, Artificial Sequence
  mRNA product Design b-4 (A100) comprising derived and/or modified sequence from MOPV/LASV reassortant(IGS-1;Clade IV)__AFY05578__SP-HsALB_NP(2-569) (opt4)
aggagagucccgcagucggcguccagcggcucugcuuguucgugugugugucguugcaggccuuauucaagcuuaccaugaagugggugaccuucaucagccugcuguuccuguucagcagcgccuacagcagcgccagcaaggagaucaagagcuuccuguggacccagagccugagaagagagcugagcggcuacugcagcaacaucaagcugcagguggugaaggacgcccaggcccugcugcacggccuggacuucagcgaggugagcaacgugcagagacugaugagaaaggagagaagagacgacaacgaccugaagagacugagagaccugaaccaggccgugaacaaccugguggagcugaagagcacccagcagaagagcauccugagagugggcacccugaccagcgacgaccugcugauccuggccgccgaccuggagaagcugagaagcaaggugaucagaaccgagagaccccugagcgccggcguguacaugggcaaccugagcagccagcagcuggaccagagaagagcccugcugaacaugaucggcaugagcggcggcaaccagggcgccagagccggcagagacggcguggugagagugugggacgugaagaacgccgagcugcugagcaaccaguucggcaccaugcccagccugacccuggccugccugaccaagcagggccagguggaccugaacgacgccgugcaggcccugaccgaccugggccugaucuacaccgccaaguaccccaacaccagcgaccuggacagacugacccagagccaccccauccugaacaugaucgacaccaagaagagcagccugaacaucagcggcuacaacuucagccugggcgccgccgugaaggccggcgccugcaugcuggacggcggcaacaugcuggagaccaucaaggugagcccccagaccauggacggcauccugaagagcauccugaaggugaagaaggcccugggcauguucaucagcgacacccccggcgagagaaaccccuacgagaacauccuguacaagaucugccugagcggcgacggcuggcccuacaucgccagcagaaccagcaucaccggcagagccugggagaacaccgugguggaccuggagagcgacggcaagccccagaaggccgacagcaacaacagcagcaagagccugcagagcgccggcuucaccgccggccugaccuacagccagcugaugacccugaaggacgccaugcugcagcuggaccccaacgccaagaccuggauggacaucgagggcagacccgaggaccccguggagaucgcccuguaccagcccagcagcggcugcuacauccacuucuucagagagcccaccgaccugaagcaguucaagcaggacgccaaguacagccacggcaucgacgugaccgaccuguucgccacccagcccggccugaccagcgccgugaucgacgcccugcccagaaacauggugaucaccugccagggcagcgacgacaucagaaagcugcuggagagccagggcagaaaggacaucaagcugaucgacaucgaccugagcaagaccgacagcagaaaguacgagaacgccgugugggaccaguacaaggaccugugccacaugcacaccggcguggugguggagaagaagaagagaggcggcaaggaggagaucaccccccacugcgcccugauggacugcaucauguucgacgccgccgugagcggcggccugaacaccagcgugcugagagccgugcugcccagagacaugguguucagaaccagcacccccagaguggugcugugaggacuaguaauaaggaaacuguaugaaugucugugggcaggaagugaagagauccuucuguaaagguuuuuggaauuaugucugcugaauaauaaacuuuuuugaaauaauaaaucugguagaaaaaugagaucuaaaaaaaaaaaaaaaaaaaaaaaaaaaaaaaaaaaaaaaaaaaaaaaaaaaaaaaaaaaaaaaaaaaaaaaaaaaaaaaaaaaaaaaaaaaaaaaaaaaa

SEQ ID NO: 20344 - RNA, 2073 nt, Artificial Sequence
  mRNA product Design b-4 (A100) comprising derived and/or modified sequence from LASV(LM765-SLE-2012;Clade IV)__AIT17815__SP-HsALB_NP(2-569) (opt4)
aggagagucccgcagucggcguccagcggcucugcuuguucgugugugugucguugcaggccuuauucaagcuuaccaugaagugggugaccuucaucagccugcuguuccuguucagcagcgccuacagcagcgccagcaaggagaucaagagcuuccuguggacccagagccugagaagagagcugagcggcuacugcagcaacaucaagcugcagguggugaaggacgcccaggcccugcugcacggccuggacuucagcgaggugagcaacgugcagagacugaugagaaaggagagaagagacgacaacgaccugaagagacugagagaccugaaccaggccgugaacaaccugguggagcugaagagcacccagcagaagagcauccugagagugggcacccugaccagcgacgaccugcugauccuggccgccgaccuggagaagcugaagagcaaggugaccagaaccgagagaccccugagcgccggcguguacaugggcaaccugagcagccagcagcuggaccagagaagagcccugcuggacaugaucggcaugagcggcagcaaccagggcgccagagccggcagagacggcguggugagagugugggacgugaagaacgccgagcugcugaacaaccaguucggcaccaugcccagccugacccuggccugccugaccaagcagggccagguggaccugaacgacgccgugcaggcccugaccgaccugggccugaucuacaccgccaaguaccccaacaccagcgaccuggacagacugacccagagccaccccauccugaacaugaucgacaccaagaagagcagccugaacaucagcggcuacaacuucagccugggcgccgccgugaaggccggcgccugcaugcuggacggcggcaacaugcuggagaccaucaaggugagcccccagaccauggacggcauccugaagagcauccugaaggugaagaaggcccugggcauguucaucagcgacgcccccggcgagagaaaccccuacgagaacauccuguacaagaucugccugagcggcgacggcuggcccuacaucgccagcagaaccagcaucaccggcagagccugggagaacaccgugguggaccuggagagcgacggcaagccccagaaggccggcagcaacggcagcaacaagagccugcagagcgccggcuucaccgccggccugaccuacagccagcugaugacccugaaggacgccaugcugcagcuggaccccaacgccaagaccuggauggacaucgagggcagacccgaggaccccguggagaucgcccuguaccagcccagcagcggcugcuacauccacuucuucagagagcccaccgaccugaagcaguucaagcaggacgccaaguacagccacggcaucgacgugaccgaccuguucgccgcccagcccggccugaccagcgccgugaucgacgcccugcccagaaacauggugaucaccugccagggcagcgacgacaucagaaagcuguucgagagccagggcagaaaggacaucaagcugaucgacaucgcccugagcaagaccgacagcagaaaguacgagaacgccgugugggaccaguacaaggaccugugccacaugcacaccggcaucgugguggagaagaagaagagaggcggcaaggaggagaucaccccccacugcgcccugauggacugcaucauguucgacgccgccgugagcggcggccugaacaccagcgugcugagagccgugcugcccagagacaugguguucagaaccagcacccccagaguggugcugugaggacuaguaauaaggaaacuguaugaaugucugugggcaggaagugaagagauccuucuguaaagguuuuuggaauuaugucugcugaauaauaaacuuuuuugaaauaauaaaucugguagaaaaaugagaucuaaaaaaaaaaaaaaaaaaaaaaaaaaaaaaaaaaaaaaaaaaaaaaaaaaaaaaaaaaaaaaaaaaaaaaaaaaaaaaaaaaaaaaaaaaaaaaaaaaaa

SEQ ID NO: 20345 - RNA, 2073 nt, Artificial Sequence
  mRNA product Design b-4 (A100) comprising derived and/or modified sequence from LASV(LM776-SLE-2012;Clade IV)__AIT17825__SP-HsALB_NP(2-569) (opt4)
aggagagucccgcagucggcguccagcggcucugcuuguucgugugugugucguugcaggccuuauucaagcuuaccaugaagugggugaccuucaucagccugcuguuccuguucagcagcgccuacagcagcgccagcaaggagaucaagagcuuccuguggacccagagccugagaagagagcugagcagcuacugcagcaacaucaagcugcagguggugaaggacgcccaggcccugcugcacggccuggacuucagcgaggugagcaacgugcagagacugaugagaaaggagagaagagacgacaacgaccugaagagacugagagaccugaaccaggccgugaacaaccugguggagcugaagagcacccagcagaagagcauccugagagugggcacccugaccagcgacgaccugcugauccuggccgccgaccuggagaagcugaagagcaaggugaccagaaccgagagaccccugagcgccggcguguacaugggcaaccugagcagccagcagcuggaccagagaagagcccugcugagcaugaucggcaugagcggcagcaaccagggcgccagagccggcagagacggcguggugagagugugggacgugaagaacgccgagcugcugaacaaccaguucggcaccaugcccagccugacccuggccugccugaccaagcagggccagguggaccugaacgacgccgugcaggcccugaccgaccugggccugaucuacaccgccaaguaccccaacaccagcgaccuggacagacugacccagagccaccccauccugaacaugaucgacaccaagaagagcagccugaacaucagcggcuacaacuucagccugggcgccgccgugaaggccggcgccugcaugcuggacggcggcaacaugcuggagaccaucaaggugagcccccagaccauggacggcauccugaagagcauccugaaggugaagaaggcccugggcauguucaucagcgacacccccggcgagagaaaccccuacgagaacauccuguacaagaucugccugagcggcgacggcuggcccuacaucgccagcagaaccagcaucaccggcagagccugggagaacaccgugguggaccuggagagcgacggcaagccccagaaggccggcagcaacaacagcaacaagagccugcagagcgccggcuucaccgccggccugaccuacagccagcugaugacccugaaggacgccaugcugcagcuggaccccaacgccaagaccuggauggacaucgagggcagacccgaggaccccguggagguggcccuguaccagcccagcagcggcugcuacauccacuucuucagagagcccaccgaccugaagcaguucaagcaggacgccaaguacagccacggcaucgacgugaccgaccuguucgccgcccagcccggccugaccagcgccgugaucgacgcccugcccagaaacauggugaucaccugccagggcagcgacgacaucagaaagcugcuggagagccagggcagaaaggacaucaagcugaucgacaucgcccugagcaagaccgacagcagaaaguacgagaacgccgugugggaccaguacaaggaccugugccacaugcacaccggcguggugguggagaagaagaagagaggcggcaaggaggagaucaccccccacugcgcccugauggacugcaucauguucgacgccgccgugagcggcggccugaacaccagcgugcugagagccgugcugcccagagacaugguguucagaaccagcacccccagaguggugcugugaggacuaguaauaaggaaacuguaugaaugucugugggcaggaagugaagagauccuucuguaaagguuuuuggaauuaugucugcugaauaauaaacuuuuuugaaauaauaaaucugguagaaaaaugagaucuaaaaaaaaaaaaaaaaaaaaaaaaaaaaaaaaaaaaaaaaaaaaaaaaaaaaaaaaaaaaaaaaaaaaaaaaaaaaaaaaaaaaaaaaaaaaaaaaaaaa

SEQ ID NO: 20346 - RNA, 2073 nt, Artificial Sequence
  mRNA product Design b-4 (A100) comprising derived and/or modified sequence from LASV(Mad39;Clade IV)__ANH09723__SP-HsALB_NP(2-569) (opt4)
aggagagucccgcagucggcguccagcggcucugcuuguucgugugugugucguugcaggccuuauucaagcuuaccaugaagugggugaccuucaucagccugcuguuccuguucagcagcgccuacagcagcgccagcaaggagaucaagagcuuccuguggacccagagccugagaagagagcugagcggcuacugcagcaacaucaagcugcagguggugaaggacgcccaggcccugcugcacggccuggacuucagcgaggugagcaacgugcagagacugaugagaaagcagagaagagacgacaacgaccugaagagacugagagaccugaaccaggccgugaacaaccugguggagcugaagagcacccagcagaagagcgugcugagagugggcacccugaccagcgacgaccugcugacccuggccgccgaccuggagaagcugaagagcaaggugaccagaaccgagagaccccugaccgccggcguguacaugggcaaccugagcagccagcagcuggaccagagaagagcccugcugaacaugaucggcaugagcggcggcaaccagggcgccagaaccggcagagacggcguggugagagugugggacgugaagaacgccgagcugcugaacaaccaguucggcaccaugcccagccugacccuggccugccugaccaagcagggccagguggaccugaacgacguggugcaggcccugaccgaccugggccugaucuacaccgccaaguaccccaacaccagcgaccuggacagacugacccagagccaccccauccugaacaugaucgacaccaacaagagcagccugaacaucagcggcuacaacuucagccugggcgccgccgugaaggccggcgccugcaugcuggacggcggcaacaugcuggagaccaucaaggugagcccccagaccauggacggcauccugaagagcauccugaaggugaagaagagccugggcauguucaucagcgacacccccggcgagagaaaccccuacgagaacauccuguacaagaucugccugagcggcgacggcuggcccuacaucgccagcagaaccagcaucaccggcagagccugggagaacaccgugguggaccuggagagcggcggcaagccccagaaggccggcagcaacaacagcaacaagagccugcagagcgccggcuucgccgccggccugaccuacagccagcugaugacccugaaggacgccaugcugcagcuggaccccaacgccaagaccuggauggacaucgagggcagacccgaggaccccguggagaucgcccuguaccagcccaucagcggcugcuacauccacuucuucagagagcccaccgaccugaagcaguucaagcaggacgccaaguacagccacggcaucgacgugaccgaccuguucgccgcccagcccggccugaccagcgccgugaucgaggcccugcccagaaacauggugaucaccugccagggcagcgacgacaucagaaagcuguucgagagccagggcagaaaggacaucaagcugaucgacaucgcccugagcaagaccgacagcagaaaguacgagaacgccgugugggaccaguacaaggaccugugccacaugcacaccggcguggugguggagaagaagaagaagggcggcaaggaggagaucaccccccacugcgcccugauggacugcaucauguucgacgccgccgugagcggcggccugaacacccuggugcugagagccgugcugcccagagacaugguguucagaaccagcacccccaagguggugcugugaggacuaguaauaaggaaacuguaugaaugucugugggcaggaagugaagagauccuucuguaaagguuuuuggaauuaugucugcugaauaauaaacuuuuuugaaauaauaaaucugguagaaaaaugagaucuaaaaaaaaaaaaaaaaaaaaaaaaaaaaaaaaaaaaaaaaaaaaaaaaaaaaaaaaaaaaaaaaaaaaaaaaaaaaaaaaaaaaaaaaaaaaaaaaaaaa

SEQ ID NO: 20347 - RNA, 2073 nt, Artificial Sequence
  mRNA product Design b-4 (A100) comprising derived and/or modified sequence from LASV(Z0947-SLE-2011;Clade IV)__AIT17841__SP-HsALB_NP(2-569) (opt4)
aggagagucccgcagucggcguccagcggcucugcuuguucgugugugugucguugcaggccuuauucaagcuuaccaugaagugggugaccuucaucagccugcuguuccuguucagcagcgccuacagcagcgccagcaaggagaucaagagcuuccuguggacccagagccugagaagagagcugagcggcuacugcagcaacaucaagcugcagguggugaaggacgcccaggcccugcugcacggccuggacuucagcgaggugagcaacgugcagagacugaugagaaaggagagaagagacgacaacgaccugaagagacugagagaccugaaccaggccgugaacaaccugguggagcugaagagcacccagcagaagagcauccugagagugggcacccugaccagcgacgaccugcugauccuggccgccgaccuggagaagcugaagagcaaggugaccagaaccgagagaccccugagcgccggcguguacaugggcaaccugagcagccagcagcuggaccagagaagagcccugcugaacaugaucggcaugagcggcagcaaccagggcgccagaaccggcagagacggcguggugagagugugggacgugaagaacgccgagcugcugaacaaccaguucggcaccaugcccagccugacccuggccugccugaccaagcagggccagguggaccugaacgacgccgugcaggcccugaccgaccugggccugaucuacaccgccaaguaccccaacaccagcgaccuggacagacugacccagagccaccccauccugaacaugaucgacaccaagaagagcagccugaacaucagcggcuacaacuucagccugggcgccgccgugaaggccggcgccugcaugcuggacggcggcaacaugcuggagaccaucaaggugagcccccagaccauggacggcauccugaagagcauccugaaggugaagaaggcccugggcauguucaucagcgacgcccccggcgagagaaaccccuacgagaacauccuguacaagaucugccugagcggcgacggcuggcccuacaucgccagcagaaccagcaucaccggcagagccugggagaacaccgugguggaccuggagagcgacggcaagccccagaaggccggcagcaacggcagcaacaagagccugcagagcgccggcuucaccgccggccugaccuacagccagcugaugacccugaaggacgccaugcugcagcuggaccccaacgccaagaccuggauggacaucgagggcagacccgaggaccccguggagaucgcccuguaccagcccagcagcggcugcuacauccacuucuucagagagcccaccgaccugaagcaguucaagcaggacgccaaguacagccacggcaucgacgugaccgaccuguucgccgcccagcccggccugaccagcgccgugaucgacgcccugcccagaaacauggugaucaccugccagggcagcgacgacaucagaaagcuguucgagagccagggcagaaaggacaucaagcugaucgacaucgcccugagcaagaccgacagcagaaaguacgagaacgccgugugggaccaguacaaggaccugugccacaugcacaccggcaucgugguggagaagaagaagagaggcggcaaggaggagaucaccccccacugcgcccugauggacugcaucauguucgacgccgccgugagcggcggccugaacaccagcgugcugagagccgugcugcccagagacaugguguucagaaccagcacccccagaguggugcugugaggacuaguaauaaggaaacuguaugaaugucugugggcaggaagugaagagauccuucuguaaagguuuuuggaauuaugucugcugaauaauaaacuuuuuugaaauaauaaaucugguagaaaaaugagaucuaaaaaaaaaaaaaaaaaaaaaaaaaaaaaaaaaaaaaaaaaaaaaaaaaaaaaaaaaaaaaaaaaaaaaaaaaaaaaaaaaaaaaaaaaaaaaaaaaaaa

SEQ ID NO: 20348 - RNA, 2073 nt, Artificial Sequence
  mRNA product Design b-4 (A100) comprising derived and/or modified sequence from LASV(Josiah;Clade IV)__NP_694869__SP-HsALB_NP(2-569) (opt5)
aggagagucccgcagucggcguccagcggcucugcuuguucgugugugugucguugcaggccuuauucaagcuuaccaugaagugggugaccuucaucagccugcucuuucuguucuccucugccuacagcagcgccuccaaggagaucaaaucuuuccuguggacccagagccucagacgggaacuguccggcuacugcucuaacauuaagcugcaaguggucaaagacgcucaggcccugcuccacgggcuggauuuuagcgagguuuccaaugugcagcgccuuaugagaaaggaacggcgcgacgauaacgaccugaaaagacuccgggaucugaaucaggcggugaacaaucuggucgagcucaagucuacacaacaaaagagcauccugcgcgugggaacgcuuaccuccgacgaucugcucauucuggcugccgaccuugaaaaacuuaagagcaaaguuaucagaacagagcggccccucucugccggcguguauauggggaaccuguccagccagcagcuggaucagcgcagagcucuccugaauaugauuggaaugucuggcgggaaccagggagcccgggcuggccgcgacggcgucgugagaguuugggaugugaagaaugccgagcuucugaacaaucaguucgggaccaugccuucccucacacuggcgugucuuaccaaacagggacaagucgaccugaacgaugccgugcaggcucucacagaccugggccugaucuacaccgccaaguauccgaauacgagcgaccucgaucggcugacccagucucaucccauccuuaacaugauugacacaaagaaauccagccugaauaucuccggguacaacuuuucucucggagcugccgugaaggcgggcgccugcaugcuggaugggggaaacaugcuugaaaccauuaaagucagcccucaaacaauggacggcauccugaaguccauucucaaaguuaagaaagcucugggcauguucaucagcgauacccccggggagcgcaauccuuaugaaaacauucuguacaagaucugucucucuggagacggcuggcccuauaucgccuccagaacgagcauuacagggcgggcuugggagaauaccgugguggaucuggagucugacggaaagccucagaaagccgauagcaacaauuccucuaagagccuucaguccgccggcuuuacagcugggcugaccuacagccagcucaugacccugaaagacgcgaugcugcaacuugauccgaacgccaagacauggauggacaucgaaggaagacccgaggacccugucgaaauugcucucuaccagcccucuuccggcugcuauauccacuucuuucgcgagccuacggaucugaaacaguucaagcaggacgccaaguacagccauggcauugaugugaccgaccuguuugccacacaacccgggcucaccucugcuguuaucgaugcccugccgcggaauauggugaucacaugucagggauccgacgauauuagaaaacuucuggaaagccagggccgcaaggacaucaaacucauugauaucgcgcuguccaagaccgacucucggaaauaugagaacgcugucugggaucaguacaaggaccugugccacaugcauacgggggugguuguggagaagaaaaagagaggaggcaaagaagagauuacaccucacugugcccuuauggauugcaucauguucgacgccgcugucagcgggggccucaauaccuccgugcugcgcgccguccugccccgggacaugguguuuagaaccucuacaccucgcguugugcucugaggacuaguaauaaggaaacuguaugaaugucugugggcaggaagugaagagauccuucuguaaagguuuuuggaauuaugucugcugaauaauaaacuuuuuugaaauaauaaaucugguagaaaaaugagaucuaaaaaaaaaaaaaaaaaaaaaaaaaaaaaaaaaaaaaaaaaaaaaaaaaaaaaaaaaaaaaaaaaaaaaaaaaaaaaaaaaaaaaaaaaaaaaaaaaaaa

SEQ ID NO: 20349 - RNA, 2073 nt, Artificial Sequence
  mRNA product Design b-4 (A100) comprising derived and/or modified sequence from LASV(LP;Clade I)__AAF86702__SP-HsALB_NP(2-569) (opt5)
aggagagucccgcagucggcguccagcggcucugcuuguucgugugugugucguugcaggccuuauucaagcuuaccaugaagugggugaccuucaucagccugcucuuucuguucuccucugccuacagcagcaacuccaaggagaucaaaucuuuccuguggacccagagccucagacgggaacuguccggcuacugcucuaauauuaagcuccaaguggucaaagacgcccaggcucugcuccacgggcuggauuuuagcgagguuuccaacgugcagcgccuuaugagaaagcagaaacgggacgaugccgaccugaagcgccucagagaucugaaucaagcggugaacaaucuggucgaacucaagucuacacagcagaaaaacgugcugcggguuggaacgcuuagcuccgacgaucugaucacccucgcugccgaccuggagaaacuuaaaagcaaggugauucgcacagaaagaccccugucuuccggcgucuauauggggaaucucagcucucagcaacuggaucagcggcgcgcccugcucuccaugaucggaaugagcggcgggccucagggaaacagaaccggcggcgacggggugguucgggugugggaugucaaaaaugcugagcugcuuaacaaucaguucggaacaaugccgucucugacccucgccugucugacaaagcaaggccagguggaccuuaacgaugcugugcaggcccugaccgaccucgggcugauuuacacggcgaaguaucccaauuccagcgaccuggauaugcucacccaaucccauccuauccugggaauggucgacacaaagaagucuagccuuaacaucuccggcuacaauuuuagccugggggccgcuguuaaagccggagcuugcaugcucgauggcggcaacaugcuggagaccauuaaggugucuccccagacaauggacgggauccuuaaauccauucugaaggugaaacgcagccucggaauguucaucucugauaccccuggcgaaagaaaccccuaugagaauauucuguacaagaucugucugagcggggaaggauggccuuauauugccucccggacgucuaucacaggccgcgcgugggagaacacccucgucgaccuggagagcgauaauaagccgcccaaacuuaacuccgccgggagcaauaagucucugcaggcugccggacucaacgcuggccugacauacucccagcugaugacccuuaaagacugcaugcuccaacuggauccuagcucuaagaccuggaucgacauugaaggcagacccgaggauccuguggaaaucgcccuguuucagcccuccagcggguguuacauucacuucuuucgggagccgacagaccucaaacaguucaagcaggacgccaaguauucccauggaaucgauguuacggaccuguuuucuacccaaccuggccuuacaagcgcugugauugaagcgcugcccagaaauaugguccuuaccugccagggguccgaugacaucaaaaagcugcuggagucucagggacgccgggauaucaaacuuauugacaucagccucuccaaggccgauagcagaaaauucgagaacgcugugugggaccaguacaaggaucugugucacaugcauacaggcguuguggucgaaaagaaaaagcgcgggggcaaagaggaaauuaccccucacugcgcccugcucgacuguaucauguuugaugccgcuacgacaggaucucugaauauuaccacccuucgggccgugcugcccagagacauggucuuccgcacauccacccccaaggugguucucugaggacuaguaauaaggaaacuguaugaaugucugugggcaggaagugaagagauccuucuguaaagguuuuuggaauuaugucugcugaauaauaaacuuuuuugaaauaauaaaucugguagaaaaaugagaucuaaaaaaaaaaaaaaaaaaaaaaaaaaaaaaaaaaaaaaaaaaaaaaaaaaaaaaaaaaaaaaaaaaaaaaaaaaaaaaaaaaaaaaaaaaaaaaaaaaaa

SEQ ID NO: 20350 - RNA, 2073 nt, Artificial Sequence
  mRNA product Design b-4 (A100) comprising derived and/or modified sequence from LASV(803213;Clade II)__AAF86704__SP-HsALB_NP(2-569) (opt5)
aggagagucccgcagucggcguccagcggcucugcuuguucgugugugugucguugcaggccuuauucaagcuuaccaugaagugggugaccuucaucagccugcucuuucuguucuccucugccuacagcagcgccuccaaggaggugaaaucuuuccuguggacccagagccucagacgggaacuguccggcuacugcucuaacaucaaacuucaagucguuaaggacgcucaggcccugcuccacgggcuggauuuuagcgaggugaauaacgugcagcgccuuaugagaaagcagaaacgggacgauggagaccugaagcgccucagagaucugaaucaagcggucaacaaucugguggaacucaaguccacacagcagaaaucuauucugcggguuggcacgcuuaccagcgacgaucugcucacacuggcugccgaccuugagaagcugaaauccaaggugauccgcaccgaaagaccccucagcucuggggucuauaugggaaaccuguccacacagcaacuggagcagcggcgcgcccuccugaauaugauuggcauggugggaggagcucagggcacccagccuggcagagaugggguugugcgggucugggacgugaaaaacccggaucuucugaauaaccaauucggaacaaugcccagccucacccuggccugucuuacgaagcagggccagguggaccugaaugaugcuguccucgcccugaccgaccuggggcucaucuacacagcgaaguauccuaacucuuccgaccuggaucgccuuagccaaucucaucccauucugaauaugguugacaccaaaaaguccagccucaacaucuccggauacaauuuuucucugggcgccgcugugaaagccggggcuugcaugcuugauggaggcaacaugcuggagacaaucaaggugaccccucagacgauggacggcauucucaaaagcauccugaaggucaaaagaucccuggggauguucgugagcgauacacccggagaacggaacccuuaugagaauauucucuacaagaucugucugucuggcgacggguggccguauauugccucccgcaccagcaucguugggagagcgugggaaaacacaaccguggaucuugagucugacggcaagccccagaaagucgggaccgccggaagcaauaagucccugcagucugcuggcuuuccuacaggccucacguacagccaacugaugacccugaaagauuccaugaugcagcuugaccccagcgccaagacauggauugauaucgaggggcggccugaagaccccguggagaucgcucucuaccagccgaugucuggaugcuauauucacuucuuuagagaaccuaccgaccugaaacaguucaagcaagaugccaaguacucccauggcaucgacguugccgaucuguuucccgcucagccugggcucacaagcgcggugauugaggcccugccccgcaacaugguccuuaccugucagggaucugacgauaucaaaaagcugcucgacucccagggccggagagauauuaaacugaucgacaucagccuguccaagguggauucucgcaaauucgaaaaugcugucugggaccaaugcaaggaucuuugucacaugcauacgggggugguuguggagaagaaaaagcggggcggaaaagaggaaauuacaccccacugcgcccucauggacuguaucauguuugaugccgcugucagcggcgggcugaacauuccugugcugagagccguucucccgcgcgacaugguguuccggaccuccucucccaaggucgugcugugaggacuaguaauaaggaaacuguaugaaugucugugggcaggaagugaagagauccuucuguaaagguuuuuggaauuaugucugcugaauaauaaacuuuuuugaaauaauaaaucugguagaaaaaugagaucuaaaaaaaaaaaaaaaaaaaaaaaaaaaaaaaaaaaaaaaaaaaaaaaaaaaaaaaaaaaaaaaaaaaaaaaaaaaaaaaaaaaaaaaaaaaaaaaaaaaa

SEQ ID NO: 20351 - RNA, 2076 nt, Artificial Sequence
  mRNA product Design b-4 (A100) comprising derived and/or modified sequence from LASV(GA391;Clade III)__CAA36646__SP-HsALB_NP(2-570) (opt5)
aggagagucccgcagucggcguccagcggcucugcuuguucgugugugugucguugcaggccuuauucaagcuuaccaugaagugggugaccuucaucagccugcucuuucuguucuccucugccuacagcagcgccuccaaggaggugagaucuuuccuguggacccagagccuccggcgcgaacuguccggcuacugcucuaacaucaaacuucaagucguuaaggacgcucaggcccugcuccacgggcuggauuuuagcgagguguccaaugugcagagacuuaugcggaaacagaagcgcgacgauggagaccugaaaagacuccgggaucugaaccaagcggucaauaaccugguggaacucaagucuacacagcagaaaagcguucugcgcgugggcacgcuuuccagcgacgaucugcucauucuggcugccgaccuugagaaacugaagucuaaagucaccagaacagaacggccccucuccagcgggguguauaugggaaaucugucuucccagcaacuggaucagcgcagagcccuccugaacaugaucggcaugaccgggguuagcggaggcggcaagggggcuucugacggaauugugcgggucugggaugugaaaaaugccgagcuucugaacaaucaguucggcacaaugccuucccucacccuggcuugucuuacaaagcaggggcaaguggaccugaacgaugccguccaggcgcucaccgaccugggacugaucuacacggccaaguauccgaauagcuccgaccucgaucgccugucucagagccaucccauucuuaacaugaucgacaccaaaaaguccagccugaauaucucuggcuacaacuuuucccucggggcugccguuaaagcuggagccugcaugcuggauggcggcaauaugcuugagacaauuaaggugagcccucaaaccauggacgggauccugaaaucuauucucaaggugaaaaagagccugggaauguucgucuccgauacacccggcgaaagaaacccuuaugagaacauccuguacaagauuugucucucuggggacggauggcccuauaucgcgagccggaccuccauugugggccgcgccugggaaaauacgguuguggaucuggagcaggacaacaaaccucagaagaucgggaauggaggcagcaacaaaucucuucaguccgcuggcuuugccgcugggcugacauacagccaacucaugacccugaaggauuucaaaugcuuuaaucugaucccgaacgccaagacauggauggacauugagggaagacccgaagauccugucgagaucgcccuuuaccagcccucuuccggcuguuaugugcacuucuuucgggaaccuaccgaccucaagcaguucaaacaggacgcuaaguacagccaugggauugauguuaccgaccuguuugcggcccaacccggacugacauccgcugugaucgaggcccucccgagaaauauggucauuacgugccagggcucugaagauauccgcaaacugcuugagagccaggggcggagagacaucaagcugauugauaucacccucuccaaagccgacucucgcaaguucgagaacgcugugugggaucaguuuaaggaccugugucacaugcauacaggcgucgugguugaaaagaagaaacggggaggcaaggaggaaauuaccccucacugcgcccugauggauuguaucauguucgacgcggcugugagcgggggacuugaugccaaaguccucagagugguucugccccgcgacaugguguuccggacauccaccccuaaggucgugcugugaggacuaguaauaaggaaacuguaugaaugucugugggcaggaagugaagagauccuucuguaaagguuuuuggaauuaugucugcugaauaauaaacuuuuuugaaauaauaaaucugguagaaaaaugagaucuaaaaaaaaaaaaaaaaaaaaaaaaaaaaaaaaaaaaaaaaaaaaaaaaaaaaaaaaaaaaaaaaaaaaaaaaaaaaaaaaaaaaaaaaaaaaaaaaaaaa

SEQ ID NO: 20352 - RNA, 2073 nt, Artificial Sequence
  mRNA product Design b-4 (A100) comprising derived and/or modified sequence from LASV(AV;Clade V)__CCA30315__SP-HsALB_NP(2-569) (opt5)
aggagagucccgcagucggcguccagcggcucugcuuguucgugugugugucguugcaggccuuauucaagcuuaccaugaagugggugaccuucaucagccugcucuuucuguucuccucugccuacagcagcgccuccaaggaggugaaaucuuuccuguggacccagagccucagacgggaacuguccggcuacugcucuaacaucaaacuucaagucguuaaggacgcucaggcccugcuccacgggcuggauuuuagcgagguguccaaugugcagcgccuuaugagaaagcagcggcgcgacgauucugaccugaaaagacuccgggaucugaaccaagcggucaauaaccugguggaacucaagagcacacagcagaaguccguucugcgcgugggaacgcuuagcucugacgaucugcucacccuggcugccgaccuugagaaacugaaguccaaagucacaagaaccgaacggccccucagcucuggcguguauauggggaaucuguccagccagcaacuggaucagcgcagagcccuccugaaccuuauuggaaugacaaauggcucucaggggucccaggcuggacgggacggcguugugcgcgucugggaugugaagaacgccgagcugcucaauaaccaauucggcaccaugccuagccugacacuugcuugucugaccaaacagggacagguggaccucaaugaugucguucaagcccugacggaccuggggcucaucuacaccgcgaaguauccgaacacauccgaccuggauagacuuacccagucucaucccauucugaauaugaucgacacaaagaaaagcucccucaacauuagcggcuacaauuuuucucugggggccgcugugaaggccggagcuugcaugcuugauggcgggaacaugcuggagaccaucaaaguguccccucagagcauggacggaauccucaagucuauucugaaagucaagcgggcccugggcauguucgugagcgauacgcccggcgaacgcaacccuuaugagaauauccucuacaaaauuugucuguccggggacggauggcccuauaucgcgucuagaacaagcauuguuggccgggccugggaaaacaccguggucgaucuugagacagacgggaagccucagaagaucggauccggcaauagcaacaaaucucugcaauccgcuggguuuagcgccggacucaccuacucucagcugaugacccugaaggaugcuaugcuucagcucgacccgaaugccaaaacauggauggauauugagggcagacccgaagacccuguggagguugcccuguaccagcccaucuccggcugcuauauccacuucuuucgcgaaccuacggaccugaagcaauucaaacaggaugcuaaguacagccaugggauugacaucgcggaucucuuugccgcucagcccggacugaccuccgccgugauugaggcccuuccgcggaacauggucaucacaugucagggcucugaagacauuaagaaacugcucgagagccaagggagaaaggauaucaaacugaucgacauugcucuguccaagaucgauucucgcaaauucgagaaugccgugugggaccaguauaaggaucuuugccacaugcauaccggagucgugguugaaaagaaaaagcggggcgggaaagaggaaauuacaccucacugugcgcucauggacugcaucauguuugaugcugccgugagcggcggacugaacacccugguccucagagccgugcugccccgcgacaugguuuuccggacguccacaccuagagugguccuuugaggacuaguaauaaggaaacuguaugaaugucugugggcaggaagugaagagauccuucuguaaagguuuuuggaauuaugucugcugaauaauaaacuuuuuugaaauaauaaaucugguagaaaaaugagaucuaaaaaaaaaaaaaaaaaaaaaaaaaaaaaaaaaaaaaaaaaaaaaaaaaaaaaaaaaaaaaaaaaaaaaaaaaaaaaaaaaaaaaaaaaaaaaaaaaaaa

SEQ ID NO: 20353 - RNA, 2073 nt, Artificial Sequence
  mRNA product Design b-4 (A100) comprising derived and/or modified sequence from LASV(Togo/2016/7082;Clade VI)__AMR44578__SP-HsALB_NP(2-569) (opt5)
aggagagucccgcagucggcguccagcggcucugcuuguucgugugugugucguugcaggccuuauucaagcuuaccaugaagugggugaccuucaucagccugcucuuucuguucuccucugccuacagcagcaacuccaaggaggugaaaucuuuccuguggacccagagccucagacgggaacuguccggcuacugcucuaauaucaaacuucaagucguuaaagacgcccaggcucugcuccacgggcuggauuuuagcgagguguccaacgugcagcgccuuaugagaaagcagaaacgggacgauggagaccugaagcgccucagagaucugaaucaagccgucaacaaucugguggaacucaagucuguucagcagaaaagcauucugcgggugggcacacuuacguccgacgaucugcucacccuggcggcugaccuugagaagcugaaaagcaaggucacacgcaccgaaagaccccucucuuccgggguguauaugggaaaccugagcucucagcaacuggaucagcggcgcgcccuccuguccaugaucggcaugagcgggggaaaucagaacucucagccuaaaggcgacggcguugugagagucugggaugugaagaaugccgaccuucugaacaaucaauucgggacaaugccgucccucacccuggcuugucuuacaaagcagggacagguggaucugaacgacgccguccaagcucucaccgaccugggccugauuuacacggccaaauaucccaauagcuccgaucucgaccggcugucucagagccauccuauccuuaacaugauugauaccaagaaauccagccugaauaucucuggguacaacuuuucccucggagcggccaucaagacaggcgcuugcaugcuggacgggggaaacaugcuugagaccauuaaaguuacaccccagaccauggauggcauccucaagagcauucugaaagugaagcgcucucugggcauguucaucagcgacacgccuggggagagaaaucccuaugaaaacauucuguacaagaucugucucuccggagauggcuggccuuauauugccucucggacagcuaucaucgggcgcgccugggagaauaccguggucgaccuggaaagcgauuccaaaccgcagaagauuggaagcaacggcucuaauaaaucccuucaaagcgcgggguuugcccccggacugacauacucucagcucaugacccugaaggacuccaugcugcagcuugauccuaacgcuaaaaccuggaucgacauugagggcagacccgaggacccuguggaaguugcccucuuccagcccaucagcggcugcuacauucacuuuuuccgggagccgacagaucugaagcaauuuaagcaggacgcuaaauauucccaugggaucgaugugacggaccuguucgccgcccagccuggacucaccucugcugucaucgaagcgcugcccagaaauauggugcuuacaugucagggcagcgaugacauuaagaaacugcucgauucccaagggcgccgggacaucaagcugauugauguuucucugaacaaaaucgacagcagaaaguuugagaaugccgugugggaucaguacaaggaccuuugccacaugcauaccggagucguggucgaaaagaagaaaaagggcgggaaagaggagauuacaccucacugugcucuccuggauugcaucauguucgacgccgccguguccggcggacugaacgcuaccguucuccgcgccgugcugccccgggacauggucuuuagaacgagcucucccaaggugguucuuugaggacuaguaauaaggaaacuguaugaaugucugugggcaggaagugaagagauccuucuguaaagguuuuuggaauuaugucugcugaauaauaaacuuuuuugaaauaauaaaucugguagaaaaaugagaucuaaaaaaaaaaaaaaaaaaaaaaaaaaaaaaaaaaaaaaaaaaaaaaaaaaaaaaaaaaaaaaaaaaaaaaaaaaaaaaaaaaaaaaaaaaaaaaaaaaaa

SEQ ID NO: 20354 - RNA, 2073 nt, Artificial Sequence
  mRNA product Design b-4 (A100) comprising derived and/or modified sequence from LASV(KAK-428;Clade n.d. (VII))__ANH09741__SP-HsALB_NP(2-569) (opt5)
aggagagucccgcagucggcguccagcggcucugcuuguucgugugugugucguugcaggccuuauucaagcuuaccaugaagugggugaccuucaucagccugcucuuucuguucuccucugccuacagcagcaacuccaaggaggugaaaucuuuccuguggacccagagccucagacgggaacuguccggcuacugcacaaauaucaaacuucaagucguuaaggacgcccaggcucugcuccacgggcuggauuuuucugaggugagcaacgugcagcgccuuaugagaaagcagaaacgggacgauaaugaccugaagcgccucagagaucugaaccaagccgucaauaaccugguggaacucaaguccguucagcagaaaucugugcugaaggucggaacgcuuaauagcgacgaucugcucacccuggcggcugaccuugagaaacugaaguccaaagugguucggacagaacgcccccucagcucuggcguguauauggggaaccuguccagccagcaacuggaucagagacgggcccuccugaauaugauuggaauggccggcgggucucagggaaaccagccuucccgcgacggcgucgugagagugugggaugucaagaaugcugaccuucugaacaaucaauucggcaccaugccgagccucacacuggccugucuuaccaagcaggggcagguugaucugaacgacguggugcucgcucugacagaccugggacucaucuacaccgccaaauaucccaauucuuccgaucuggaccggcuuagccaaaaccauccuguccugaacaugauugaugugaauaaguccucucucaacaucagcggcuacaauuuuucccugggggcggccguuaaagcuggagccugcaugcuugacggcgggaacaugcuggagacgauuaagaucagcccccagaccguggauggaauccucaaaucuauucugaaggucaaacgcgcucugggcauguucguguccgacacaccuggcgagagaaaucccuaugaaaacauccucuacaagguuugucugagcgggaauggauggccuuauauugccucucggaccagcaucgugggccgcgcgugggagaacacagucguggaucuugaauccaauaagaaccagccgaaagucgggaauaacggaucuaauaagaugcugcagagcuccggcuuugccaccgggcucacguacagccaacugaugacacugagagacucuaugcuucagcucgaucccaccgcuaaaacauggauugacaucgagggacggccugaggaucccguggaacuggcccuguuccagccuuccagcggcugcuacauucacuuuuucagagagcccaccgaccucaagcaguuuaaacaagacgcuaaguauucucauggcaucgauguuaacgaccuguucuccgcccagccggggcuuaccagcgccgugcuggaagcucucccucgcaauaugguccugacaugucagggauccgaugacauccggaagcugcuugauucucaggacagaaaagauauuaagcucaucgacauuagccuguccaaagcggaugcccgcaaguuugagaacgacgugugggaucaauucaaagaccugugccacaugcauacgggcaucguuguggaaaagaagaaaaagggagggaaacaggagaugacaccccacugugcucuccuggauugcauuauguuugacgccgccgucucuggcgggcuuaacgugccuacccugcgggcugugcuccccaccgacaugguuuucagaacaaucaccacgaaggucgugcugugaggacuaguaauaaggaaacuguaugaaugucugugggcaggaagugaagagauccuucuguaaagguuuuuggaauuaugucugcugaauaauaaacuuuuuugaaauaauaaaucugguagaaaaaugagaucuaaaaaaaaaaaaaaaaaaaaaaaaaaaaaaaaaaaaaaaaaaaaaaaaaaaaaaaaaaaaaaaaaaaaaaaaaaaaaaaaaaaaaaaaaaaaaaaaaaaa

SEQ ID NO: 20355 - RNA, 2073 nt, Artificial Sequence; identical to SEQ ID NO: 20349
  mRNA product Design b-4 (A100) comprising derived and/or modified sequence from LASV(Pinneo-NIG-1969;Clade I)__AIT17837__SP-HsALB_NP(2-569) (opt5)

SEQ ID NO: 20356 - RNA, 2073 nt, Artificial Sequence
  mRNA product Design b-4 (A100) comprising derived and/or modified sequence from LASV(ISTH0009-NIG-2011;Clade II)__AIT17405__SP-HsALB_NP(2-569) (opt5)
aggagagucccgcagucggcguccagcggcucugcuuguucgugugugugucguugcaggccuuauucaagcuuaccaugaagugggugaccuucaucagccugcucuuucuguucuccucugccuacagcagcguguccaaggaggucaaaucuuuccuguggacccagagccucagacgggaacuguccggcuacugcucuaacaucaaacuucaaguugugaaggacgcccaggcucugcuccacgggcuggauuuuagcgagguguccaauguccagcgccuuaugagaaagcagaaacgggacgauucugaccugaagcgccucagagaucugaaccaagccgugaauaaccugguugaacucaagagcacacagcagaaauccauucugcgggugggaacgcuuaccagcgacgaucugcucacacuggcggcugaccuugagaagcugaaaucuaaggucauccgcaccgaaagaccccucuccagcggcguguauauggggaaucugucuacacagcaacuggagcagcggcgcgcccuccugaacaugauuggaaugguuggcggggcccagggaacccagccuggcagagauggcgugguccgggugugggacgugaaaaauccggaucuucugaacaaucaauucgggacaaugcccucccucacccuggcuugucuuacgaagcagggacaggucgaccugaacgaugccguucucgcucugaccgaccugggccucaucuacacagccaaguauccuaauagcucugaccuggaucgccuuucccaaagccaucccauucugaacaugguggacaucaaaaaguccucucucaauaucagcggguacaacuuuucccugggagcggccgugaaagcuggcgccugcaugcuugaugggggaaauaugcuggagaccauuaaggucacaccucagaccauggacggcauccucaaaagcauucugaaggugaaaagaucucugggcauguucguuuccgauacgcccggggaacggaacccuuaugagaacauccucuacaagauuugucugagcggagacggcuggccguauaucgcuucucgcacaagcauuguggggagagccugggaaaauaccacagucgaucuugaguccgacggaaagccccagaaagugggcucugcggggagcaacaagucccugcagagcgccggauuuccuaccggccucaccuacucucaacugaugacacugaaagauuccaugaugcagcuugaccccagcgcuaagacguggaucgauaucgagggccggccugaagaccccguugagauugcccucuaccagccgaugucugggugcuauauccacuucuuuagagaaccuaccgaccugaaacaguucaagcaagaugcuaaguacucccauggaauugacguggccgaucuguuucccgcccagccuggccucacaagcgcugucaucgaggcgcugccccgcaauauggugcuuaccugucagggguccgacgauauuaaacggcugcucgacucucagggaagacgcgauaucaagcugaucgacauugcccugagcaaagcugauucccggagauucgaaaacgccgucugggaccaaugcaaggaucuuugucacaugcauacaggcgugguuguggagaaaaagaagcgcgggggcaaagaggaaaucacgccccacugcgcccucauggacuguauuauguaugaugcugccgucucuggaggccugaauaucccugugcugcgggcgguucucccgagagacaugguguuucgcaccagcucccccaaggucgugcugugaggacuaguaauaaggaaacuguaugaaugucugugggcaggaagugaagagauccuucuguaaagguuuuuggaauuaugucugcugaauaauaaacuuuuuugaaauaauaaaucugguagaaaaaugagaucuaaaaaaaaaaaaaaaaaaaaaaaaaaaaaaaaaaaaaaaaaaaaaaaaaaaaaaaaaaaaaaaaaaaaaaaaaaaaaaaaaaaaaaaaaaaaaaaaaaaa

SEQ ID NO: 20357 - RNA, 2073 nt, Artificial Sequence
  mRNA product Design b-4 (A100) comprising derived and/or modified sequence from LASV(ISTH2010-NIG-2012;Clade II)__AIT17483__SP-HsALB_NP(2-569) (opt5)
aggagagucccgcagucggcguccagcggcucugcuuguucgugugugugucguugcaggccuuauucaagcuuaccaugaagugggugaccuucaucagccugcucuuucuguucuccucugccuacagcagcgccuccaaggaggugaaaucuuuccuguggacccagagccucagacgggaacuguccggcuacugcucuaacaucaaacuucaagucguuaaggacgcucaggcccugcuccacgggcuggauuuuagcgagguguccaaugugcagcgccuuaugagaaagcagaaacgggacgauucugaccugaagcgccucagagaucugaaccaagcggucaauaaccugguggaacucaagagcacacagcagaaauccauucugcggguuggaacgcuuaccagcgacgaucugcucacacuggcugccgaccuugagaagcugaaaucuaaggugauccgcaccgaaagaccccucuccagcggcgucuauauggggaaucugucuacacagcaacuggagcagcggcgcgcccuccugaaccuuauuggaauggugggcggggcucagggaacccagccuggcagagauggcguugugcgggucugggacgugaaaaauccggaucugcucaacaaucaauucgggacaaugcccucccugacccuugccugucugacgaagcagggacagguggaccucaacgaugcuguccuggcccugaccgaccucggccugaucuacacagcgaaguauccuaauagcucugaccuugaucgccugucccaaagccaucccauucucaacaugguugacaccaaaaaguccucucugaauaucagcggguuuaacuucucccuuggagccgcugugaaagccggcgcuugcaugcuggaugggggaaauaugcucgagacaaucaaggugaccccucagacgauggacggcauucugaaaagcauccugaaggucaaaaagucucucggcauguuuguguccgauacacccggggaaagaaacccuuacgagaacauucuguauaagaucugucuuagcggagacggcuggccguacauugccucucggaccagcaucguugggcgcgcgugggaaaauacaaccguggaucuggaguccgacggaaaaccccacaaggucggcaccgccgggucuaacaaaagccuccaguccgcuggauucccuacaggccugacguauagccagcugaugacccuuaaggauucuaugaugcaacucgaccccuccgccaaaacauggauugauaucgagggcagaccugaagaccccguggagaucgcucuguaccagccgaugagcgggugcuacauucacuuuuuccgggaaccuaccgaccugaagcaguuuaagcaggaugccaaauauucucauggaaucgacguugccgaucucuuccccgcucaaccuggccugacauccgcggugauugaggcccuucccagaaauaugguccugaccugucaggggagcgacgauaucaagcgccuccuggacucccagggacggagagauauuaaacugaucgacaucgcucuuucuaaggccgauagccgccgguuugaaaacgccgugugggaccagugcaaagaucucugucauaugcacacgggcgucgugguugagaagaagaaaagagggggcaaggaggaaauuacaccccacugcgcucugauggacuguaucauguacgaugccgcgguguccggaggccugaauauuccuguccuccgcgcugugcugccgcgggacaugguuuucagaaccucuagccccaaagugguccuuugaggacuaguaauaaggaaacuguaugaaugucugugggcaggaagugaagagauccuucuguaaagguuuuuggaauuaugucugcugaauaauaaacuuuuuugaaauaauaaaucugguagaaaaaugagaucuaaaaaaaaaaaaaaaaaaaaaaaaaaaaaaaaaaaaaaaaaaaaaaaaaaaaaaaaaaaaaaaaaaaaaaaaaaaaaaaaaaaaaaaaaaaaaaaaaaaa

SEQ ID NO: 20358 - RNA, 2073 nt, Artificial Sequence
  mRNA product Design b-4 (A100) comprising derived and/or modified sequence from LASV(Lassa virus/H.sapiens-wt/NGA/2015/ISTH_0543;Clade II)__AVO03640__SP-HsALB_NP(2-569) (opt5)
aggagagucccgcagucggcguccagcggcucugcuuguucgugugugugucguugcaggccuuauucaagcuuaccaugaagugggugaccuucaucagccugcucuuucuguucuccucugccuacagcagcgccuccaaggaggugaaaucuuuccuguggacccagagccucagacgggaacuguccggcuacugcucuaacaucaaacuucaagucguuaaggacgcucaggcccugcuccacgggcuggauuuuagcgagguguccaaugugcagcgccuuaugagaaagcagaaacgggacgauucugaccugaagcgccucagagaucugaaccaagcggucaauaaccugguggaacucaagagcacacagcagaaauccauucugcggguuggaacgcuuaccagcgacgaucugcucacacuggcugccgaccuugagaagcugaaaucuaaggugauccgcaccgaaagaccccucuccagcggcgucuauauggggaaucugucuacacagcaacuggagcagcggcgcgcccuccugaacaugauuggaauggugggcggggcucagggaacccagccuggcagagauggcguugugcgggucugggacgugaaaaauccggaucuucugaacaaucaauucgggacaaugcccucccucacccuggccugucuuacgaagcagggacagguggaccugaacgaugcuguccucgcccugaccgaccugggccucaucuacacagcgaaguauccuaauagcucugaccuggaucgccuuucccaaagccaucccauucugaacaugguugacaccaaaaaguccucucucaauaucagcggguacaacuuuucccugggagccgcugugaaagccggcgcuugcaugcuugaugggggaaauaugcuggagacaaucaaggugaccccucagacgauggacggcauucucaaaagcauccugaaggucaaaaagucucugggcauguucguguccgauacacccggggaaagaaacccuuaugagaacauucucuacaagaucugucugagcggagacggcuggccguauauugccucucggaccagcaucguugggcgcgcgugggaaaauacaaccguggaucuugaguccgacggaaaaccccagaaggucggcucugccgggagcaacaaaucccugcagagcgcuggauuuccuaccggccucacauacucucaacugaugacgcugaaggauuccaugaugcagcuugaccccagcgccaaaaccuggauugauaucgagggcagaccugaagaccccguggagaucgcucucuaccagccgaugucugggugcuauauucacuucuuucgggaaccuacagaccugaagcaguucaagcaagaugccaaauacucccauggaaucgacguugccgaucuguuucccgcucagccuggccucaccagcgcggugauugaggcccugcccagaaauaugguccuuacaugucagggguccgacgauaucaagcgccugcucgacucucagggacggaaagauauuaagcugaucgacaucgcucugagcaaagccgauuccagacgcuucgaaaacgccgugugggaccaaugcaaggaucuuugucacaugcauaccggcgucgugguugagaagaaaaagagagggggcaaagaggaaauuacgccccacugcgcucucauggacuguaucauguaugaugccgcggugucuggaggccugaauauuccuguccugcgggcugugcucccgcgcgacaugguuuuucggacaagcucccccaaggugguccugugaggacuaguaauaaggaaacuguaugaaugucugugggcaggaagugaagagauccuucuguaaagguuuuuggaauuaugucugcugaauaauaaacuuuuuugaaauaauaaaucugguagaaaaaugagaucuaaaaaaaaaaaaaaaaaaaaaaaaaaaaaaaaaaaaaaaaaaaaaaaaaaaaaaaaaaaaaaaaaaaaaaaaaaaaaaaaaaaaaaaaaaaaaaaaaaaa

SEQ ID NO: 20359 - RNA, 2073 nt, Artificial Sequence
  mRNA product Design b-4 (A100) comprising derived and/or modified sequence from LASV(Lassa virus/H.sapiens-wt/NGA/2016/ISTH_0009;Clade II)__AVO03572__SP-HsALB_NP(2-569) (opt5)
aggagagucccgcagucggcguccagcggcucugcuuguucgugugugugucguugcaggccuuauucaagcuuaccaugaagugggugaccuucaucagccugcucuuucuguucuccucugccuacagcagcgccuccaaggaggugaaaucuuuccuguggacccagagccucagacgggaacuguccggcuacugcucuaacaucaaacuucaagucguuaaggacgcucaggcccugcuccacgggcuggauuuuagcgagguguccaaugugcagcgccuuaugagaaagcagaaacgggacgauucugaccugaagcgccucagagaucugaaccaagcggucaauaaccugguggaacucaagagcacacagcagaaauccauucugcggguuggaacgcuuaccagcgacgaucugcucacacuggcugccgaccuugagaagcugaaaucuaaggugauccgcaccgaaagaccccucuccagcggcgucuauauggggaaucugucuacacagcaacuggagcagcggcgcgcccuccugaacaugauuggaauggugggcggggcucagggaacccagccuggcagagauggcguugugcgggucugggacgugaaaaauccggaucuucugaacaaucaauucgggacaaugcccucccucacccuggccugucuuacgaagcagggacagguggaccugaacgaugcuguccucgcccugaccgaccugggccucaucuacacagcgaaguauccuaauagcucugaccuggaucgccuuucccaaagccaucccauucugaacaugguugacaccaaaaaguccucucucaauaucagcggguacaacuuuucccugggagccgcugugaaagccggcgcuugcaugcuugaugggggaaauaugcuggagacaaucaaggugaccccucagacgauggacggcauucucaaaagcauccugaaggucaaaaagucucugggcauguucguguccgauacacccggggaaagaaacccuuaugagaacauucucuacaagaucugucugagcggagacggcuggccguauauugccucucggaccagcaucguugggcgcgcgugggaaaauacaaccguggaucuugaguccgacggaaaaccccagaaggucggcucugccgggagcaacaaaucccugcagagcgcuggauuuccuaccggccucacauacucucaacugaugacgcugaaggauuccaugaugcagcuugaccccagcgccaaaaccuggauugauaucgagggcagaccugaagaccccguggagaucgcucucuaccagccgaugucugggugcuauauucacuucuuucgggaaccuacagaccugaagcaguucaagcaagaugccaaauacucccauggaaucgacguugccgaucuguuucccgcucagccuggccucaccagcgcggugauugaggcccugcccagaaauaugguccuuacaugucagggguccgacgauaucaagcgccugcucgacucucagggacggagagauauuaaacugaucgacaucgcucugagcaaggccgauucccgccgguucgaaaacgccgugugggaccaaugcaaagaucuuugucacaugcauaccggcgucgugguugagaagaagaaaagagggggcaaggaggaaauuacgccccacugcgcucucauggacuguaucauguaugaugccgcggugucuggaggccugaauauuccuguccugcgcgcugugcucccgcgggacaugguuuuuagaacaagcucccccaaagugguccugugaggacuaguaauaaggaaacuguaugaaugucugugggcaggaagugaagagauccuucuguaaagguuuuuggaauuaugucugcugaauaauaaacuuuuuugaaauaauaaaucugguagaaaaaugagaucuaaaaaaaaaaaaaaaaaaaaaaaaaaaaaaaaaaaaaaaaaaaaaaaaaaaaaaaaaaaaaaaaaaaaaaaaaaaaaaaaaaaaaaaaaaaaaaaaaaaa

SEQ ID NO: 20360 - RNA, 2073 nt, Artificial Sequence
  mRNA product Design b-4 (A100) comprising derived and/or modified sequence from LASV(Lassa virus/H.sapiens-wt/NGA/2016/ISTH_0017;Clade II)__AVO03568__SP-HsALB_NP(2-569) (opt5)
aggagagucccgcagucggcguccagcggcucugcuuguucgugugugugucguugcaggccuuauucaagcuuaccaugaagugggugaccuucaucagccugcucuuucuguucuccucugccuacagcagcgccuccaaggaggugaaaucuuuccuguggacccagagccucagacgggaacuguccggcuacugcucuagcaucaaacuucaagucguuaaggacgcucaggcccugcuccacgggcuggauuuuuccgaggugucuaacgugcagcgccuuaugagaaagcagaaacgggacgauagcgaccugaagcgccucagagaucugaaucaagcggucaacaaucugguggaacucaaguccacacagcagaaaagcauucugcggguuggaacgcuuaccucugacgaucugcucacacuggcugccgaccuugagaagcugaaauccaaggugauccgcaccgaaagaccccucagcucuggcgucuauauggggaaccuguccacacagcaacuggagcagcggcgcgcccuccugaauaugauuggaauggcuggcggggcccagggaacccagccuggcagagauggcgugguucgggugugggacgucaaaaacccggaucuucugaauaaccaauucgggacaaugcccagccucacccuggcuugucuuacgaagcagggacagguggaccugaaugaugccgugcucgcgcugaccgaccugggccucaucuacacagccaaguauccuaacucuuccgaccuggaucgccuuagccaaucccaucccauucugaauauggucgacaccaaaaagucuagccucaacaucuccggguacaauuuuagccugggagcugccguuaaagcuggcgccugcaugcuugaugggggaaacaugcuggagacaaucaaggugaccccucagacgauggacggcauucucaaaucuauccugaaggugaaaagaucccugggcauguucgucagcgaugcgcccggggaacggaauccuuaugagaacauucucuacaagaucugucugucuggagacggcuggccguauauugccagccgcacauccaucguggggagagcuugggaaaacaccacaguugaucuugagucugacggaaagccccagaaagugggcgccaccgggagcaauaagucccugcagagcgcuggauuuccuaccggccucacauacucucaacugaugacgcugaaagauuccaugaugcagcuugaccccagcgccaagaccuggauugauaucgagggccggccugaagaccccgucgagguggcccucuaccagccgguuucugggugcuauauccacuucuuuagagaaccuacagaccugaaacaguucaagcaagaugcuaaguacucccauggaauugacguggcggaucuguuucccgcccagccuggccucaccagcgcugucaucgaggcccugccccgcaacauggugcuuacaugucagggguccgacgauauuaaaaagcugcucgacucucagggacggaaagauaucaagcugauugacaucgcccugagcaaagcugauuccagacgcuucgaaaaugccgucugggaccaaugcaaggaucuuugucacaugcauaccggcgugguuguggagaagaaaaagagagggggcaaagaggaaaucacgccccacugcgcgcucauggacuguauuauguaugaugcugccgucucuggaggccugaacaucccugugcugcgggccguucucccgcgcgacaugguguuucggacaagcucccccaaggucgugcugugaggacuaguaauaaggaaacuguaugaaugucugugggcaggaagugaagagauccuucuguaaagguuuuuggaauuaugucugcugaauaauaaacuuuuuugaaauaauaaaucugguagaaaaaugagaucuaaaaaaaaaaaaaaaaaaaaaaaaaaaaaaaaaaaaaaaaaaaaaaaaaaaaaaaaaaaaaaaaaaaaaaaaaaaaaaaaaaaaaaaaaaaaaaaaaaaa

SEQ ID NO: 20361 - RNA, 2073 nt, Artificial Sequence
  mRNA product Design b-4 (A100) comprising derived and/or modified sequence from LASV(Lassa virus/H.sapiens-wt/NGA/2018/ISTH_0959;Clade II)__AVV65100__SP-HsALB_NP(2-569) (opt5)
aggagagucccgcagucggcguccagcggcucugcuuguucgugugugugucguugcaggccuuauucaagcuuaccaugaagugggugaccuucaucagccugcucuuucuguucuccucugccuacagcagcgccuccaaggaggugaaaucuuuccuguggacccagagccucagacgggaacuguccggcuacugcucuaacaucaaacuucaagucguuaaggacgcucaggcccugcuccacgggcuggauuuuagcgagguguccaaugugcagcgccuuaugagaaagcagaaacgggacgauucugaccugaagcgccucagagaucugaaccaagcggucaauaaccugguggaacucaagagcacccagcagaaauccauucugcggguuggaacgcuuaccagcgacgaucugcucacacuggcugccgaccuugagaagcugaaaucuaaggugauccgcaccgaaagaccccucuccagcggcgucuauauggggaaucugucuacacagcaacuggagcagcggcgcgcccuccugaaccuuauuggaauggugggcggggcucagggaacccagccuggcagagauggcguugugcgggucugggacgugaaaaauccggaucugcucaacaaucaauucgggacaaugcccucccugacccuugccugucugacgaagcagggacagguggaccucaacgaugucguucuggcucugaccgaccucggccugaucuacacagccaaguauccuaauagcucugaccuugaucgccugucccaaagccaucccauucucaacaugguggacaccaaaaaguccucucugaauaucagcggguuuaacuucucccuuggagcggccgugaaagcuggcgccugcaugcuggaugggggaaauaugcucgagacaaucaaggucaccccucagacgauggacggcauucugaaaagcauccugaaggugaaaaagucucucggcauguuuguuuccgauacacccggggaaagaaacccuuacgagaacauucuguauaagaucugucuuagcggagacggcuggccguacauugcuucucggaccagcaucguggggcgcgccugggaaaauacaaccgucgaucuggaguccgacggaaaaccccacaaggugggcaccgcggggucuaacaaaagccuccaguccgccggauucccuacaggccugacguauagccagcugaugacccuuaaggauucuaugaugcaacucgaccccuccgcuaaaacauggauugauaucgagggcagaccugaagaccccguugagaucgcccuguaccagccgaugagcgggugcuacauucacuuuuuccgggaaccuaccgaccugaagcaguuuaagcaggaugcuaaauauucucauggaaucgacguggccgaucucuuccccgcccaaccuggccugacauccgcugucauugaggcgcuucccagaaauauggugcugaccugucaggggagcgacgauaucaagcgccuccuggacucccagggacggaaagauauuaagcugaucgacaucgcccuuucuaaaacggauagcagacgcuuugaaaacgcugucugggaccagugcaaggaucucugucauaugcacacaggcgugguuguggagaagaaaaagagagggggcaaagaggaaauuacaccccacugcgcccugauggacuguaucauguacgaugccgcugucuccggaggccugaauauuccugugcuccgggccguucugccgcgcgacaugguguuccggaccucuagccccaaggucgugcuuugaggacuaguaauaaggaaacuguaugaaugucugugggcaggaagugaagagauccuucuguaaagguuuuuggaauuaugucugcugaauaauaaacuuuuuugaaauaauaaaucugguagaaaaaugagaucuaaaaaaaaaaaaaaaaaaaaaaaaaaaaaaaaaaaaaaaaaaaaaaaaaaaaaaaaaaaaaaaaaaaaaaaaaaaaaaaaaaaaaaaaaaaaaaaaaaaa

SEQ ID NO: 20362 - RNA, 2073 nt, Artificial Sequence
  mRNA product Design b-4 (A100) comprising derived and/or modified sequence from LASV(LASV003-NIG-2008;Clade II)__AIT17581__SP-HsALB_NP(2-569) (opt5)
aggagagucccgcagucggcguccagcggcucugcuuguucgugugugugucguugcaggccuuauucaagcuuaccaugaagugggugaccuucaucagccugcucuuucuguucuccucugccuacagcagcgccuccaaggaggugaaaucuuuccuguggacccagagccucagacgggaacuguccggcuacugcucuagcaucaaacuucaagucguuaaggacgcucaggcccugcuccacgggcuggauuuuuccgaggugucuaacgugcagcgccuuaugagaaagcagaaacgggacgauagcgaccugaagcgccucagagaucugaaucaagcggucaacaaucugguggaacucaaguccacccagcagaaaagcguucugcgggugggaacgcuuaccucugacgaucugcucacacuggcugccgaccuugagaagcugaaauccaaggucauucgcaccgaaagaccccucagcucuggcguguauauggggaaccuguccgcccagcaacuggagcagcggcgcacacuccugaauaugaucggaaugguuggcggggcucagggaacccagccuggcagagauggcgugguccgggugugggacgugaaaaacccggaucuucugaauaaccaauucgggacaaugcccagccucacccuggccugucuuacgaagcagggacaggucgaccugaaugauguugugcucgcucugaccgaccugggccucauuuacacagccaaguauccuaacucuuccgaccuggaucgccuuagccaaucccaucccauccugucuaugguggacaccaaaaagagcucccucaauauuagcggguacaacuuuucucugggagcggccgucaaagcuggcgccugcaugcuugaugggggaaauaugcuggagacaaucaaggugaccccucagacgauggacggcauccucaaauccauucugaagguuaaaaagagccugggcauguucgugucugauacacccggggaaagaaacccuuaugagaauauccucuacaagauuugucugagcggagacggcuggccguauaucgcuucccggaccucuauugucgggcgcgccugggaaaacacaaccguggaucuugagagcgacggaaaaccccagaagguuggcaccgcgggguccaacaaaagccugcagucugccggauuuccuacaggccucacguacucccaacugaugacccugaaggauagcaugaugcagcuugaccccucugcuaaaacauggaucgauauugagggcagaccugaagaccccguggagaucgcccucuaccagccgauguccgggugcuauauccacuucuuucgggaaccuaccgaccugaagcaguucaagcaagaugcuaaauacagccauggaauugacgucacagaucuguuucccgcccagccuggccucaccuccgccgugaucgaggcucugcccagaaauaugguccuuacgugucaggggucugacgauauuaagcgccugcucgacagccagggacggagagauaucaaacugauugacaucgcgcuguccaaggccgauucucgccgguucgaaaacgcugugugggaccaaugcaaagaucuuugucacaugcauacaggcguuguggucgagaagaagaaaagagggggcaaggaggaaaucacaccccacugcgcccucauggacuguauuauguaugaugccgcugugagcggaggccugaauaucccuguucugcgcgccgugcucccgcgggacauggucuuuagaaccuccagccccaaaguggugcugugaggacuaguaauaaggaaacuguaugaaugucugugggcaggaagugaagagauccuucuguaaagguuuuuggaauuaugucugcugaauaauaaacuuuuuugaaauaauaaaucugguagaaaaaugagaucuaaaaaaaaaaaaaaaaaaaaaaaaaaaaaaaaaaaaaaaaaaaaaaaaaaaaaaaaaaaaaaaaaaaaaaaaaaaaaaaaaaaaaaaaaaaaaaaaaaaa

SEQ ID NO: 20363 - RNA, 2073 nt, Artificial Sequence
  mRNA product Design b-4 (A100) comprising derived and/or modified sequence from LASV(LASV035-NIG-2009;Clade II)__AIT17589__SP-HsALB_NP(2-569) (opt5)
aggagagucccgcagucggcguccagcggcucugcuuguucgugugugugucguugcaggccuuauucaagcuuaccaugaagugggugaccuucaucagccugcucuuucuguucuccucugccuacagcagcgccuccaaggaggugaaaucuuuccuguggacccagagccucagacgggaacuguccggcuacugcucuagcaucaaacuucaagucguuaaagacgcucaggcccugcuccacgggcuggauuuuuccgaggugucuaacgugcagcgccuuaugagaaagcagaaacgggacgauagcgaccugaagcgccucagagaucugaaucaagcggucaacaaucugguggaacucaaguccacacagcagaaaagcauucugcggguuggaacgcuuaccucugacgaucugcucacacuggcugccgaccuugagaagcugaaauccaaggugauccgcaccgaaagaccccucagcucuggcgucuauauggggaaccuguccgcccagcaacuggagcagcggcgcgcucuccugaauaugauuggaauggugggcggggcccagggaacacagccuggcagagauggcguugugcgggucugggacgugaaaaacccggaucuucugaauaaccaauucgggaccaugcccagccucacacuggcuugucuuaccaagcagggacagguggaccugaaugaugccguccucgcgcugacggaccugggccucaucuacaccgccaaguauccuaacucuuccgaccuggaucgccuuagccaaucccaucccauucugaauaugguugacacaaagaagucuagccucaacaucuccggguacaauuuuagccugggagcugccgugaaagcuggcgccugcaugcuugaugggggaaacaugcuggagaccaucaaggugacaccucagaccauggacggcauucucaaaucuauccugaaggucaaaagaucccugggcauguucgugagcgauacgcccggggaacggaauccuuaugagaacauucucuacaagaucugucugucuggagacggcuggccguauauugcgagccgcacauccaucguugggagagccugggaaaacaccacaguggaucuugagucugacggaaagccccagaaagucggcaccaccgggagcaauaagucccugcagagcgcuggauuuccuacaggccucacguacucucaacugaugacccugaaagauuccaugaugcagcuugaccccagcgccaagacauggauugauaucgagggccggccugaagaccccguggagaucgcucucuaccagccgaugucugggugcuauauucacuucuuuagagaaccuaccgaccugaaacaguucaagcaagaugccaaguacucccauggaaucgacguugccgaucuguuucccgcucagccuggccucacaagcgcggugauugaggcccugccccgcaacaugguccuuaccugucagggguccgacgauaucaaaaagcugcucgacucucagggacggagagauauuaaacugaucgacaucgcucugagcaaggccgauucccgcaaauucgaaaaugccgugugggaccaaugcaaggaucuuugucacaugcauacgggcgucgugguugagaagaaaaagagagggggcaaagaggaaauuacaccccacugcgcucucauggacuguaucauguaugaugccgcggugucuggaggccugaacauuccuguccugcgggcugugcucccgcgcgacaugguuuuucggaccagcucccccaaggugguccugugaggacuaguaauaaggaaacuguaugaaugucugugggcaggaagugaagagauccuucuguaaagguuuuuggaauuaugucugcugaauaauaaacuuuuuugaaauaauaaaucugguagaaaaaugagaucuaaaaaaaaaaaaaaaaaaaaaaaaaaaaaaaaaaaaaaaaaaaaaaaaaaaaaaaaaaaaaaaaaaaaaaaaaaaaaaaaaaaaaaaaaaaaaaaaaaaa

SEQ ID NO: 20364 - RNA, 2073 nt, Artificial Sequence
  mRNA product Design b-4 (A100) comprising derived and/or modified sequence from LASV(LASV1000-NIG-2009;Clade II)__AIT17783__SP-HsALB_NP(2-569) (opt5)
aggagagucccgcagucggcguccagcggcucugcuuguucgugugugugucguugcaggccuuauucaagcuuaccaugaagugggugaccuucaucagccugcucuuucuguucuccucugccuacagcagcgccuccaaggaggugaaaucuuuccuguggacccagagccucagacgggaacuguccggcuacugcucuaacaucaaacuucaagucguuaaggacgcucaggcccugcuccacgggcuggauuuuagcgagguguccaaugugcagcgccuuaugagaaagcagaaacgggacgauucugaccugaagcgccucagagaucugaaccaagcggucaauaaccugguggaacucaagagcacacagcagaaauccauucugcggguuggaacgcuuaccagcgacgaucugcucacacuggcugccgaccuugagaagcugaaaucuaaggugauccgcaccgaaagaccccucuccagcggcgucuauauggggaaucugucuacacagcaacuggagcagcggcgcgcccuccugaacaugauuggaauggugggcggggcucagggaacccagccuggcagagauggcguugugcgggucugggacgugaaaaauccggaucuucugaacaaucaauucgggacaaugcccucccucacccuggccugucuuacgaagcagggacagguggaccugaacgaugucguucucgcucugaccgaccugggccucaucuacacagccaaguauccuaauagcucugaccuggaucgccuuucccaaagccaucccauucugaacaugguggacaccaaaaaguccucucucaauaucagcggguacaacuuuucccugggagcggccgugaaagcuggcgccugcaugcuugaugggggaaauaugcuggagacaaucaaggucaccccucagacgauggacggcauucucaaaagcauccugaaggugaaaaagucucugggcauguucguuuccgauacacccggggaaagaaacccuuaugagaacauucucuacaagaucugucugagcggagacggcuggccguauauugcuucucggaccagcaucguggggcgcgccugggaaaauacaaccgucgaucuugaguccgacggaaaaccccagaaggugggcaccgcggggucuaacaaaagccugcaguccgccggauuuccuacaggccucacguacagccaacugaugacccugaaggauucuaugaugcagcuugaccccuccgcuaaaacauggauugauaucgagggcagaccugaagaccccguugagaucgcccucuaccagccggugagcgggugcuauauucacuucuuucgggaaccuaccgaccugaagcaguucaagcaagaugcuaaauacucucauggaaucgacgucgccgaucuguuucccgcccagccuggccucacauccgcugugauugaggcgcugcccagaaauaugguccuuaccugucaggggagcgacgauaucaagcgccugcucgacucccagggacggagagauauuaaacugaucgacaucgcccugucuaaggcugauagccgccgguucgaaaacgccgugugggaccaaugcaaagaucuuugucacaugcauacgggcguuguggucgagaagaagaaaagagggggcaaggaggaaauuacaccccacugcgcccucauggacuguaucauguaugaugcugccguguccggaggccugaauauuccuguucugcgcgcggugcucccgcgggacauggucuuuagaaccucuagccccaaaguggugcugugaggacuaguaauaaggaaacuguaugaaugucugugggcaggaagugaagagauccuucuguaaagguuuuuggaauuaugucugcugaauaauaaacuuuuuugaaauaauaaaucugguagaaaaaugagaucuaaaaaaaaaaaaaaaaaaaaaaaaaaaaaaaaaaaaaaaaaaaaaaaaaaaaaaaaaaaaaaaaaaaaaaaaaaaaaaaaaaaaaaaaaaaaaaaaaaaa

SEQ ID NO: 20365 - RNA, 2073 nt, Artificial Sequence
  mRNA product Design b-4 (A100) comprising derived and/or modified sequence from LASV(LASV221-NIG-2010;Clade II)__AIT17625__SP-HsALB_NP(2-569) (opt5)
aggagagucccgcagucggcguccagcggcucugcuuguucgugugugugucguugcaggccuuauucaagcuuaccaugaagugggugaccuucaucagccugcucuuucuguucuccucugccuacagcagcgccuccaaggaggugaaaucuuuccuguggacccagagccucagacgggaacuguccggcuacugcucuagcaucaaacuucaagucguuaaggacgcucaggcccugcuccacgggcuggauuuuuccgaggugucuaacgugcagcgccuuaugagaaagcagcggcgcgacgauagcgaccugaaaagacuccgggaucugaaucaagcggucaacaaucugguggaacucaaguccacacagcaaaagagcauucugcgcguuggaacgcuuaccucugacgaucugcucacacuggcugccgaccuugagaaacugaaguccaaagugaucagaaccgaacggccccucagcucuggcgucuauauggggaaccuguccacacagcagcuggagcagcgcagagcccuccugaauaugauuggaauggugggcggggcucagggaacccagccuggccgggauggcguugugcgcgucugggacgugaagaacccggaucuucugaauaaccaauucgggacaaugcccagccucacccuggccugucuuacgaaacagggacagguggaccugaaugaugcuguccucgcccugaccgaccugggccucaucuacacagcgaaguauccuaacucuuccgaccuggauagacuuagccaaucccaucccauucugaauaugguugacaccaagaaaucuagccucaacaucuccggguacaauuuuagccugggagccgcugugaaggccggcgcuugcaugcuugaugggggaaacaugcuggagacaaucaaagugaccccucagacggucgacggcauucucaagucuauccugaaagugaagcggucccugggcauguucguuagcgauacacccggggaacgcaauccuuaugagaacauucucuacaaaaucugucugucuggagacggcuggccguauauugccagcagaaccuccaucguggggcgggcgugggaaaacacaaccgucgaucuugagucugacggaaagccccagaaggugggcaccgccgggagcaauaaaucccugcagagcgcuggauuuccuacaggccucacguacucucaacugaugacccugaaggauuccaugaugcagcuugaccccagcgccaaaacauggauugauaucgagggcagaccugaagaccccguugagaucgcucucuaccagccgaugucugggugcuauauucacuucuuucgcgaaccuaccgaccugaagcaguucaaacaagaugccaaguacucccauggaaucgacguggccgaucuguuucccgcucagccuggccucacaagcgcggucauugaggcccugccccggaacauggugcuuaccugucagggguccgacgauaucaagagacugcucgacucucagggacgccgggauauuaaacugaucgacaucgcucugagcaaggccgauuccagaaaauucgaaaaugccgucugggaccaaugcaaggaucuuugucacaugcauacgggcgugguuguggagaaaaagaagcgcgggggcaaagaggaaauuacaccccacugcgcucucauggacuguaucauguaugaugccgcggucucuggaggccugaacauuccugugcugcgggcuguucucccgagagacaugguguuucgcaccagcucccccaaggucgugcugugaggacuaguaauaaggaaacuguaugaaugucugugggcaggaagugaagagauccuucuguaaagguuuuuggaauuaugucugcugaauaauaaacuuuuuugaaauaauaaaucugguagaaaaaugagaucuaaaaaaaaaaaaaaaaaaaaaaaaaaaaaaaaaaaaaaaaaaaaaaaaaaaaaaaaaaaaaaaaaaaaaaaaaaaaaaaaaaaaaaaaaaaaaaaaaaaa

SEQ ID NO: 20366 - RNA, 2073 nt, Artificial Sequence
  mRNA product Design b-4 (A100) comprising derived and/or modified sequence from LASV(LASV237-NIG-2010;Clade II)__AIT17639__SP-HsALB_NP(2-569) (opt5)
aggagagucccgcagucggcguccagcggcucugcuuguucgugugugugucguugcaggccuuauucaagcuuaccaugaagugggugaccuucaucagccugcucuuucuguucuccucugccuacagcagcgccuccaaggaggugaaaucuuuccuguggacccagagccucagacgggaacuguccggcuacugcucuaacaucaaacuucaagucguuaaggacgcucaggcccugcuccacgggcuggauuuuagcgagguguccaaugugcagcgccuuaugagaaagcagaaacgggacgauucugaccugaagcgccucagagaucugaaccaagcggucaauaaccugguggaacucaagagcacacagcagaaauccauucugcggguuggaacgcuuaccagcgacgaucugcucacacuggcugccgaccuugagaagcugaaaucuaaggugauccgcaccgaaagaccccucuccagcggcgucuauauggggaaucugucuacacagcaacuggagcagcggcgcgcccuccugaacaugauuggaauggugggcggggcucagggaacccagccuggcagagauggcguugugcgggucugggacgugaaaaauccggaucuucugaacaaucaauucgggacaaugcccucccucacccuggccugucuuacgaagcagggacagguggaccugaacgaugcuguccucgcccugaccgaccugggccucaucuacacagcgaaguauccuaauagcucugaccuggaucgccuuucccaaagccaucccauucugaacaugguugacaucaaaaaguccucucucaauaucagcggguacaacuuuucccugggagccgcugugaaagccggcgcuugcaugcuugaugggggaaauaugcuggagaccauuaaggugacaccucagaccauggacggcauccucaaaagcauucugaaggucaaaagaucucugggcauguucguguccgauacgcccggggaacggaacccuuaugagaacauccucuacaagauuugucugagcggagacggcuggccguauaucgccucucgcacaagcauuguugggagagcgugggaaaauaccacaguggaucuugaguccgacggaaagccccagaaagucggcucugccgggagcaacaagucccugcagagcgcuggauuuccuaccggccucaccuacucucaacugaugacacugaaagauuccaugaugcagcuugaccccagcgccaagacguggaucgauaucgagggccggccugaagaccccguggagauugcucucuaccagccgaugucugggugcuauauccacuucuuuagagaaccuaccgaccugaaacaguucaagcaagaugccaaguacucccauggaauugacguugccgaucuguuucccgcucagccuggccucacaagcgcggugaucgaggcccugccccgcaauaugguccuuaccugucagggguccgacgauauuaaacggcugcucgacucucagggaagacgcgauaucaagcugaucgacauugcucugagcaaagccgauucccggagauucgaaaacgccgugugggaccaaugcaaggaucuuugucacaugcauacaggcgucgugguugagaaaaagaagcgcgggggcaaagaggaaaucacgccccacugcgcucucauggacuguauuauguaugaugccgcggugucuggaggccugaauaucccuguccugcgggcugugcucccgagagacaugguuuuucgcaccagcucccccaaggugguccugugaggacuaguaauaaggaaacuguaugaaugucugugggcaggaagugaagagauccuucuguaaagguuuuuggaauuaugucugcugaauaauaaacuuuuuugaaauaauaaaucugguagaaaaaugagaucuaaaaaaaaaaaaaaaaaaaaaaaaaaaaaaaaaaaaaaaaaaaaaaaaaaaaaaaaaaaaaaaaaaaaaaaaaaaaaaaaaaaaaaaaaaaaaaaaaaaa

SEQ ID NO: 20367 - RNA, 2073 nt, Artificial Sequence
  mRNA product Design b-4 (A100) comprising derived and/or modified sequence from LASV(LASV253-NIG-2011;Clade II)__AIT17671__SP-HsALB_NP(2-569) (opt5)
aggagagucccgcagucggcguccagcggcucugcuuguucgugugugugucguugcaggccuuauucaagcuuaccaugaagugggugaccuucaucagccugcucuuucuguucuccucugccuacagcagcgccuccaaggaggugaaaucuuuccuguggacccagagccucagacgggaacuguccggcuacugcucuagcaucaaacuucaagucguuaaggacgcucaggcccugcuccacgggcuggauuuuuccgaggugucuaacgugcagcgccuuaugagaaagcagaaacgggacgauagcgaccugaagcgccucagagaucugaaucaagcggucaacaaucugguggaacucaaguccacccagcagaaaagcguucugcgggugggaacgcuuaccucugacgaucugcucacacuggcugccgaccuugagaagcugaaauccaaggucauucgcaccgaaagaccccucagcucuggcguguauauggggaaccuguccacacagcaacuggagcagcggcgcgcccuccugaauaugaucggaaugguuggcggggcucagggaacccagccuggcagagauggcgugguccgggugugggacgugaaaaacccggaucuucugaauaaccaauucgggacaaugcccagccucacccuggccugucuuacgaagcagggacaggucgaccugaaugauguugugcucgcucugaccgaccugggccucauuuacacagccaaguauccuaacucuuccgaccuggaucgccuuagccaaucccaucccauccugaauaugguggacaccaaaaagucuagccucaacauuuccggguacaauuuuagccugggagcggccgucaaagcuggcgccugcaugcuugaugggggaaacaugcuggagacaaucaaggugaccccucagacgauggacggcauccucaaaucuauucugaagguuaaaaagucccugggcauguucgugagcgauacacccggggaaagaaauccuuaugagaacauccucuacaagauuugucugucuggagacggcuggccguauaucgcuagccggaccuccauugucgggcgcgccugggaaaacacaaccguggaucuugagucugacggaaaaccccagaagguuggcaccgcggggagcaauaaaucccugcagagcgccggauuuccuacaggccucacguacucucaacugaugacccugaaggauuccaugaugcagcuugaccccagcgcuaaaacauggaucgauauugagggcagaccugaagaccccguggagaucgcccucuaccagccgaugucugggugcuauauccacuucuuucgggaaccuaccgaccugaagcaguucaagcaagaugcuaaauacucccauggaauugacgucacagaucuguuucccgcccagccuggccucaccagcgccgugaucgaggcucugcccagaaacaugguccuuacgugucagggguccgacgauauuaagcgccugcucgacucucagggacggagagauaucaaacugauugacaucgcgcugagcaaggccgauucccgccgguucgaaaaugcugugugggaccaaugcaaagaucuuugucacaugcauacaggcguuguggucgagaagaagaaaagagggggcaaggaggaaaucacaccccacugcgcccucauggacuguauuauguaugaugccgcugugucuggaggccugaacaucccuguucugcgcgccgugcucccgcgggacauggucuuuagaaccagcucccccaaaguggugcugugaggacuaguaauaaggaaacuguaugaaugucugugggcaggaagugaagagauccuucuguaaagguuuuuggaauuaugucugcugaauaauaaacuuuuuugaaauaauaaaucugguagaaaaaugagaucuaaaaaaaaaaaaaaaaaaaaaaaaaaaaaaaaaaaaaaaaaaaaaaaaaaaaaaaaaaaaaaaaaaaaaaaaaaaaaaaaaaaaaaaaaaaaaaaaaaaa

SEQ ID NO: 20368 - RNA, 2073 nt, Artificial Sequence
  mRNA product Design b-4 (A100) comprising derived and/or modified sequence from LASV(LASV254-NIG-2011;Clade II)__AIT17675__SP-HsALB_NP(2-569) (opt5)
aggagagucccgcagucggcguccagcggcucugcuuguucgugugugugucguugcaggccuuauucaagcuuaccaugaagugggugaccuucaucagccugcucuuucuguucuccucugccuacagcagcgccuccaaggaggugaaaucuuuccuguggacccagagccucagacgggaacuguccggcuacugcucuagcaucaaacuucaagucguuaaggacgcucaggcccugcuccacgggcuggauuuuuccgaggugucuaacgugcagcgccuuaugagaaagcagaaacgggacgauagcgaccugaagcgccucagagaucugaaucaagcggucaacaaucugguggaacucaaguccacacagcagaaaagcguucugcgggugggaacgcuuaccucugacgaucugcucacacuggcugccgaccuugagaagcugaaauccaaggucauucgcaccgaaagaccccucagcucuggcguguauauggggaaccuguccacacagcaacuggagcagcggcgcgcccuccugaauaugaucggaaugguuggcggggcucagggaacccagccuggcagagauggcgugguccgggugugggacgugaaaaacccggaucuucugaauaaccaauucgggacaaugcccagccucacccuggccugucuuacgaagcagggacaggucgaccugaaugaugcuguucucgcccugaccgaccugggccucauuuacacagcgaaguauccuaacucuuccgaccuggaucgccuuagccaaucccaucccauccugaauaugguggacaccaaaaagucuagccucaacauuuccggguacaauuuuagccugggagccgcugugaaagccggcgcuugcaugcuugaugggggaaacaugcuggagacaaucaaggucaccccucagacgauggacggcauccucaaaucuauucugaaggugaaaaagucccugggcauguucguuagcgauacacccggggaaagaaauccuuaugagaacauccucuacaagauuugucugucuggagacggcuggccguauaucgccagccggaccuccauuguggggcgcgcgugggaaaacacaaucgucgaucuugagucugacggaaaaccccagaaggugggcaccgccgggagcaauaaaucccugcagagcgcuggauuuccuaccggccucacauacucucaacugaugacgcugaaggauuccaugaugcagcuugaccccagcgccaaaaccuggauugauaucgagggcagaccugaagaccccguugagaucgcucucuaccagccgaugucugggugcuauauucacuucuuucgggaaccuacagaccugaagcaguucaagcaagaugccaaauacucccauggaaucgacguggccgaucuguuucccgcucagccuggccucaccagcgcggucauugaggcccugcccagaaacauggugcuuacaugucagggguccgacgauaucaagcgccugcucgacucucagggacggagagauauuaaacugaucgacaucgcucugagcaaggccgauucccgccgguucgaaaaugccgucugggaccaaugcaaagaucuuugucacaugcauaccggcgugguuguggagaagaagaaaagagggggcaaggaggaaauuacgccccacugcgcucucauggacuguaucauguaugaugccgcggucucuggaggccugaacauuccugugcugcgcgcuguucucccgcgggacaugguguuuagaacaagcucccccaaagucgugcugugaggacuaguaauaaggaaacuguaugaaugucugugggcaggaagugaagagauccuucuguaaagguuuuuggaauuaugucugcugaauaauaaacuuuuuugaaauaauaaaucugguagaaaaaugagaucuaaaaaaaaaaaaaaaaaaaaaaaaaaaaaaaaaaaaaaaaaaaaaaaaaaaaaaaaaaaaaaaaaaaaaaaaaaaaaaaaaaaaaaaaaaaaaaaaaaaa

SEQ ID NO: 20369 - RNA, 2073 nt, Artificial Sequence
  mRNA product Design b-4 (A100) comprising derived and/or modified sequence from LASV(Nig08-04;Clade II)__ADU56611__SP-HsALB_NP(2-569) (opt5)
aggagagucccgcagucggcguccagcggcucugcuuguucgugugugugucguugcaggccuuauucaagcuuaccaugaagugggugaccuucaucagccugcucuuucuguucuccucugccuacagcagcgccuccaaggaggugaaaucuuuccuguggacccagagccucagacgggaacuguccggcuacugcucuaacaucaaacuucaagucguuaaggacgcucaggcccugcuccacgggcuggauuuuagcgagguguccaaugugcagcgccuuaugagaaagcagaaacgggacgauggagaccugaagcgccucagagaucugaaccaagcggucaauaaccugguggaacucaagucuacccagcagaaaagcguucugcgggugggcacgcuuaccuccgacgaucugcucacacuggcugccgaccuugagaagcugaaaagcaaggucauucgcaccgaaagaccccucucuuccgggguguauaugggaaaucugagcacacagcaacuggagcagcggaaagcccuccugucuaugaucggcaugguugggggagcucagggcacccagccuggccgcgaugggguggucagagugugggacgugaagaacccggaucuucugaauaaccaauucggaacaaugcccucccucacccuggccugucuuacgaagcagggccaggucgaccugaaugaugcuguucucgcccugaccgaccuggggcucauuuacacagcgaaauauccuaacagcucugaccuggaucggcuuucccaaagccaucccauccugaauaugguggacaccaagaaauccucucucaacauuagcggauacaauuuuucccugggcgccgcugugaaggccggggcuugcaugcuugauggaggcaacaugcuggagacaaucaaagucaccccucagacgauggacggcauccucaagagcauucugaaagugaagcgcucucuggggauguucguuuccgauacacccggagaaagaaauccuuaugagaacauccucuacaagauuugucugagcggcgacggguggccguauaucgccucucggaccagcauugugggacgcgcgugggaaaacacaaccgucgaucuugaguccgacggcaaaccccagaagguggggaccgccggaucuaauaaaagccugcaguccgcuggcuuuccuacaggccucacguacagccaacugaugacccugaaggauucuaugaugcagcuugaccccuccgccaaaacauggaucgauauugaggggagaccugaagaccccguugagaucgcucucuaccagccgaugagcggaugcuauauccacuucuuucgggaaccuaccgaccugaagcaguucaagcaagaugccaaauacucucauggcauugacgugacagaucuguuuuccgcccagcccgggcucaccagcgcugucaucgaggcgcugccuagaaacauggugcuuacgugucagggauccgacgauauuaagaaacugcucgacucucagggccgccgggauaucaagcugauugacaucagccugaauaaagccgauuccagacgcuucgaaaacgcugucugggaccaaugcaaggaucuuugucacaugcauacaggggugguuguggagaagaaaaagcggggcggaaaagaggaaaucacaccccacugcgcccucauggacuguauuauguuugaugccgcugucucuggcgggcugaauauccccauucugagagccgugcucccucgcgacaugguuuuccggaccagcuccccgaaggugguccugugaggacuaguaauaaggaaacuguaugaaugucugugggcaggaagugaagagauccuucuguaaagguuuuuggaauuaugucugcugaauaauaaacuuuuuugaaauaauaaaucugguagaaaaaugagaucuaaaaaaaaaaaaaaaaaaaaaaaaaaaaaaaaaaaaaaaaaaaaaaaaaaaaaaaaaaaaaaaaaaaaaaaaaaaaaaaaaaaaaaaaaaaaaaaaaaaa

SEQ ID NO: 20370 - RNA, 2076 nt, Artificial Sequence
  mRNA product Design b-4 (A100) comprising derived and/or modified sequence from LASV(GA391;Clade III)__AAA46284__SP-HsALB_NP(2-570) (opt5)
aggagagucccgcagucggcguccagcggcucugcuuguucgugugugugucguugcaggccuuauucaagcuuaccaugaagugggugaccuucaucagccugcucuuucuguucuccucugccuacagcagcgccuccaaggaggugagaucuugccuguggacccagagccuccggcgcgaacuguccggcuacuguucuaacaucaaacuucaagucguuaaggacgcucaggcccugcuccacgggcuggauuucagcgagguguccaaugugcagagacuuaugcggaaacagaagcgcgacgauggagaccugaaaagacuccgggaucugaaccaagcggucaauaaccugguggaacucaagucuacacagcagaaaagcguucugcgcgugggcacgcuuuccagcgacgaucugcucauucuggcugccgaccuugagaaacugaagucuaaagucaccagaacagaacggccccucuccagcgggguguauaugggaaaucugucuucccagcaacuggaucagcgcagagcccuccugaacaugaucggcaugaccgggguuagcggaggcggcaagggggcuucuaauggaauugugcgggucugggacgugaaaaacgccgagcuucugaauaaccaguuuggcacaaugccuucccucacccuggcuugccuuacaaagcaggggcaaguggaucugaaugacgccguccaggcgcucaccgaucugggacugaucuacacggccaaguauccgaacagcuccgaccucgaccgccugucucagagccaucccauucuuaauaugaucgauaccaaaaaguccagccugaacaucucuggcuacaauuucucccucggggcugccguuaaagcuggagccuguaugcuggacggcggcaacaugcuugagacaauuaaggugagcccucaaaccauggaugggauccugaaaucuauucucaaggugaaaaagagccugggaauguuugucuccgacacacccggcgaaagaaacccuuaugagaauauccuguacaagauuugccucucuggggauggauggagcuauaucgcgucccggaccagcauugugggccgcgccugggaaaacacgguuguggaccuggagcaggauaauaaaccccagaagaucgggaacggaggcucuaauaaaucccuucagagcgcuggcuucgccgcugggcugaucuacucucaacucaugacacugaaggacuuuaaauguuucaaccugauuccuaaugccaagaccuggauggauaucgagggaagaccggaagaccccgucgagauugcccuuuaccagccuuccagcggcugcuaugugcacuuuuuccgggaacccacagaucucaagcaguuuaaacaggacgcuaaguacucccaugggagagacguuaccgaucuguucgcggcccaaccuggacugaccucugcugugaucgaggcccucccccgcaacauggucauuacaugucagggcagcgaagacauccggaaacugcuugagucccaggggagacgcgauaucaagcugauugacaucacgcucucuaaagccgauagccggaaguuugagaaugcugugugggaccaguucaaggaucugugccacaugcauaccggcgucgugguugaaaagaagaaaagaggaggcaaggaggaaauuacaccgcacugugcccugauggacugcaucauguuugaugcggcuguguccgggggacuugacgccaaaguccuccgcgugguucugccucgggauaugguguucagaaccagcacacccaaggucgugcugugaggacuaguaauaaggaaacuguaugaaugucugugggcaggaagugaagagauccuucuguaaagguuuuuggaauuaugucugcugaauaauaaacuuuuuugaaauaauaaaucugguagaaaaaugagaucuaaaaaaaaaaaaaaaaaaaaaaaaaaaaaaaaaaaaaaaaaaaaaaaaaaaaaaaaaaaaaaaaaaaaaaaaaaaaaaaaaaaaaaaaaaaaaaaaaaaa

SEQ ID NO: 20371 - RNA, 2073 nt, Artificial Sequence
  mRNA product Design b-4 (A100) comprising derived and/or modified sequence from LASV(Nig08-A19;Clade III)__ADU56619__SP-HsALB_NP(2-569) (opt5)
aggagagucccgcagucggcguccagcggcucugcuuguucgugugugugucguugcaggccuuauucaagcuuaccaugaagugggugaccuucaucagccugcucuuucuguucuccucugccuacagcagcgccuccaaggaggugaaaucuuuccuguggacccagagccucagacgggaacuguccggcuacugcucuaacaucaaacuucaagucguuaaggacgcucaggcccugcuccacgggcuggauuuuagcgagguguccaaugugcagcgccuuaugagaaagcagaaacgggacgauggagaccugaagcgccucagagaucugaaccaagcggucaauaaccugguggaacucaagucuacacagcagaaaagcguucugcgggugggcacgcuuuccagcgacgaucugcucguccuggcugccgaccuugagaagcugaaaucuaaggugguucgcaccgaaagaccccucuccagcgggauuuauaugggaaaucugucuucccagcaacuggaucagcggaaagcccuccugaacaugaucggcaugacagggggaaauggcggccgcaacaccacaagcgacgggauugugagagucugggaugugaagaaugcugagcuucugaacaaucaguucggaaccaugccuucucucacacuggccugucuuaccaagcagggccaaguggaccugaacgaugcuguccaggcccucacggaccuggggcugaucuacaccgcgaaauaucccaauuccagcgaccucgaucggcuggcccagucccauccgauucuuaacaugaucgacacaaagaaaucuagccugaauaucuccggauacaacuuuagccucggcgcugccguuaaggcuggggccugcaugcuggauggaggcaacaugcuugagaccauuaaagugucuccucaaacaauggacggcauccugaaguccauucucaaagugaagcgcagccuggggauguucaucucugauacccccggagaaagaaauccuuaugagaacauucuguacaagaucugucucagcggcgacggguggcccuauauugcgucccggacgucuaucgucggacgcgccugggaaaauacagugguugaucuggagagcgacaacaaaccucagaagaccggcaaugggggauccaacaaaagccuucagucugcuggcuuugccgcuggccugacauacucccagcucaugacccugaaggauagcaugcugcaacuugacccgaaugccaaaaccuggauggauaucgaggggagacccgaagacccuguggagauugcccucuaccagcccucuuccggaugcuauauccacuucuuucgggaaccuacagaccugaagcaguucaagcaggaugcuaaauacagccauggcauugacgucacggaucuguuugcggcccaacccgggcucaccuccgcugugaucgaggcccugccgagaaacaugguuauuacaugucagggaucugaagacauccgcaaacuucuggagagccagggccggagagauaucaagcucauugacaucucccugucuaagguggauagccgcaaauucgagaaugccgucugggaccaguuuaaggaucugugccacaugcauaccgggauuguggucgaaaagaaaaagcggggcggaaaagaggaaaucacaccucacugugcucuuauggacugcauuauguucgaugccgcgguguccggcgggguugacgcuaaggugcucagagccguccugccccgcgauaugguguuucggaccagcacgccuaaaguugugcugugaggacuaguaauaaggaaacuguaugaaugucugugggcaggaagugaagagauccuucuguaaagguuuuuggaauuaugucugcugaauaauaaacuuuuuugaaauaauaaaucugguagaaaaaugagaucuaaaaaaaaaaaaaaaaaaaaaaaaaaaaaaaaaaaaaaaaaaaaaaaaaaaaaaaaaaaaaaaaaaaaaaaaaaaaaaaaaaaaaaaaaaaaaaaaaaaa

SEQ ID NO: 20372 - RNA, 2073 nt, Artificial Sequence
  mRNA product Design b-4 (A100) comprising derived and/or modified sequence from LASV(G1180-SLE-2010;Clade IV)__AIT17169__SP-HsALB_NP(2-569) (opt5)
aggagagucccgcagucggcguccagcggcucugcuuguucgugugugugucguugcaggccuuauucaagcuuaccaugaagugggugaccuucaucagccugcucuuucuguucuccucugccuacagcagcgccuccaaggagaucaaaucuuuccuguggacccagagccucagacgggaacuguccggcuacugcucuaacauuaagcugcaaguggucaaagacgcucaggcccugcuccacgggcuggauuuuagcgagguuuccaaugugcagcgccuuaugagaaaggaacggcgcgacgauaacgaccugaaaagacuccgggaucugaaucaggcggugaacaaucuggucgagcucaagucuacacaacaaaagagcauccugcgcgugggaacgcuuaccuccgacgaucugcucauucuggcugccgaccuugaaaaacuuaagagcaaaguuaucagaacagagcggccccucucugccggcguguauauggggaaccuguccagccagcagcuggaucagcgcagagcucuccugucuaugauuggaauguccagcggcaaucagcgggcccaggcugggcgcgacggagucgugagaguuugggaugugaagaacgucgagcuucugaauaaccaguucggcaccaugccuucucucacacuggccugucuuaccaaacaaggccagguggaccugaaugaugcggugcaggcccucacagaccuggggcugaucuacaccgcuaaguauccgaacacguccgaccucgaucggcugacccaaagccaucccauccuuaauaugauugacacaaagaaauccucucugaacaucagcggauacaauuuuucccucggcgccgcugucaaggccggggcgugcaugcuggauggaggcaacaugcuugaaaccauuaaaguuagcccucagacaauggacgggauccugaagucuauucucaaagugaagaaagcccugggaauguucaucuccgauacccccggcgagcgcaacccuuaugaaaauauucuguacaagaucugucucagcggcgacggguggcccuauaucgcuucuagaacgagcauuacaggacgggccugggagaacaccguggucgaucuggaguccgacggcaagccucagaaagcugggucuaauaacagcaauaagucccuucagagcgugggauuuacagccggccugaccuacucucaacucaugacccugaaagaugccaugcugcagcuugacccgaacgcuaagacauggauggauaucgaagggagacccgaggacccuguugaaauugcgcucuaccagcccuccagcggaugcuauauccacuucuuucgcgagccuacggaccugaaacaguucaagcaagaugccaaguacucucauggcauugacgugaccgaucuguuugcugcccagcccggccucacauccgccgucaucgacgcucugccgcggaauauggugaucaccugucaggggagcgaugacauuagaaaacuucuggaaucccagggacgcaaggauaucaaacucauugacaucgcccugucuaagacagauagccggaaauaugagaacgcgguuugggaccaauacaaggaucugugccacaugcauaccggcguggucguggagaagaaaaagagagggggaaaagaagagauuacgccucacugugcucuuauggacugcaucauguucgaugccgccgucuccggcgggcucaauacaucugugcugcgcgcuguucugccccgggacaugguguuuagaaccagcaccccucgcgucgugcucugaggacuaguaauaaggaaacuguaugaaugucugugggcaggaagugaagagauccuucuguaaagguuuuuggaauuaugucugcugaauaauaaacuuuuuugaaauaauaaaucugguagaaaaaugagaucuaaaaaaaaaaaaaaaaaaaaaaaaaaaaaaaaaaaaaaaaaaaaaaaaaaaaaaaaaaaaaaaaaaaaaaaaaaaaaaaaaaaaaaaaaaaaaaaaaaaa

SEQ ID NO: 20373 - RNA, 2073 nt, Artificial Sequence
  mRNA product Design b-4 (A100) comprising derived and/or modified sequence from LASV(G1442-SLE-2011;Clade IV)__AIT17181__SP-HsALB_NP(2-569) (opt5)
aggagagucccgcagucggcguccagcggcucugcuuguucgugugugugucguugcaggccuuauucaagcuuaccaugaagugggugaccuucaucagccugcucuuucuguucuccucugccuacagcagcgccuccaaggaggugaaaucuuuccuguggacccagagccucagacgggaacuguccggcuacugcucuaacaucaaacuucaagucguuaaggacgcucaggcccugcuccacgggcuggauuuuagcgagguguccaaugugcagcgccuuaugagaaagcagcggcgcgacgauaacgaccugaaaagacuccgggaucugaaucaagcggucaacaaucugguggaacucaagucuacacagcaaaagagcguucugcgcgugggaacgcuuaccuccgacgaucugcucguccuggcugccgaccuugagaaacuuaagagcaaagugauuagaacagaacggccccucucugccggcguuuauauggggaaccuguccagccagcagcuggaucagcgcagagcucuccugaauaugaucggaaugucuggcgggauucagggaacccggacaggccgcgacggcguggucagagugugggaugugaagaacgccgaccuucugaauaaccaguucgggaccaugccuucccucacacuggcuugucuuaccaaacaaggacaggucgaucugaaugacguugugcaggcccucacggaccugggccugaucuacaccgcgaaguauccgaacgccagcgaucucgaccggcugacacaaucucaucccauucuuaauaugaucgauaccaagaaauccagccugaacaucuccggguacaauuuuucucucggagcugccgugaaggcuggcgccugcaugcuggacgggggaaacaugcuugagacaauuaaagucagcccucagaccauggauggcauccugaaguccauucucaaagugaagaaaacgcugggcauguucaucagcgacacacccggggagcgcaacccuuaugaaaauauucuguacaagaucugucucucuggagauggcuggcccuauauugcguccagaaccagcaucacagggcgggccugggagaacaccguuguggaccuggaaucugauggaaagccucagaaagcuggcagcaauaacuccaauaagucucuucagagcgccggguuugcugccggacugaccuacucccaacucaugacacugaaagacgccaugcugcagcuugauccgaacgcuaagacguggauggacaucgagggcagacccgaggacccugucgaaauugcgcucuaccagcccagcucuggcugcuauauccacuucuuucgcgagccuaccgaucugaaacaguucaagcaagacgccaaguacucccaugggauugaugugacagaccuguuugcugcccagcccggacucaccagcgccguuaucgaagcucugccgcggaauauggugauuacaugucagggcucugaugacaucaaaaagcugcuggagucccaggggagaaaagauaucaagcucauugacaucgcccugagcaaaaccgauucccgcaaguaugaaaacgcggucugggaccaauacaaggaucugugccacaugcauacgggaguggucguggagaaaaagaaacggggcgggaaggaggaaauuacaccucacugugcucuuauggacugcaucauguucgaugccgccguuucuggcggacucaauacccuggugcugagagcuguccucccccgcgacaugguguuucggaccagcacaccuagaguugugcugugaggacuaguaauaaggaaacuguaugaaugucugugggcaggaagugaagagauccuucuguaaagguuuuuggaauuaugucugcugaauaauaaacuuuuuugaaauaauaaaucugguagaaaaaugagaucuaaaaaaaaaaaaaaaaaaaaaaaaaaaaaaaaaaaaaaaaaaaaaaaaaaaaaaaaaaaaaaaaaaaaaaaaaaaaaaaaaaaaaaaaaaaaaaaaaaaa

SEQ ID NO: 20374 - RNA, 2073 nt, Artificial Sequence
  mRNA product Design b-4 (A100) comprising derived and/or modified sequence from LASV(G3010-SLE-2013;Clade IV)__AIT17345__SP-HsALB_NP(2-569) (opt5)
aggagagucccgcagucggcguccagcggcucugcuuguucgugugugugucguugcaggccuuauucaagcuuaccaugaagugggugaccuucaucagccugcucuuucuguucuccucugccuacagcagcgccuccaaggagaucaaaucuuuccuguggacccagagccucagacgggaacuguccggcuacugcucuaacauuaaacuucaaguggucaaagacgcucaggcccugcuccacgggcuggauuuuagcgagguuuccaaugugcagcgccuuaugagaaaggaacggcgcgacgauaacgaccugaaaagacuccgggaucugaaucaggcggugaacaaucuggucgagcucaagucuacacaacaaaagagcauccugcgcgugggaacgcuuaccuccgacgaucugcucauucuggcugccgaccuugaaaaacuuaagagcaaaguuacaagaaccgagcggccccucucugccggcguguauauggggaaccuguccagccagcagcuggaucagcgcagagcucuccugucuaugaucggaauguccagcggcguccagggggcccgggcuggacgcgacggcgugguuagagugugggaugucaagaaugccgagcuucugaacaaucaguucggcacaaugccuucucucacccuggcgugucuuacaaaacaggggcaaguggaccugaacgaugugguccaggcccucaccgaccugggacugauuuacacggcuaaguauccgaauaccuccgaccucgaucggcugacacagagccaucccauccuuaacaugaucgacaccaagaaauccucucugaauauuagcggcuacaacuuuucccucggggccgcuguuaaggccggagcgugcaugcuggauggcgggaauaugcuugaaacaaucaaagugagcccucaaaccauggacggcauucugaagucuauccucaaagugaagaaagcccugggaauguucauuuccgagacgcccggcgaacgcaacccuuaugagaacauccuguacaagauuugucucagcggggauggauggcccuauaucgcuucuagaacaagcaucaccggccgggccugggagaauacagucguggaccuggaauccgaugggaagccucagaaagcuggaucuaacaauagcaacaagucccuucagagcgccggcuuuaccgccgggcugaccuacucucagcucaugacacugaaagacgcuaugcugcaacuugauccgaaugcgaagacguggauggacauugagggaagacccgaagauccuguugagguggcccucuaccagcccuccagcggcugcuauauccacuucuuucgcgaaccuaccgaccugaaacaguucaagcaggacgcuaaguacucucauggcauugaugucacagaccuguuugccgcccaacccgggcucaccuccgcugugaucgaugcccugccgcggaacaugguuauuacaugucagggaagcgacgauaucaaaaagcugcuggagucccagggcagaaaagacaucaagcucauugauaucgcgcugucuaaaaccgacagccgcaaguaugagaaugcugugugggaucaguacaaggaccugugccacaugcauacgggggucguggucgaaaagaagaaacggggaggcaaggaggaaauuacaccucacugugcccuuauggauugcaucauguucgacgccgcuguguccgggggccucaacaccucuguucugagagccgugcugccccgcgauauggucuuucggaccagcacaccuagagugguucucugaggacuaguaauaaggaaacuguaugaaugucugugggcaggaagugaagagauccuucuguaaagguuuuuggaauuaugucugcugaauaauaaacuuuuuugaaauaauaaaucugguagaaaaaugagaucuaaaaaaaaaaaaaaaaaaaaaaaaaaaaaaaaaaaaaaaaaaaaaaaaaaaaaaaaaaaaaaaaaaaaaaaaaaaaaaaaaaaaaaaaaaaaaaaaaaaa

SEQ ID NO: 20375 - RNA, 2073 nt, Artificial Sequence
  mRNA product Design b-4 (A100) comprising derived and/or modified sequence from LASV(G502-SLE-2009;Clade IV)__AIT17127__SP-HsALB_NP(2-569) (opt5)
aggagagucccgcagucggcguccagcggcucugcuuguucgugugugugucguugcaggccuuauucaagcuuaccaugaagugggugaccuucaucagccugcucuuucuguucuccucugccuacagcagcgccuccaaggagaucaaaucuuuccuguggacccagagccucagacgggaacuguccggcuacugcucuaacauuaagcugcaaguggucaaagacgcucaggcccugcuccacgggcuggauuuuagcgagguuuccaaugugcagcgccuuaugagaaaggaacggcgcgacgauaacgaccugaaaagacuccgggaucugaaucaggcggugaacaaucuggucgagcucaagucuacacaacaaaagagcauccugcgcgugggaacgcuuaccuccgacgaucugcucauucuggcugccgaccuugaaaaacuuaagagcaaaguuaucagaacagagcggccccucucugccggcguguauauggggaaccuguccagccagcagcuggaucagcgcagagcucuccugucuaugauuggaauguccggcgggaaucagggaguccgggccggcaaggacggcgugguucgcgugugggaugucaaaaacgcugagcuucugaauaaccaguucgggaccaugccuagccucacacuggccugucuuaccaagcagggacaaguggaccugaaugaugcggugcaggcccucacagaccugggccugaucuacaccgcuaaguauccgaacacgucugaccucgauagacugacccagucccaucccauccuuaauaugauugacaccaaaaagagcucccugaacaucucuggguacaauuuuagccucggagccgcugucaaagccggcgcgugcaugcuggaugggggaaacaugcuugaaacaauuaagguuuccccucaaacaauggacggcauccugaaaagcauucucaaggugaaaaaggcccugggcauguucaucucugauacccccggggagcggaacccuuaugaaaauauucuguacaagaucugucucuccggagacggcuggcccuauaucgcuagccgcacgucuauuacagggagagccugggagaacaccguggucgaucuggagagcgacggaaaaccucagaaggcuggcuccaauaacucuaauaaaagccuucaguccgccggguuuacagccggacugaccuacagccagcucaugacccugaaggaugcuaugcugcaacuugacccgaacacaaaaacguggauggauaucgaaggccggcccgaggacccuguggaaauugcgcucuaccagcccucuuccggcugcuauauccacuucuuuagagagccuaccgaccugaagcaguucaagcaggaugccaaauacagccaugggauugacguuacagaucuguuugcugcccaacccggacucaccucugccgugaucgacgcucugccgcgcaauauggucaucacaugucagggcuccgaugacauucggaaacuucuggaaagccaggggagaaaggauaucaagcucauugacaucgcccugaacaaaaccgauucccgcaaguaugagaaugcggugugggaccaguacaaggaucugugccacaugcauacgggaguuguggucgagaaaaagaaacggggcgggaaggaagagauuacaccucacugugcucuuauggacugcaucauguucgaugccgccgugucuggcggacucaacaccagcguccugagagcugugcugccccgcgacaugguuuuucggaccuccacaccuagagugguccucugaggacuaguaauaaggaaacuguaugaaugucugugggcaggaagugaagagauccuucuguaaagguuuuuggaauuaugucugcugaauaauaaacuuuuuugaaauaauaaaucugguagaaaaaugagaucuaaaaaaaaaaaaaaaaaaaaaaaaaaaaaaaaaaaaaaaaaaaaaaaaaaaaaaaaaaaaaaaaaaaaaaaaaaaaaaaaaaaaaaaaaaaaaaaaaaaa

SEQ ID NO: 20376 - RNA, 2073 nt, Artificial Sequence
  mRNA product Design b-4 (A100) comprising derived and/or modified sequence from LASV(G733-SLE-2010;Clade IV)__AIT17155__SP-HsALB_NP(2-569) (opt5)
aggagagucccgcagucggcguccagcggcucugcuuguucgugugugugucguugcaggccuuauucaagcuuaccaugaagugggugaccuucaucagccugcucuuucuguucuccucugccuacagcagcgccuccaaggagaucaaaucuuuccuguggacccagagccucagacgggaacuguccggcuacugcucuaacauuaagcugcaaguggucaaagacgcucaggcccugcuccacgggcuggauuuuagcgagguuuccaaugugcagcgccuuaugagaaaggaacggcgcgacgauaacgaccugaaaagacuccgggaucugaaucaggcggugaacaaucuggucgagcucaagucuacacaacaaaagagcgugcugcgcguuggaacgcuuaccuccgacgaacugcucgugcuggcugccgaucuugagaaacuuaagagcaaagucaucagaacagagcggccccucucugccggcguguauauggggaaccuguccagccagcagcuggaccagcgcagagcucuccugucuaugauuggaauguccggcgggaaucagggagcccggaccggccgcgauggcguugugagagucugggacgugaagaacgcugaacuucugaauaaccaguucgggacaaugccuagccucacccuggccugucuuacaaaacagggacaaguggaucugaaugacgcgguccaggcccucaccgaucugggccugaucuacacggcuaaguauccgaacaccucugaccucgaccggcugacacagucccaucccauucuuaauaugaucgauaccaagaaaagcucccugaacaucucuggguacaauuuuagccucggagccgcuguuaaggccggcgcgugcaugcuggacgggggaaacaugcuugagacaauuaaaguguccccucaaaccauggauggcauccucaagagcauucugaaagugaagaaagcccugggcauguucaucucugacacgcccggggaacgcaacccuuaugagaauauucuguacaagaucugucucuccggagauggcuggcccuauauugcuagcagaacaucuaucaccgggcgggccugggagaacacagucguggaccuggaaagcgauggaaagccucagaaagcuggcuccaauaacucuaauaagagccuucaguccgccggguuuaccgccggacugaccuacagccagcucaugacacugaaagacgcuaugcugcaacuugauccgaacgcgaagacguggauggacaucgagggcagacccgaagauccuguugagauugcccucuaccagcccucuuccggcugcuauauccacuucuuucgcgaaccuaccgaccugaaacaguucaagcaggacgcuaaguacagccaugggauugaugugacagaccuguuugccgcccaacccggacucaccucugcugucaucgaugcccugccgcggaauauggugauuacaugucagggcuccgacgauaucagaaaacuucuggagagccaggggcgcaaggacaucaaacucauugauaucgcgcuguccaagauugacucucggaaauaugagaacgcuguuugggaucaguacaaggaccugugccacaugcauaccggaguggucguggaaaagaaaaagagaggcgggaaagaggaaaucacgccucacugugcccuuauggauugcauuauguucgacgccgcugucagcggcggacucaauucccuggugcugcgcgccguucucccccgggauaugguguuuagaacaucuaccccucgcgucgugcugugaggacuaguaauaaggaaacuguaugaaugucugugggcaggaagugaagagauccuucuguaaagguuuuuggaauuaugucugcugaauaauaaacuuuuuugaaauaauaaaucugguagaaaaaugagaucuaaaaaaaaaaaaaaaaaaaaaaaaaaaaaaaaaaaaaaaaaaaaaaaaaaaaaaaaaaaaaaaaaaaaaaaaaaaaaaaaaaaaaaaaaaaaaaaaaaaa

SEQ ID NO: 20377 - RNA, 2073 nt, Artificial Sequence
  mRNA product Design b-4 (A100) comprising derived and/or modified sequence from MOPV/LASV reassortant(IGS-1;Clade IV)__AFY05578__SP-HsALB_NP(2-569) (opt5)
aggagagucccgcagucggcguccagcggcucugcuuguucgugugugugucguugcaggccuuauucaagcuuaccaugaagugggugaccuucaucagccugcucuuucuguucuccucugccuacagcagcgccuccaaggagaucaaaucuuuccuguggacccagagccucagacgggaacuguccggcuacugcucuaacauuaaacuucaaguggucaaggacgcucaggcccugcuccacgggcuggauuuuagcgagguuuccaaugugcagcgccuuaugagaaaggaacggcgcgacgauaacgaccugaaaagacuccgggaucugaaucaggcggugaacaaucuggucgagcucaagucuacacaacaaaagagcauccugcgcgugggaacgcuuaccuccgacgaucugcucauucuggcugccgaccuugaaaaacugagaagcaagguuauccggacagagcgcccccucucugccggcguguauauggggaaccuguccagccagcagcuggaucagagacgggcucuccugaauaugauuggaaugucuggcgggaaccagggagcccgcgcuggcagagacggcgucgugcggguuugggaugugaaaaaugccgagcuucuguccaaccaguucgggaccaugccuagccucacacuggcgugucuuaccaagcagggacaagucgaccugaaugaugccgugcaggcucucacagaccugggccugaucuacaccgccaaauauccgaacacgucugaccucgaucgccugacccagucccaucccauccuuaauaugauugacacaaagaaaagcucccugaacaucucuggguacaauuuuagccucggagcugccgugaaggcgggcgccugcaugcuggaugggggaaacaugcuugaaaccauuaaggucuccccucaaacaauggacggcauccugaaaagcauucucaagguuaaaaaggcucugggcauguucaucucugauacccccggggagagaaacccuuaugaaaauauucuguacaaaaucugucucuccggagacggcuggcccuauaucgccagccggacgucuauuacagggagagcuugggagaacaccgugguggaucuggagagcgacggaaagccucagaaggccgauuccaauaacucuagcaaaucccuucagagcgccggcuuuacagcugggcugaccuacucucagcucaugacccugaaggacgcgaugcugcaacuugauccgaaugccaaaacauggauggacaucgaaggacgccccgaggacccugucgaaauugcucucuaccagcccuccagcggcugcuauauccacuucuuucgggagccuacggaucugaagcaguucaaacaggacgccaaguacucucauggcauugaugugaccgaccuguuugccacacaacccgggcucaccuccgcuguuaucgaugcccugccgagaaacauggugaucacaugucagggaagcgacgauauucgcaaacuucuggaaucccagggccggaaggacaucaagcucauugauaucgaccugucuaaaaccgauagcagaaaguaugagaaugcggucugggaccaguacaaagaucugugccacaugcauacgggggugguuguggagaagaagaaacgcggaggcaaggaagagauuacaccucacugugcucuuauggacugcaucauguucgacgccgccgucuccgggggccucaacaccucugugcugcgggcuguccugcccagagauaugguguuucgcaccagcacaccucggguugugcucugaggacuaguaauaaggaaacuguaugaaugucugugggcaggaagugaagagauccuucuguaaagguuuuuggaauuaugucugcugaauaauaaacuuuuuugaaauaauaaaucugguagaaaaaugagaucuaaaaaaaaaaaaaaaaaaaaaaaaaaaaaaaaaaaaaaaaaaaaaaaaaaaaaaaaaaaaaaaaaaaaaaaaaaaaaaaaaaaaaaaaaaaaaaaaaaaa

SEQ ID NO: 20378 - RNA, 2073 nt, Artificial Sequence
  mRNA product Design b-4 (A100) comprising derived and/or modified sequence from LASV(LM765-SLE-2012;Clade IV)__AIT17815__SP-HsALB_NP(2-569) (opt5)
aggagagucccgcagucggcguccagcggcucugcuuguucgugugugugucguugcaggccuuauucaagcuuaccaugaagugggugaccuucaucagccugcucuuucuguucuccucugccuacagcagcgccuccaaggagaucaaaucuuuccuguggacccagagccucagacgggaacuguccggcuacugcucuaacauuaagcugcaaguggucaaagacgcucaggcccugcuccacgggcuggauuuuagcgagguuuccaaugugcagcgccuuaugagaaaggaacggcgcgacgauaacgaccugaaaagacuccgggaucugaaucaggcggugaacaaucuggucgagcucaagucuacacaacaaaagagcauccugcgcgugggaacgcuuaccuccgacgaucugcucauucuggcugccgaccuugaaaaacuuaagagcaaaguuacaagaaccgagcggccccucucugccggcguguauauggggaaccuguccagccagcagcuggaucagcgcagagcucuccuggacaugaucggaaugucuggcuccaaucagggggcccgggcuggacgcgauggcgucgugagaguuugggacgugaagaacgccgagcuucugaauaaccaguucggcacaaugccuagccucacccuggcgugucuuacaaaacaggggcaagucgaucugaaugacgccgugcaggcucucaccgaccugggacugauuuacacggccaaguauccgaacaccucugaucucgaccggcugacacagucccaucccauccuuaauaugaucgauaccaagaaaagcucccugaacauuucuggcuacaauuuuagccucggggcugccgugaaggcgggagccugcaugcuggacggcgggaacaugcuugaaacaaucaaagucuccccucaaaccauggauggcauucucaagagcauccugaaaguuaagaaagcucugggaauguucauuucugacgcccccggcgagcgcaacccuuaugaaaauauccuguacaagauuugucucuccggggauggauggcccuauaucgcuagcagaacgucuaucacaggccgggccugggagaacaccgugguggaccuggagagcgaugggaagccucagaaagccggauccaauggcucuaacaagagccuucaguccgcuggguuuacagcgggacugaccuacagccagcucaugacccugaaagacgccaugcugcaacuugauccgaaugcuaagacauggauggacauugaaggcagacccgaggacccugucgaaaucgcccucuaccagcccucuuccggcugcuauauucacuucuuucgcgagccuacggaucugaaacaguucaagcaggacgccaaguacagccaugggaucgaugugaccgaccuguuugcugcccaacccggacucacaucugcgguuauugaugcucugccgcggaacauggugaucaccugucagggcuccgacgauaucagaaaacuuuucgaaagccaggggcgcaaggacauuaaacugaucgauauugcccucuccaagacagacucucggaaauaugagaaugccgucugggaucaguacaaggaccugugccacaugcauaccggaaucgugguugagaagaaaaagagaggcgggaaagaagagauuacgccucacugugcucugauggauugcaucauguuugacgccgcugugagcggcggacuuaacacauccguccuccgcgccgugcugccccgggacauggucuucagaaccucuaccccucgcgugguucugugaggacuaguaauaaggaaacuguaugaaugucugugggcaggaagugaagagauccuucuguaaagguuuuuggaauuaugucugcugaauaauaaacuuuuuugaaauaauaaaucugguagaaaaaugagaucuaaaaaaaaaaaaaaaaaaaaaaaaaaaaaaaaaaaaaaaaaaaaaaaaaaaaaaaaaaaaaaaaaaaaaaaaaaaaaaaaaaaaaaaaaaaaaaaaaaaa

SEQ ID NO: 20379 - RNA, 2073 nt, Artificial Sequence
  mRNA product Design b-4 (A100) comprising derived and/or modified sequence from LASV(LM776-SLE-2012;Clade IV)__AIT17825__SP-HsALB_NP(2-569) (opt5)
aggagagucccgcagucggcguccagcggcucugcuuguucgugugugugucguugcaggccuuauucaagcuuaccaugaagugggugaccuucaucagccugcucuuucuguucuccucugccuacagcagcgccuccaaggagaucaaaucuuuccuguggacccagagccucagacgggaacuguccucuuacugcagcaacauuaaacuucaaguggucaaggacgcucaggcccugcuccacggccuggauuuuuccgagguuucuaaugugcagcgccuuaugagaaaggaacggcgcgacgauaacgaccugaaaagacuccgggaucugaaucaggcggugaacaaucuggucgagcucaagagcacacaacagaaguccauccugcgcguggggacgcuuaccagcgacgaucugcucauucuggcugccgaccuugaaaaacugaagucuaaaguuacaagaaccgagcggccccucuccgccggaguguauaugggcaaccugagcucucagcagcuggaucaacgcagagcucuccuguccaugaucgggaugagcggaucuaaucagggcgcccgggcugggcgcgacggagucgugagaguuugggaugugaagaacgccgagcuucugaauaaccaguucggcacaaugccuucccucacccuggcgugucuuacaaaacagggccaagucgaccugaaugaugccgugcaggcucucaccgaccuggggcugauuuacacggccaaguauccgaacaccagcgaccucgaucggcugacacagucccaucccauccuuaauaugaucgacaccaagaaaucuagccugaacauuuccggauacaauuuuagccucggcgcugccgugaaggcgggggccugcaugcuggauggaggcaacaugcuugaaacaaucaaagucucuccucaaaccauggacgggauucugaaguccauccucaaaguuaagaaagcucugggaauguucauuagcgauacgcccggcgagcgcaacccuuaugaaaauauccuguacaagauuugucucucuggcgacggguggcccuauaucgccagcagaacauccaucaccggacgggcuugggagaacacagugguggaucuggagucugacggcaagccucagaaagccgggagcaauaacuccaauaagagccuucagucugccggauuuaccgcuggccugaccuacucccagcucaugacacugaaagaugcgaugcugcaacuugacccgaacgccaagacguggauggauauugaagggagacccgaggacccugucgaaguggcucucuaccagcccagcucuggaugcuauauccacuucuuucgcgagccuaccgaccugaaacaguucaagcaggaugccaaguacucccauggcauugacguuacagaucuguuugccgcucaacccggccucaccagcgccgugaucgacgcgcugccgcggaauauggucauuacaugucagggguccgaugacaucagaaaacuucuggaaucucagggacgcaaggauaucaaacucauugacaucgcucugagcaagaccgauucccggaaauaugagaacgccgugugggaccaguacaaggaucugugccacaugcauacgggcguuguggucgagaagaaaaagagagggggaaaagaagagauuacaccucacugugcccuuauggacugcaucauguucgaugcugccgugucuggcgggcucaauaccagcguccugcgcgcugugcugccccgggacaugguuuuuagaaccuccacaccucgcgugguccucugaggacuaguaauaaggaaacuguaugaaugucugugggcaggaagugaagagauccuucuguaaagguuuuuggaauuaugucugcugaauaauaaacuuuuuugaaauaauaaaucugguagaaaaaugagaucuaaaaaaaaaaaaaaaaaaaaaaaaaaaaaaaaaaaaaaaaaaaaaaaaaaaaaaaaaaaaaaaaaaaaaaaaaaaaaaaaaaaaaaaaaaaaaaaaaaaa

SEQ ID NO: 20380 - RNA, 2073 nt, Artificial Sequence
  mRNA product Design b-4 (A100) comprising derived and/or modified sequence from LASV(Mad39;Clade IV)__ANH09723__SP-HsALB_NP(2-569) (opt5)
aggagagucccgcagucggcguccagcggcucugcuuguucgugugugugucguugcaggccuuauucaagcuuaccaugaagugggugaccuucaucagccugcucuuucuguucuccucugccuacagcagcgccuccaaggagaucaaaucuuuccuguggacccagagccucagacgggaacuguccggcuacugcucuaacauuaagcugcaaguggucaaagacgcucaggcccugcuccacgggcuggauuuuagcgagguuuccaaugugcagcgccuuaugagaaagcagcggcgcgacgauaacgaccugaaaagacuccgggaucugaaucaagcggugaacaaucuggucgaacucaagucuacacagcaaaagagcgugcugcgcguuggaacgcuuaccuccgacgaucugcucacacuggcugccgaccuugagaaacuuaagagcaaagugaccagaacagaacggccccucaccgccggcgucuauauggggaaccugucuucccagcagcuggaucagcgcagagcucuccugaauaugaucggaaugagcggcgggaaccagggagcccggacaggccgcgacggcgugguuagagugugggaugucaagaaugcugagcuucugaacaaucaguucgggaccaugccuucucucacgcuggccugucuuaccaaacaaggacagguggaccugaacgaugugguccaggcgcucacagaccugggccugauuuacaccgccaaguauccgaauacauccgaccucgaucggcugacccaaagccaucccauccuuaacaugauugacacgaauaagucuucccugaacaucagcggguacaacuuuucccucggagcugccguuaaagcuggcgccugcaugcuggaugggggaaauaugcuugagacaaucaaggugucuccucagaccauggacggcauucugaaaagcauccucaaggugaaaaagucccugggcauguucauuagcgauacacccggggaacgcaacccuuaugagaauauccuguacaaaauuugucucucuggagacggcuggcccuauaucgcguccagaaccagcauuaccgggcgggccugggaaaacacagucguggaucuggagucuggaggcaagccucagaaggcugggagcaauaacuccaauaaaucucuucagagcgccggauuugcugccggccugacguacucccaacucaugacccugaaggacgccaugcugcagcuugauccgaacgcuaaaacauggauggacaucgagggcagacccgaagauccuguugagaucgcgcucuaccagcccauuagcgggugcuauauccacuucuuucgcgaaccuaccgaccugaagcaguucaaacaagacgccaaguacucucauggaauugaugugacagaccuguuugcugcccagcccggccucaccuccgccgucaucgaggcucugccgcggaauauggugauuacgugucaggggagcgaugacaucagaaaacuuuucgaaucucagggacgcaaggauaucaagcugauugacaucgcccucuccaaaacagauagccggaaguaugagaacgcgguuugggaccaauacaaagaucugugccacaugcauaccggcguggucguggagaagaagaaaaagggcgggaaagaagagauuaccccucacugugcucugauggacugcaucauguuugaugccgccgucuccggaggccuuaauacacucgugcugagagcuguucugccccgcgacaugguguuccggaccucuacaccuaaggucgugcucugaggacuaguaauaaggaaacuguaugaaugucugugggcaggaagugaagagauccuucuguaaagguuuuuggaauuaugucugcugaauaauaaacuuuuuugaaauaauaaaucugguagaaaaaugagaucuaaaaaaaaaaaaaaaaaaaaaaaaaaaaaaaaaaaaaaaaaaaaaaaaaaaaaaaaaaaaaaaaaaaaaaaaaaaaaaaaaaaaaaaaaaaaaaaaaaaa

SEQ ID NO: 20381 - RNA, 2073 nt, Artificial Sequence
  mRNA product Design b-4 (A100) comprising derived and/or modified sequence from LASV(Z0947-SLE-2011;Clade IV)__AIT17841__SP-HsALB_NP(2-569) (opt5)
aggagagucccgcagucggcguccagcggcucugcuuguucgugugugugucguugcaggccuuauucaagcuuaccaugaagugggugaccuucaucagccugcucuuucuguucuccucugccuacagcagcgccuccaaggagaucaaaucuuuccuguggacccagagccucagacgggaacuguccggcuacugcucuaacauuaagcugcaaguggucaaagacgcucaggcccugcuccacgggcuggauuuuagcgagguuuccaaugugcagcgccuuaugagaaaggaacggcgcgacgauaacgaccugaaaagacuccgggaucugaaucaggcggugaacaaucuggucgagcucaagucuacacaacaaaagagcauccugcgcgugggaacgcuuaccuccgacgaucugcucauucuggcugccgaccuugaaaaacuuaagagcaaaguuacaagaaccgagcggccccucucugccggcguguauauggggaaccuguccagccagcagcuggaucagcgcagagcucuccugaauaugaucggaaugucuggcuccaaccagggggcccggacaggacgcgacggcgucgugagaguuugggaugugaagaaugcugagcuucugaacaaucaguucggcaccaugccuagccucacacuggccugucuuaccaaacaggggcaagucgaccugaacgaugcggugcaggcccucacggaccugggacugauuuacaccgcuaaguauccgaauacaucugaccucgaucggcugacccagucccaucccauccuuaacaugaucgacacaaagaaaagcucccugaauauuucuggcuacaacuuuagccucggggccgcugugaaggccggagcgugcaugcuggauggcgggaacaugcuugaaaccaucaaagucuccccucaaacgauggacggcauucucaagagcauccugaaaguuaagaaagcccugggaauguucauuucugaugcucccggcgagcgcaauccuuaugaaaacauccuguacaagauuugucucuccggggacggauggcccuauaucgccagcagaacaucuaucaccggccgggcuugggagaauacagugguggaucuggagagcgacgggaagccucagaaagccggauccaacggcucuaauaagagccuucaguccgccggguuuaccgcuggacugaccuacagccagcucaugacacugaaagaugcgaugcugcaacuugacccgaacgccaagacguggauggauauugaaggcagacccgaggacccugucgaaaucgcucucuaccagcccucuuccggcugcuauauucacuucuuucgcgagccuaccgaccugaaacaguucaagcaggaugccaaguacagccaugggaucgacgugacagaucuguuugccgcucaacccggacucaccucugccguuauugacgcgcugccgcggaauauggugaucacaugucagggcuccgaugacaucagaaaacuuuucgaaagccaggggcgcaaggauauuaaacugaucgacauugcucucuccaagaccgauucucggaaauaugagaacgccgucugggaccaguacaaggaucugugccacaugcauacgggaaucgugguugagaagaaaaagagaggcgggaaagaagagauuacaccucacugugcccugauggacugcaucauguuugaugcugccgugagcggcggacuuaauaccuccguccuccgcgcugugcugccccgggacauggucuucagaaccucuacaccucgcgugguucugugaggacuaguaauaaggaaacuguaugaaugucugugggcaggaagugaagagauccuucuguaaagguuuuuggaauuaugucugcugaauaauaaacuuuuuugaaauaauaaaucugguagaaaaaugagaucuaaaaaaaaaaaaaaaaaaaaaaaaaaaaaaaaaaaaaaaaaaaaaaaaaaaaaaaaaaaaaaaaaaaaaaaaaaaaaaaaaaaaaaaaaaaaaaaaaaaa

SEQ ID NO: 20382 - RNA, 1943 nt, Artificial Sequence
  mRNA product Design i-3 (hSL-A64-N5) comprising derived and/or modified sequence from LASV(Josiah;Clade IV)__NP_694869__SP-HsALB_NP(2-569) (opt1)
aggagaaagcuuaccaugaagugggugaccuucaucagccugcucuuccuguucuccagcgccuacuccagcgccuccaaggagaucaagagcuuccuguggacccagucccuccgccgggagcugagcggcuacugcuccaacaucaagcuccagguggucaaggacgcccaggcgcugcugcacgggcuggacuucagcgagguguccaacgugcagcgccucaugcggaaggagcgccgggacgacaacgaccugaagcgccugcgggaccucaaccaggccgucaacaaccugguggagcucaagagcacccagcagaaguccauccugcgcgugggcacccugaccagcgacgaccugcucauccuggccgccgaccuggagaagcucaaguccaaggucauccggaccgagcgcccccugagcgccgggguguacaugggcaaccuguccagccagcagcucgaccagcggcgcgcgcugcugaacaugaucgggauguccggcggcaaccagggggcccgggccggccgcgacggggugguccgggugugggacgugaagaacgccgagcuccugaacaaccaguucggcaccaugccgagccugacgcucgcgugccugaccaagcaggggcaggucgaccugaacgacgccgugcaggcccucaccgaccugggccugaucuacaccgccaaguaccccaacacguccgaccucgaccgccugacccagagccaccccauccugaacaugaucgacaccaagaaguccagccucaacaucagcggcuacaacuucucccugggggccgcggugaaggccggcgccugcaugcuggacgggggcaacaugcucgagaccaucaaggucagcccccagacgauggacggcauccugaaguccauccugaaggugaagaaggcccucgggauguucaucagcgacaccccgggcgagcggaaccccuacgagaacauccuguacaagaucugccuguccggggacggcuggcccuacaucgccagccgcaccuccaucaccgggcgggcgugggagaacacgguggucgaccucgagagcgacggcaagccccagaaggccgacuccaacaacagcuccaagagccugcaguccgccggcuucaccgccgggcugaccuacagccagcucaugacccugaaggacgccaugcugcagcuggacccgaacgcgaagacguggauggacaucgagggccgccccgaggaccccguggagaucgcccucuaccagcccuccagcgggugcuacauccacuucuuccgggagccgaccgaccugaagcaguucaagcaggacgccaaguacucccacggcaucgacgugaccgaccuguucgccacccagcccgggcucacgagcgccgucaucgacgcgcugccccgcaacauggugaucacgugccagggcuccgacgacauccgcaagcugcucgagagccagggccggaaggacaucaagcugaucgacaucgcccugagcaagaccgacucccgcaaguacgagaacgccgugugggaccaguacaaggaccucugccacaugcacaccggggucguggucgagaagaagaagcggggcgggaaggaggagaucaccccgcacugcgcccugauggacugcaucauguucgacgcggccgugagcggcgggcugaacaccuccgugcuccgcgccguccugccccgggacaugguguuccgcaccagcacgccccgggugguccugugaggacuaguuauaagacugacuagcccgaugggccucccaacgggcccuccuccccuccuugcaccgagauuaaucaaaggcucuuuucagagccaccaaaaaaaaaaaaaaaaaaaaaaaaaaaaaaaaaaaaaaaaaaaaaaaaaaaaaaaaaaaaaaaaagaauu

SEQ ID NO: 20383 - RNA, 1943 nt, Artificial Sequence
  mRNA product Design i-3 (hSL-A64-N5) comprising derived and/or modified sequence from LASV(LP;Clade I)__AAF86702__SP-HsALB_NP(2-569) (opt1)
aggagaaagcuuaccaugaagugggugaccuucaucagccugcucuuccuguucuccagcgccuacuccagcaacuccaaggagaucaagagcuuccuguggacccagucccuccgccgggagcugagcggcuacugcuccaacaucaagcuccagguggucaaggacgcccaggcccugcugcacgggcuggacuucagcgagguguccaacgugcagcgccucaugcggaagcagaagcgcgacgacgcggaccugaagcggcugcgcgaccucaaccaggccgucaacaaccugguggagcucaagagcacccagcagaagaacgugcugcgggucggcacgcuguccagcgacgaccugaucacccucgccgccgaccuggagaagcugaaguccaaggugauccgcaccgagcggccccucagcuccgggguguacaugggcaaccugagcucccagcagcuggaccagcgccgggcccuccugagcaugaucgggauguccggcggcccgcaggggaaccgcaccggcggggacggcgucgugcgggugugggacgucaagaacgcggagcugcucaacaaccaguucgggacgaugcccagccugacccuggccugccucaccaagcagggccagguggaccugaacgacgccgugcaggcccugaccgaccucggccugaucuacacggcgaaguaccccaacuccagcgaccuggacaugcucacccagagccaccccauccuggggauggucgacaccaagaaguccagccugaacaucuccggcuacaacuucagccucggggccgccgugaaggccggcgccugcaugcuggacggcgggaacaugcuggagaccaucaagguguccccgcagacgauggacggcauccucaagagcauccugaaggucaagcgcucccuggggauguucaucagcgacacccccggcgagcggaaccccuacgagaacauccucuacaagaucugccuguccggggagggcuggcccuacaucgcgagccgcaccuccaucaccggccgggccugggagaacacgcugguggaccucgagagcgacaacaagccgcccaagcugaacuccgccgggagcaacaagucccugcaggccgccggccucaacgcggggcugaccuacagccagcugaugacccugaaggacugcaugcuccagcuggaccccuccagcaagaccuggaucgacaucgagggccgccccgaggacccgguggagaucgcccuguuccagcccuccagcgggugcuacauccacuucuuccgggagcccacggaccucaagcaguucaagcaggacgccaaguacagccacggcaucgacgucaccgaccuguucuccacccagcccggccugaccagcgccgugaucgaggcccucccgcgcaacauggugcugacgugccagggguccgacgacaucaagaagcugcucgagagccagggccggcgcgacaucaagcugaucgacaucucccugagcaaggcggacucccgcaaguucgagaacgccgucugggaccaguacaaggaccucugccacaugcacaccgggguggucguggagaagaagaagcggggcgggaaggaggagaucacgccccacugcgcccugcuggacugcaucauguucgacgccgccaccaccggcagccucaacaucaccacccugcgcgcggugcugccccgggacauggucuuccgcaccuccacgcccaagguggugcucugaggacuaguuauaagacugacuagcccgaugggccucccaacgggcccuccuccccuccuugcaccgagauuaaucaaaggcucuuuucagagccaccaaaaaaaaaaaaaaaaaaaaaaaaaaaaaaaaaaaaaaaaaaaaaaaaaaaaaaaaaaaaaaaaagaauu

SEQ ID NO: 20384 - RNA, 1943 nt, Artificial Sequence
  mRNA product Design i-3 (hSL-A64-N5) comprising derived and/or modified sequence from LASV(803213;Clade II)__AAF86704__SP-HsALB_NP(2-569) (opt1)
aggagaaagcuuaccaugaagugggugaccuucaucagccugcucuuccuguucuccagcgccuacuccagcgccuccaaggaggugaaguccuuccuguggacccagagccuccgccgggagcugagcggcuacugcuccaacaucaagcugcaggucgugaaggacgcccaggcgcuccugcacgggcuggacuucagcgaggugaacaacguccagcgccucaugcggaagcagaagcgcgacgacggcgaccugaagcggcugcgcgaccucaaccaggccgugaacaaccugguggagcugaaguccacccagcagaaguccauccuccgggucgggacgcugaccagcgacgaccugcucacccuggccgccgaccuggagaagcucaagagcaaggugauccgcaccgagcggccccuguccagcggcguguacauggggaaccuguccacgcagcagcucgagcagcgccgggcccugcugaacaugaucggcauggucggcggggcgcagggcacccagccggggcgcgacggcguggugcgggucugggacgugaagaaccccgaccuccugaacaaccaguucgggaccaugcccagccugacccucgccugccugacgaagcagggccagguggaccugaacgacgccguccucgcccugaccgaccugggccucaucuacaccgcgaaguaccccaacuccagcgaccuggaccgccugucccagagccacccgauccucaacaugguggacaccaagaaguccagccugaacaucagcggguacaacuucucccugggcgccgccgugaaggccggggccugcaugcucgacggcggcaacaugcuggagacgaucaaggucacgccccagaccauggacgggauccucaagagcauccugaaggugaagcggucccugggcauguucgugagcgacacccccggggagcgcaaccccuacgagaacauccuguacaagaucugccucuccggcgacggguggccguacaucgcgagccggaccuccaucgucggccgcgccugggagaacaccaccguggaccuggagagcgacggcaagccccagaagguggggaccgccggcuccaacaagagccugcaguccgccggguuccccacgggccucaccuacagccagcugaugacccugaaggacuccaugaugcagcuggaccccagcgccaagaccuggaucgacaucgaggggcggccggaggaccccgucgagaucgcgcucuaccagcccauguccggcugcuacauccacuucuuccgcgagcccacggaccugaagcaguucaagcaggacgccaaguacagccacggcaucgacguggccgaccuguucccggcccagcccgggcucaccuccgccgucaucgaggcgcugccccggaacauggugcugaccugccagggcagcgacgacaucaagaagcuccuggacucccaggggcgccgcgacaucaagcugaucgacaucagccucagcaagguggacucccggaaguucgagaacgccgucugggaccagugcaaggaccugugccacaugcacaccggcgugguggucgagaagaagaagcgcgggggcaaggaggagaucacgccccacugcgcccugauggacugcaucauguucgacgccgccgugagcggcgggcucaacaucccggugcugcgggcgguccugccccgcgacaugguguuccggaccuccagccccaaggugguccucugaggacuaguuauaagacugacuagcccgaugggccucccaacgggcccuccuccccuccuugcaccgagauuaaucaaaggcucuuuucagagccaccaaaaaaaaaaaaaaaaaaaaaaaaaaaaaaaaaaaaaaaaaaaaaaaaaaaaaaaaaaaaaaaaagaauu

SEQ ID NO: 20385 - RNA, 1946 nt, Artificial Sequence
  mRNA product Design i-3 (hSL-A64-N5) comprising derived and/or modified sequence from LASV(GA391;Clade III)__CAA36646__SP-HsALB_NP(2-570) (opt1)
aggagaaagcuuaccaugaagugggugaccuucaucagccugcucuuccuguucuccagcgccuacuccagcgccuccaaggaggugcgcagcuuccuguggacccagucccuccggcgcgagcugagcggcuacugcuccaacaucaagcugcaggucgugaaggacgcccaggcgcuccugcacgggcuggacuucagcgagguguccaacguccagcggcucaugcgcaagcagaagcgggacgacggcgaccugaagcgccugcgggaccucaaccaggccgugaacaaccugguggagcucaagagcacccagcagaaguccguccugcgcguggggacccugagcuccgacgaccugcucauccuggccgccgaccuggagaagcucaagagcaaggugacccggaccgagcgcccccuguccagcggcgucuacauggggaaccuguccagccagcagcucgaccagcggcgcgcccugcugaacaugaucggcaugaccggcguguccgggggcgggaagggcgcgagcgacgggaucgugcgggucugggacgugaagaacgccgagcuccugaacaaccaguucggcacgaugccgucccugacccucgccugccugaccaagcagggccagguggaccugaacgacgccguccaggcgcucaccgaccuggggcugaucuacacggccaaguaccccaacagcagcgaccucgaccgccugucccagagccaccccauccugaacaugaucgacaccaagaaguccagccucaacaucuccggcuacaacuucagccugggggccgccgugaaggccggcgcgugcaugcuggacggcgggaacaugcucgagaccaucaaggugagcccccagaccauggacggcauccucaaguccauccugaaggucaagaagucccuggggauguucgugagcgacacgccgggcgagcggaaccccuacgagaacauccuguacaagaucugccuguccggggacggcuggcccuacaucgccagccgcaccuccaucgugggccgggccugggagaacaccgucguggaccucgagcaggacaacaagccccagaagaucgggaacggcgggagcaacaagucccugcagagcgccggcuucgccgcggggcugaccuacucccagcucaugacgcugaaggacuucaagugcuucaaccugaucccgaacgccaagaccuggauggacaucgagggccgccccgaggaccccguggagaucgcccuguaccagcccagcuccggcugcuacguccacuucuuccgggagccgaccgaccucaagcaguucaagcaggacgccaaguacagccacgggaucgacgugaccgaccuguucgccgcgcagcccggccugacgagcgccgucaucgaggcccucccccgcaacauggugaucacgugccagggguccgaggacauccggaagcugcuggagagccagggccgccgcgacaucaagcucaucgacaucacccuguccaaggccgacagccggaaguucgagaacgccgugugggaccaguucaaggaccugugccacaugcacaccggggucgugguggagaagaagaagcgcggcggcaaggaggagaucacgccccacugcgcgcucauggacugcaucauguucgacgccgccgucuccgggggccuggacgccaaggugcugcgggugguccucccgcgcgacaugguguuccggaccagcacccccaaggugguccugugaggacuaguuauaagacugacuagcccgaugggccucccaacgggcccuccuccccuccuugcaccgagauuaaucaaaggcucuuuucagagccaccaaaaaaaaaaaaaaaaaaaaaaaaaaaaaaaaaaaaaaaaaaaaaaaaaaaaaaaaaaaaaaaaagaauu

SEQ ID NO: 20386 - RNA, 1943 nt, Artificial Sequence
  mRNA product Design i-3 (hSL-A64-N5) comprising derived and/or modified sequence from LASV(AV;Clade V)__CCA30315__SP-HsALB_NP(2-569) (opt1)
aggagaaagcuuaccaugaagugggugaccuucaucagccugcucuuccuguucuccagcgccuacuccagcgccuccaaggaggugaaguccuuccuguggacccagagccuccgccgggagcugagcggcuacugcuccaacaucaagcugcaggucgugaaggacgcccaggcgcuccugcacgggcuggacuucagcgagguguccaacguccagcgccucaugcggaagcagcgccgggacgacagcgaccugaagcgccugcgggaccucaaccaggccgugaacaaccugguggagcugaaguccacccagcagaaguccguccuccgcgugggcacgcugagcagcgacgaccugcucacccuggccgccgaccuggagaagcucaaguccaaggugacccggaccgagcgcccccugagcuccggggucuacaugggcaaccugagcucccagcagcucgaccagcggcgcgcccugcugaaccucaucgggaugacgaacggcagccagggcucccaggcggggcgggacggcguggugcgcgucugggacgugaagaacgccgagcugcugaacaaccaguucgggaccaugccgagccucacccuggccugccugaccaagcagggccagguggaccucaacgacgucgugcaggcccugacggaccuggggcucaucuacaccgcgaaguaccccaacaccagcgaccuggaccggcugacccagucccaccccauccucaacaugaucgacacgaagaaguccagccugaacaucagcggcuacaacuucucccugggcgccgccgugaaggccggggccugcaugcucgacggcgggaacaugcuggagaccaucaaggucagcccccaguccauggacggcauccucaagagcauccugaaggugaagcgcgcgcugggcauguucguguccgacaccccgggggagcggaaccccuacgagaacauccuguacaagaucugccucagcggcgacggguggcccuacaucgccucccgcaccagcaucgucggccgggccugggagaacacggugguggaccuggagaccgacgggaagccccagaagaucggcuccggcaacagcaacaagucccugcagagcgccggguucuccgccggccucaccuacagccagcugaugacccugaaggacgcgaugcugcagcucgacccgaacgccaagacguggauggacaucgaggggcgccccgaggaccccgucgagguggcccuguaccagcccaucuccggcugcuacauccacuucuuccgggagccgaccgaccugaagcaguucaagcaggacgccaaguacagccacgggaucgacaucgccgaccucuucgcggcccagcccggccugaccagcgccgucaucgaggcccugccccgcaacauggugaucacgugccagggcuccgaggacaucaagaagcuccuggagagccaggggcgcaaggacaucaagcugaucgacaucgcccucuccaagaucgacagccggaaguucgagaacgcggugugggaccaguacaaggaccugugccacaugcacaccggcgucgugguggagaagaagaagcgcgggggcaaggaggagaucaccccgcacugcgcccugauggacugcaucauguucgacgccgccgucuccgggggccucaacacccuggugcugcgggcggugcucccccgcgacauggucuuccggaccagcacgccccgcguggugcugugaggacuaguuauaagacugacuagcccgaugggccucccaacgggcccuccuccccuccuugcaccgagauuaaucaaaggcucuuuucagagccaccaaaaaaaaaaaaaaaaaaaaaaaaaaaaaaaaaaaaaaaaaaaaaaaaaaaaaaaaaaaaaaaaagaauu

SEQ ID NO: 20387 - RNA, 1943 nt, Artificial Sequence
  mRNA product Design i-3 (hSL-A64-N5) comprising derived and/or modified sequence from LASV(Togo/2016/7082;Clade VI)__AMR44578__SP-HsALB_NP(2-569) (opt1)
aggagaaagcuuaccaugaagugggugaccuucaucagccugcucuuccuguucuccagcgccuacuccagcaacuccaaggaggugaaguccuuccuguggacccagagccuccgccgggagcugagcggcuacugcuccaacaucaagcugcaggucgugaaggacgcccaggcccuccugcacgggcuggacuucagcgagguguccaacguccagcgccucaugcggaagcagaagcgcgacgacggcgaccugaagcggcugcgcgaccucaaccaggcggugaacaaccugguggagcucaagagcguccagcagaaguccauccugcggguggggacccugaccagcgacgaccugcucacccuggccgccgaccuggagaagcucaaguccaaggugacccgcaccgagcggccccugagcuccggcgucuacauggggaaccugagcucccagcagcucgaccagcgccgggcccugcugagcaugaucggcauguccggcgggaaccagaacagccagccgaagggcgacgggguggugcgcgucugggacgugaagaacgccgaccuccugaacaaccaguucggcacgaugcccucccugacccucgcgugccugaccaagcagggccagguggaccugaacgacgccguccaggcccucaccgaccuggggcugaucuacacggccaaguaccccaacagcagcgaccucgaccggcugucccagagccaccccauccugaacaugaucgacaccaagaaguccagccucaacaucuccggcuacaacuucagccugggggcggccaucaagaccggcgccugcaugcuggacgggggcaacaugcucgagaccaucaaggugacgccgcagaccauggacggcauccugaaguccauccugaaggugaagcgcagccucgggauguucaucuccgacacccccggcgagcggaaccccuacgagaacauccuguacaagaucugccugagcggggacggcuggcccuacaucgccucccgcaccgccaucaucgggcgggcgugggagaacacggucguggaccucgagagcgacuccaagccgcagaagaucggcagcaacggcuccaacaagagccugcaguccgccggguucgcccccggccugaccuacagccagcucaugacccugaaggacuccaugcugcagcuggaccccaacgccaagaccuggaucgacaucgaggggcgccccgaggacccgguggaggucgcccucuuccagcccaucagcggcugcuacauccacuucuuccgggagcccacggaccugaagcaguucaagcaggacgcgaaguacagccacgggaucgacgugaccgaccuguucgccgcccagcccggccucaccuccgccgugaucgaggcccugccgcgcaacaugguccugaccugccagggcagcgacgacaucaagaagcuccuggacucccaggggcggcgcgacaucaagcugaucgacgugagccucaacaagaucgacucccgcaaguucgagaacgcggucugggaccaguacaaggaccugugccacaugcacacgggcgugguggucgagaagaagaagaagggcgggaaggaggagaucacgccccacugcgcccugcucgacugcaucauguucgacgccgccgugagcgggggccugaacgccaccgugcugcgggcgguccucccccgcgacaugguguuccggaccuccagccccaaggugguccugugaggacuaguuauaagacugacuagcccgaugggccucccaacgggcccuccuccccuccuugcaccgagauuaaucaaaggcucuuuucagagccaccaaaaaaaaaaaaaaaaaaaaaaaaaaaaaaaaaaaaaaaaaaaaaaaaaaaaaaaaaaaaaaaaagaauu

SEQ ID NO: 20388 - RNA, 1943 nt, Artificial Sequence
  mRNA product Design i-3 (hSL-A64-N5) comprising derived and/or modified sequence from LASV(KAK-428;Clade n.d. (VII))__ANH09741__SP-HsALB_NP(2-569) (opt1)
aggagaaagcuuaccaugaagugggugaccuucaucagccugcucuuccuguucuccagcgccuacuccagcaacuccaaggaggugaaguccuuccuguggacccagagccuccgccgggagcugagcggcuacugcaccaacaucaagcugcaggucgugaaggacgcccaggcccuccugcacgggcuggacuucuccgaggugagcaacguccagcgccucaugcggaagcagaagcgcgacgacaacgaccugaagcggcugcgcgaccucaaccaggcggugaacaaccugguggagcugaaguccguccagcagaaguccgugcucaaggugggcacgcugaacagcgacgaccugcucacccuggccgccgaccuggagaagcucaagagcaaggucgugcggaccgagcgcccccuguccagcgggguguacaugggcaaccuguccagccagcagcucgaccagcggcgcgcccugcugaacaugaucgggauggccggcggcucccaggggaaccagccgagccgggacggcgucgugcgcgugugggacgucaagaacgcggaccuccugaacaaccaguucgggaccaugcccucccugacgcucgccugccugaccaagcagggccagguggaccugaacgacgugguccucgcccugaccgaccuggggcucaucuacaccgccaaguaccccaacagcuccgaccuggaccggcugagccagaaccaccccgugcucaacaugaucgacgugaacaagagcucccugaacaucagcggcuacaacuucucccugggcgcggccgucaaggccggggccugcaugcucgacggcgggaacaugcuggagacgaucaagaucagcccgcagaccguggacggcauccugaaguccauccucaaggugaagcgcgcccugggcauguucgucagcgacacccccggggagcggaaccccuacgagaacauccuguacaaggugugccucuccggcaacggguggcccuacaucgcgagccgcaccuccaucgucggccgggccugggagaacacggugguggaccuggagagcaacaagaaccagccgaaggucgggaacaacggcuccaacaagaugcugcagagcuccggcuucgccaccgggcucaccuacagccagcugaugacccugcgcgacuccaugcugcagcucgaccccacggccaagaccuggaucgacaucgagggccggcccgaggaccccguggagcuggcccuguuccagccgagcuccgggugcuacauccacuucuuccgcgagcccaccgaccucaagcaguucaagcaggacgcgaaguacagccacggcaucgacgugaacgaccuguucuccgcccagcccgggcugaccagcgccguccucgaggcccugccccggaacauggugcugacgugccagggcagcgacgacauccgcaagcuccuggacucccaggaccgcaaggacaucaagcugaucgacaucagccucuccaaggccgacgcgcggaaguucgagaacgacgugugggaccaguucaaggaccugugccacaugcacaccggcaucgucguggagaagaagaagaagggcgggaagcaggagaugaccccgcacugcgcccugcucgacugcaucauguucgacgccgccgugagcgggggccugaacguccccacccugcgcgccgugcuccccacggacaugguguuccggaccaucaccaccaaggucgugcugugaggacuaguuauaagacugacuagcccgaugggccucccaacgggcccuccuccccuccuugcaccgagauuaaucaaaggcucuuuucagagccaccaaaaaaaaaaaaaaaaaaaaaaaaaaaaaaaaaaaaaaaaaaaaaaaaaaaaaaaaaaaaaaaaagaauu

SEQ ID NO: 20389 - RNA, 1943 nt, Artificial Sequence; identical to SEQ ID NO: 20383
  mRNA product Design i-3 (hSL-A64-N5) comprising derived and/or modified sequence from LASV(Pinneo-NIG-1969;Clade I)__AIT17837__SP-HsALB_NP(2-569) (opt1)

SEQ ID NO: 20390 - RNA, 1943 nt, Artificial Sequence
  mRNA product Design i-3 (hSL-A64-N5) comprising derived and/or modified sequence from LASV(ISTH0009-NIG-2011;Clade II)__AIT17405__SP-HsALB_NP(2-569) (opt1)
aggagaaagcuuaccaugaagugggugaccuucaucagccugcucuuccuguucuccagcgccuacuccagcguguccaaggaggucaagagcuuccuguggacccagucccuccgccgggagcugagcggcuacugcuccaacaucaagcuccagguggugaaggacgcccaggcccugcugcacgggcuggacuucagcgaggucuccaacgugcagcgccucaugcggaagcagaagcgcgacgacagcgaccugaagcggcugcgcgaccucaaccaggcggugaacaaccuggucgagcugaaguccacccagcagaaguccauccuccgggugggcacccugaccagcgacgaccugcucacccuggccgccgaccuggagaagcucaagagcaaggugauccgcaccgagcggccccuguccagcggggucuacaugggcaaccuguccacgcagcagcucgagcagcgccgggcccugcugaacaugaucgggauggugggcggcgcccaggggacccagccgggccgcgacggggugguccgggugugggacgugaagaaccccgaccuccugaacaaccaguucggcaccaugcccagccugacccucgcgugccugacgaagcaggggcaggucgaccugaacgacgccgugcucgcccugaccgaccugggccucaucuacaccgccaaguaccccaacuccagcgaccuggaccgccugucccagagccacccgauccucaacaugguggacaucaagaaguccagccugaacaucagcggcuacaacuucucccugggggcggccgucaaggccggcgccugcaugcucgacgggggcaacaugcuggagaccaucaaggugacgccccagaccauggacggcauccucaagagcauccugaaggugaagcggucccuggggauguucgucagcgacacccccggcgagcgcaaccccuacgagaacauccuguacaagaucugccucuccggggacggcuggccguacaucgccagccggaccuccaucguggggcgcgcgugggagaacacgaccguggaccuggagagcgacggcaagccccagaaggucggcuccgccgggagcaacaagucccugcagagcgccggcuuccccaccgggcucaccuacucccagcugaugacgcugaaggacagcaugaugcagcuggaccccuccgccaagaccuggaucgacaucgagggccggccggaggaccccguggagaucgcccucuaccagcccaugagcgggugcuacauccacuucuuccgcgagcccaccgaccugaagcaguucaagcaggacgcgaaguacucccacggcaucgacgucgccgaccuguucccggcccagcccggccucaccagcgccgugaucgaggcccugccccggaacauggugcugacgugccaggggagcgacgacaucaagcgccuccuggacucccagggccgccgggacaucaagcugaucgacaucgcgcucagcaaggccgacucccgccgguucgagaacgccgucugggaccagugcaaggaccugugccacaugcacaccggggugguggucgagaagaagaagcgcggcgggaaggaggagaucacgccccacugcgcccugauggacugcaucauguacgacgccgcggugagcggcggccucaacaucccggugcugcgggccguccugccccgcgacaugguguuccggaccuccagccccaaggugguccucugaggacuaguuauaagacugacuagcccgaugggccucccaacgggcccuccuccccuccuugcaccgagauuaaucaaaggcucuuuucagagccaccaaaaaaaaaaaaaaaaaaaaaaaaaaaaaaaaaaaaaaaaaaaaaaaaaaaaaaaaaaaaaaaaagaauu

SEQ ID NO: 20391 - RNA, 1943 nt, Artificial Sequence
  mRNA product Design i-3 (hSL-A64-N5) comprising derived and/or modified sequence from LASV(ISTH2010-NIG-2012;Clade II)__AIT17483__SP-HsALB_NP(2-569) (opt1)
aggagaaagcuuaccaugaagugggugaccuucaucagccugcucuuccuguucuccagcgccuacuccagcgccuccaaggaggugaaguccuuccuguggacccagagccuccgccgggagcugagcggcuacugcuccaacaucaagcugcaggucgugaaggacgcccaggcgcuccugcacgggcuggacuucagcgagguguccaacguccagcgccucaugcggaagcagaagcgcgacgacagcgaccugaagcggcugcgcgaccucaaccaggccgugaacaaccugguggagcugaaguccacccagcagaaguccauccuccgggucggcacgcugaccagcgacgaccugcucacccuggccgccgaccuggagaagcucaagagcaaggugauccgcaccgagcggccccuguccagcgggguguacaugggcaaccuguccacgcagcagcucgagcagcgccgggcccugcugaaccucaucgggauggucggcggcgcgcaggggacccagccgggccgcgacgggguggugcgggucugggacgugaagaaccccgaccugcugaacaaccaguucggcaccaugcccagccucacccuggccugccugacgaagcagggccagguggaccucaacgacgccguccuggcccugaccgaccucgggcugaucuacaccgcgaaguaccccaacuccagcgaccuggaccgccucucccagagccacccgauccugaacaugguggacaccaagaaguccagccugaacaucagcggcuucaacuucucccucggggccgccgugaaggccggcgccugcaugcuggacgggggcaacaugcuggagacgaucaaggucacgccccagaccauggacggcauccucaagagcauccugaaggugaagaagucccuggggauguucgugagcgacacccccggcgagcggaaccccuacgagaacauccucuacaagaucugccuguccggggacggcuggccguacaucgcgagccgcaccuccaucgucgggcgggccugggagaacaccaccguggaccuggagagcgacggcaagccccacaaggugggcaccgccggguccaacaagagccuccaguccgccggcuuccccacggggcugaccuacagccagcugaugacccugaaggacuccaugaugcagcucgaccccagcgccaagaccuggaucgacaucgagggccgcccggaggaccccgucgagaucgcgcuguaccagcccauguccgggugcuacauccacuucuuccgggagcccacggaccugaagcaguucaagcaggacgccaaguacagccacggcaucgacguggccgaccucuucccggcccagcccggccugaccuccgccgucaucgaggcgcugccccgcaacauggugcugaccugccaggggagcgacgacaucaagcggcuccuggacagccagggccgccgcgacaucaagcucaucgacaucgcccuguccaaggccgacagccggcgcuucgagaacgccgugugggaccagugcaaggaccugugccacaugcacaccggggucgugguggagaagaagaagcggggcgggaaggaggagaucacgccccacugcgcccucauggacugcaucauguacgacgcggccgucuccggcggccugaacaucccggugcugcgcgccgugcucccccgggacauggucuuccgcaccagcucccccaagguggugcugugaggacuaguuauaagacugacuagcccgaugggccucccaacgggcccuccuccccuccuugcaccgagauuaaucaaaggcucuuuucagagccaccaaaaaaaaaaaaaaaaaaaaaaaaaaaaaaaaaaaaaaaaaaaaaaaaaaaaaaaaaaaaaaaaagaauu

SEQ ID NO: 20392 - RNA, 1943 nt, Artificial Sequence
  mRNA product Design i-3 (hSL-A64-N5) comprising derived and/or modified sequence from LASV(Lassa virus/H.sapiens-wt/NGA/2015/ISTH_0543;Clade II)__AVO03640__SP-HsALB_NP(2-569) (opt1)
aggagaaagcuuaccaugaagugggugaccuucaucagccugcucuuccuguucuccagcgccuacuccagcgccuccaaggaggugaaguccuuccuguggacccagagccuccgccgggagcugagcggcuacugcuccaacaucaagcugcaggucgugaaggacgcccaggcgcuccugcacgggcuggacuucagcgagguguccaacguccagcgccucaugcggaagcagaagcgcgacgacagcgaccugaagcggcugcgcgaccucaaccaggccgugaacaaccugguggagcugaaguccacccagcagaaguccauccuccgggucggcacgcugaccagcgacgaccugcucacccuggccgccgaccuggagaagcucaagagcaaggugauccgcaccgagcggccccuguccagcgggguguacaugggcaaccuguccacgcagcagcucgagcagcgccgggcccugcugaacaugaucgggauggucggcggcgcgcaggggacccagccgggccgcgacgggguggugcgggucugggacgugaagaaccccgaccuccugaacaaccaguucggcaccaugcccagccugacccucgccugccugacgaagcagggccagguggaccugaacgacgccguccucgcccugaccgaccuggggcucaucuacaccgcgaaguaccccaacuccagcgaccuggaccgccugucccagagccacccgauccucaacaugguggacaccaagaaguccagccugaacaucagcggcuacaacuucucccugggggccgccgugaaggccggcgccugcaugcucgacgggggcaacaugcuggagacgaucaaggucacgccccagaccauggacggcauccucaagagcauccugaaggugaagaagucccuggggauguucgugagcgacacccccggcgagcggaaccccuacgagaacauccuguacaagaucugccucuccggggacggcuggccguacaucgcgagccgcaccuccaucgucgggcgggccugggagaacaccaccguggaccuggagagcgacggcaagccccagaaggugggcuccgccgggagcaacaagucccugcagagcgccggcuuccccaccgggcucacguacucccagcugaugacccugaaggacagcaugaugcagcuggaccccuccgccaagaccuggaucgacaucgagggccgcccggaggaccccgucgagaucgcgcucuaccagcccaugagcgggugcuacauccacuucuuccgggagcccaccgaccugaagcaguucaagcaggacgccaaguacucccacggcaucgacguggccgaccuguucccggcccagcccggccucacgagcgccgucaucgaggcgcugccccgcaacauggugcugaccugccaggggagcgacgacaucaagcggcuccuggacucccagggccgcaaggacaucaagcugaucgacaucgcccucagcaaggccgacucccgccgguucgagaacgccgugugggaccagugcaaggaccugugccacaugcacaccggggucgugguggagaagaagaagcgcggcgggaaggaggagaucacgccccacugcgcccugauggacugcaucauguacgacgcggccgucagcggcggccucaacaucccggugcugcgggccgugcugccccgcgacauggucuuccggaccuccagccccaagguggugcucugaggacuaguuauaagacugacuagcccgaugggccucccaacgggcccuccuccccuccuugcaccgagauuaaucaaaggcucuuuucagagccaccaaaaaaaaaaaaaaaaaaaaaaaaaaaaaaaaaaaaaaaaaaaaaaaaaaaaaaaaaaaaaaaaagaauu

SEQ ID NO: 20393 - RNA, 1943 nt, Artificial Sequence
  mRNA product Design i-3 (hSL-A64-N5) comprising derived and/or modified sequence from LASV(Lassa virus/H.sapiens-wt/NGA/2016/ISTH_0009;Clade II)__AVO03572__SP-HsALB_NP(2-569) (opt1)
aggagaaagcuuaccaugaagugggugaccuucaucagccugcucuuccuguucuccagcgccuacuccagcgccuccaaggaggugaaguccuuccuguggacccagagccuccgccgggagcugagcggcuacugcuccaacaucaagcugcaggucgugaaggacgcccaggcgcuccugcacgggcuggacuucagcgagguguccaacguccagcgccucaugcggaagcagaagcgcgacgacagcgaccugaagcggcugcgcgaccucaaccaggccgugaacaaccugguggagcugaaguccacccagcagaaguccauccuccgggucggcacgcugaccagcgacgaccugcucacccuggccgccgaccuggagaagcucaagagcaaggugauccgcaccgagcggccccuguccagcgggguguacaugggcaaccuguccacgcagcagcucgagcagcgccgggcccugcugaacaugaucgggauggucggcggcgcgcaggggacccagccgggccgcgacgggguggugcgggucugggacgugaagaaccccgaccuccugaacaaccaguucggcaccaugcccagccugacccucgccugccugacgaagcagggccagguggaccugaacgacgccguccucgcccugaccgaccuggggcucaucuacaccgcgaaguaccccaacuccagcgaccuggaccgccugucccagagccacccgauccucaacaugguggacaccaagaaguccagccugaacaucagcggcuacaacuucucccugggggccgccgugaaggccggcgccugcaugcucgacgggggcaacaugcuggagacgaucaaggucacgccccagaccauggacggcauccucaagagcauccugaaggugaagaagucccuggggauguucgugagcgacacccccggcgagcggaaccccuacgagaacauccuguacaagaucugccucuccggggacggcuggccguacaucgcgagccgcaccuccaucgucgggcgggccugggagaacaccaccguggaccuggagagcgacggcaagccccagaaggugggcuccgccgggagcaacaagucccugcagagcgccggcuuccccaccgggcucacguacucccagcugaugacccugaaggacagcaugaugcagcuggaccccuccgccaagaccuggaucgacaucgagggccgcccggaggaccccgucgagaucgcgcucuaccagcccaugagcgggugcuacauccacuucuuccgggagcccaccgaccugaagcaguucaagcaggacgccaaguacucccacggcaucgacguggccgaccuguucccggcccagcccggccucacgagcgccgucaucgaggcgcugccccgcaacauggugcugaccugccaggggagcgacgacaucaagcggcuccuggacucccagggccgccgcgacaucaagcugaucgacaucgcccucagcaaggccgacucccggcgcuucgagaacgccgugugggaccagugcaaggaccugugccacaugcacaccggggucgugguggagaagaagaagcggggcgggaaggaggagaucacgccccacugcgcccugauggacugcaucauguacgacgcggccgucagcggcggccucaacaucccggugcugcgcgccgugcugccccgggacauggucuuccgcaccuccagccccaagguggugcucugaggacuaguuauaagacugacuagcccgaugggccucccaacgggcccuccuccccuccuugcaccgagauuaaucaaaggcucuuuucagagccaccaaaaaaaaaaaaaaaaaaaaaaaaaaaaaaaaaaaaaaaaaaaaaaaaaaaaaaaaaaaaaaaaagaauu

SEQ ID NO: 20394 - RNA, 1943 nt, Artificial Sequence
  mRNA product Design i-3 (hSL-A64-N5) comprising derived and/or modified sequence from LASV(Lassa virus/H.sapiens-wt/NGA/2016/ISTH_0017;Clade II)__AVO03568__SP-HsALB_NP(2-569) (opt1)
aggagaaagcuuaccaugaagugggugaccuucaucagccugcucuuccuguucuccagcgccuacuccagcgccuccaaggaggugaaguccuuccuguggacccagagccuccgccgggagcugagcggcuacugcuccagcaucaagcugcaggucgugaaggacgcccaggcgcuccugcacgggcuggacuucuccgaggugagcaacguccagcgccucaugcggaagcagaagcgcgacgacuccgaccugaagcggcugcgcgaccucaaccaggccgugaacaaccugguggagcucaagagcacccagcagaaguccauccugcgggucggcacgcugaccagcgacgaccugcucacccuggccgccgaccuggagaagcucaaguccaaggugauccgcaccgagcggccccugagcuccgggguguacaugggcaaccugagcacgcagcagcucgagcagcgccgggcccugcugaacaugaucgggauggcgggcggcgcccaggggacccagccgggccgcgacggggucgugcgggugugggacgucaagaaccccgaccuccugaacaaccaguucggcaccaugcccucccugacccucgccugccugacgaagcagggccagguggaccugaacgacgccgugcucgcgcugaccgaccuggggcucaucuacaccgccaaguaccccaacagcuccgaccuggaccgccugagccagagccacccgauccucaacauggucgacaccaagaaguccagccugaacaucuccggcuacaacuucagccugggggccgccgugaaggccggcgcgugcaugcucgacgggggcaacaugcuggagacgaucaaggugacgccccagaccauggacggcauccugaaguccauccucaaggucaagcggagccuggggauguucguguccgacgcccccggcgagcgcaaccccuacgagaacauccuguacaagaucugccucagcggggacggcuggccguacaucgccucccggaccagcaucguggggcgcgccugggagaacaccaccgucgaccuggaguccgacggcaagccccagaaggugggcgccaccgggagcaacaagucccugcagagcgcgggcuuccccaccgggcucacguacucccagcugaugacccugaaggacagcaugaugcagcuggaccccuccgccaagaccuggaucgacaucgagggccggccggaggaccccguggaggucgcccucuaccagcccgugagcgggugcuacauccacuucuuccgcgagcccaccgaccugaagcaguucaagcaggacgccaaguacucccacggcaucgacgucgccgaccuguucccggcgcagcccggccucacgagcgccgugaucgaggcccugccccggaacauggugcugaccugccaggggagcgacgacaucaagaagcuccuggacucccagggccgcaaggacaucaagcugaucgacaucgcccucagcaaggccgacucccgccgguucgagaacgcggucugggaccagugcaaggaccugugccacaugcacaccggggugguggucgagaagaagaagcgcggcgggaaggaggagaucacgccccacugcgcccugauggacugcaucauguacgacgccgccgugagcggcggccucaacaucccggugcugcgggcgguccugccccgcgacaugguguuccggaccuccagccccaaggugguccucugaggacuaguuauaagacugacuagcccgaugggccucccaacgggcccuccuccccuccuugcaccgagauuaaucaaaggcucuuuucagagccaccaaaaaaaaaaaaaaaaaaaaaaaaaaaaaaaaaaaaaaaaaaaaaaaaaaaaaaaaaaaaaaaaagaauu

SEQ ID NO: 20395 - RNA, 1943 nt, Artificial Sequence
  mRNA product Design i-3 (hSL-A64-N5) comprising derived and/or modified sequence from LASV(Lassa virus/H.sapiens-wt/NGA/2018/ISTH_0959;Clade II)__AVV65100__SP-HsALB_NP(2-569) (opt1)
aggagaaagcuuaccaugaagugggugaccuucaucagccugcucuuccuguucuccagcgccuacuccagcgccuccaaggaggugaaguccuuccuguggacccagagccuccgccgggagcugagcggcuacugcuccaacaucaagcugcaggucgugaaggacgcccaggcgcuccugcacgggcuggacuucagcgagguguccaacguccagcgccucaugcggaagcagaagcgcgacgacagcgaccugaagcggcugcgcgaccucaaccaggccgugaacaaccugguggagcugaaguccacccagcagaaguccauccuccgggucggcacccugaccagcgacgaccugcucacccuggccgccgaccuggagaagcucaagagcaaggugauccgcaccgagcggccccuguccagcgggguguacaugggcaaccuguccacgcagcagcucgagcagcgccgggcccugcugaaccucaucgggauggucggcggcgcgcaggggacccagccgggccgcgacgggguggugcgggucugggacgugaagaaccccgaccugcugaacaaccaguucggcaccaugcccagccucacccuggccugccugacgaagcagggccagguggaccucaacgacgucgugcuggcccugaccgaccucgggcugaucuacaccgccaaguaccccaacuccagcgaccuggaccgccucucccagagccacccgauccugaacaugguggacaccaagaaguccagccugaacaucagcggcuucaacuucucccucggggcggccgucaaggccggcgccugcaugcuggacgggggcaacaugcuggagacgaucaaggugacgccccagaccauggacggcauccucaagagcauccugaaggugaagaagucccuggggauguucgucagcgacacccccggcgagcggaaccccuacgagaacauccucuacaagaucugccuguccggggacggcuggccguacaucgccagccgcaccuccaucguggggcgggcgugggagaacaccaccguggaccuggagagcgacggcaagccccacaaggucggcaccgccggguccaacaagagccuccaguccgccggcuuccccacggggcugaccuacagccagcugaugacccugaaggacuccaugaugcagcucgaccccagcgccaagaccuggaucgacaucgagggccgcccggaggaccccguggagaucgcccuguaccagcccauguccgggugcuacauccacuucuuccgggagcccacggaccugaagcaguucaagcaggacgcgaaguacagccacggcaucgacgucgccgaccucuucccggcccagcccggccugaccuccgccgugaucgaggcccugccccgcaacauggugcugaccugccaggggagcgacgacaucaagcggcuccuggacagccagggccgcaaggacaucaagcucaucgacaucgcgcuguccaagaccgacagccgccgguucgagaacgccgucugggaccagugcaaggaccugugccacaugcacacgggggugguggucgagaagaagaagcgcggcgggaaggaggagaucacgccccacugcgcccucauggacugcaucauguacgacgccgccguguccggcggccugaacaucccggugcugcgggcgguccucccccgcgacaugguguuccggaccagcucccccaaggugguccugugaggacuaguuauaagacugacuagcccgaugggccucccaacgggcccuccuccccuccuugcaccgagauuaaucaaaggcucuuuucagagccaccaaaaaaaaaaaaaaaaaaaaaaaaaaaaaaaaaaaaaaaaaaaaaaaaaaaaaaaaaaaaaaaaagaauu

SEQ ID NO: 20396 - RNA, 1943 nt, Artificial Sequence
  mRNA product Design i-3 (hSL-A64-N5) comprising derived and/or modified sequence from LASV(LASV003-NIG-2008;Clade II)__AIT17581__SP-HsALB_NP(2-569) (opt1)
aggagaaagcuuaccaugaagugggugaccuucaucagccugcucuuccuguucuccagcgccuacuccagcgccuccaaggaggugaaguccuuccuguggacccagagccuccgccgggagcugagcggcuacugcuccagcaucaagcugcaggucgugaaggacgcccaggcgcuccugcacgggcuggacuucuccgaggugagcaacguccagcgccucaugcggaagcagaagcgcgacgacuccgaccugaagcggcugcgcgaccucaaccaggccgugaacaaccugguggagcucaagagcacccagcagaaguccguccugcgggugggcacccugaccagcgacgaccugcucacccuggccgccgaccuggagaagcucaaguccaaggugauccgcaccgagcggccccugagcuccggggucuacaugggcaaccugagcgcccagcagcucgagcagcgccggacgcugcugaacaugaucgggauggugggcggcgcgcaggggacccagccgggccgcgacggggugguccgggugugggacgugaagaaccccgaccuccugaacaaccaguucggcaccaugcccucccugacccucgccugccugacgaagcaggggcaggucgaccugaacgacguggugcucgcccugaccgaccugggccucaucuacaccgccaaguaccccaacagcuccgaccuggaccgccugagccagagccacccgauccucuccauggucgacaccaagaaguccagccugaacaucagcggcuacaacuucucccugggggcggccgugaaggccggcgccugcaugcucgacgggggcaacaugcuggagacgaucaaggugacgccccagaccauggacggcauccucaagagcauccugaaggucaagaagucccuggggauguucgugagcgacacccccggcgagcggaaccccuacgagaacauccuguacaagaucugccucuccggggacggcuggccguacaucgccagccgcaccuccaucguggggcgggcgugggagaacaccaccgucgaccuggagagcgacggcaagccccagaaggugggcaccgccggguccaacaagagccugcaguccgccggcuuccccacggggcucaccuacagccagcugaugacccugaaggacuccaugaugcagcuggaccccagcgccaagaccuggaucgacaucgagggccgcccggaggaccccgucgagaucgcccucuaccagcccauguccgggugcuacauccacuucuuccgggagcccacggaccugaagcaguucaagcaggacgcgaaguacagccacggcaucgacgugaccgaccuguucccggcccagcccggccucaccagcgccgugaucgaggcccugccccgcaacaugguccugaccugccagggguccgacgacaucaagcggcuccuggacagccagggccgccgcgacaucaagcugaucgacaucgcccucuccaaggcggacagccggcgcuucgagaacgccgugugggaccagugcaaggaccugugccacaugcacacggggguggucguggagaagaagaagcggggcgggaaggaggagaucacgccccacugcgcccugauggacugcaucauguacgacgccgccguguccggcggccucaacaucccgguccugcgcgcggugcugccccgggacaugguguuccgcaccagcucccccaaggucgugcucugaggacuaguuauaagacugacuagcccgaugggccucccaacgggcccuccuccccuccuugcaccgagauuaaucaaaggcucuuuucagagccaccaaaaaaaaaaaaaaaaaaaaaaaaaaaaaaaaaaaaaaaaaaaaaaaaaaaaaaaaaaaaaaaaagaauu

SEQ ID NO: 20397 - RNA, 1943 nt, Artificial Sequence
  mRNA product Design i-3 (hSL-A64-N5) comprising derived and/or modified sequence from LASV(LASV035-NIG-2009;Clade II)__AIT17589__SP-HsALB_NP(2-569) (opt1)
aggagaaagcuuaccaugaagugggugaccuucaucagccugcucuuccuguucuccagcgccuacuccagcgccuccaaggaggugaaguccuuccuguggacccagagccuccgccgggagcugagcggcuacugcuccagcaucaagcugcaggucgugaaggacgcccaggcgcuccugcacgggcuggacuucuccgaggugagcaacguccagcgccucaugcggaagcagaagcgcgacgacuccgaccugaagcggcugcgcgaccucaaccaggccgugaacaaccugguggagcucaagagcacccagcagaaguccauccugcgggucggcacgcugaccagcgacgaccugcucacccuggccgccgaccuggagaagcucaaguccaaggugauccgcaccgagcggccccugagcuccgggguguacaugggcaaccugagcgcccagcagcucgagcagcgccgggcgcugcugaacaugaucgggauggucggcggcgcccaggggacgcagccgggccgcgacgggguggugcgggucugggacgugaagaaccccgaccuccugaacaaccaguucggcaccaugcccucccugacccucgccugccugaccaagcagggccagguggaccugaacgacgccguccucgcgcugacggaccuggggcucaucuacaccgccaaguaccccaacagcuccgaccuggaccgccugagccagagccacccgauccucaacaugguggacaccaagaaguccagccugaacaucuccggcuacaacuucagccugggggccgccgugaaggccggcgcgugcaugcucgacgggggcaacaugcuggagaccaucaaggucacgccccagaccauggacggcauccugaaguccauccucaaggugaagcggagccuggggauguucguguccgacacccccggcgagcgcaaccccuacgagaacauccuguacaagaucugccucagcggggacggcuggccguacaucgccucccggaccagcaucgucgggcgcgccugggagaacacgaccguggaccuggaguccgacggcaagccccagaaggugggcaccaccgggagcaacaagucccugcagagcgccggcuuccccacggggcucaccuacucccagcugaugacccugaaggacagcaugaugcagcuggaccccuccgccaagaccuggaucgacaucgagggccggccggaggaccccgucgagaucgcgcucuaccagcccaugagcgggugcuacauccacuucuuccgcgagcccacggaccugaagcaguucaagcaggacgccaaguacucccacggcaucgacguggccgaccuguucccggcccagcccggccucaccagcgccgucaucgaggcgcugccccggaacauggugcugaccugccaggggagcgacgacaucaagaagcuccuggacucccagggccgccgcgacaucaagcugaucgacaucgcccucagcaaggccgacucccggaaguucgagaacgccgugugggaccagugcaaggaccugugccacaugcacaccggggucgugguggagaagaagaagcgcggcgggaaggaggagaucacgccccacugcgcccugauggacugcaucauguacgacgcggccgucagcggcggccucaacaucccggugcugcgggccgugcugccccgcgacauggucuuccggaccuccagccccaagguggugcucugaggacuaguuauaagacugacuagcccgaugggccucccaacgggcccuccuccccuccuugcaccgagauuaaucaaaggcucuuuucagagccaccaaaaaaaaaaaaaaaaaaaaaaaaaaaaaaaaaaaaaaaaaaaaaaaaaaaaaaaaaaaaaaaaagaauu

SEQ ID NO: 20398 - RNA, 1943 nt, Artificial Sequence
  mRNA product Design i-3 (hSL-A64-N5) comprising derived and/or modified sequence from LASV(LASV1000-NIG-2009;Clade II)__AIT17783__SP-HsALB_NP(2-569) (opt1)
aggagaaagcuuaccaugaagugggugaccuucaucagccugcucuuccuguucuccagcgccuacuccagcgccuccaaggaggugaaguccuuccuguggacccagagccuccgccgggagcugagcggcuacugcuccaacaucaagcugcaggucgugaaggacgcccaggcgcuccugcacgggcuggacuucagcgagguguccaacguccagcgccucaugcggaagcagaagcgcgacgacagcgaccugaagcggcugcgcgaccucaaccaggccgugaacaaccugguggagcugaaguccacccagcagaaguccauccuccgggucggcacgcugaccagcgacgaccugcucacccuggccgccgaccuggagaagcucaagagcaaggugauccgcaccgagcggccccuguccagcgggguguacaugggcaaccuguccacgcagcagcucgagcagcgccgggcccugcugaacaugaucgggauggucggcggcgcgcaggggacccagccgggccgcgacgggguggugcgggucugggacgugaagaaccccgaccuccugaacaaccaguucggcaccaugcccagccugacccucgccugccugacgaagcagggccagguggaccugaacgacgucgugcucgcccugaccgaccuggggcucaucuacaccgccaaguaccccaacuccagcgaccuggaccgccugucccagagccacccgauccucaacaugguggacaccaagaaguccagccugaacaucagcggcuacaacuucucccugggggcggccgucaaggccggcgccugcaugcucgacgggggcaacaugcuggagacgaucaaggugacgccccagaccauggacggcauccucaagagcauccugaaggugaagaagucccuggggauguucgucagcgacacccccggcgagcggaaccccuacgagaacauccuguacaagaucugccucuccggggacggcuggccguacaucgccagccgcaccuccaucguggggcgggcgugggagaacaccaccguggaccuggagagcgacggcaagccccagaaggucggcaccgccggguccaacaagagccugcaguccgccggcuuccccacggggcucaccuacagccagcugaugacccugaaggacuccaugaugcagcuggaccccagcgccaagaccuggaucgacaucgagggccgcccggaggaccccguggagaucgcccucuaccagcccgucuccgggugcuacauccacuucuuccgggagcccacggaccugaagcaguucaagcaggacgcgaaguacagccacggcaucgacguggccgaccuguucccggcccagcccggccucaccuccgccgugaucgaggcccugccccgcaacaugguccugaccugccaggggagcgacgacaucaagcggcuccuggacagccagggccgccgcgacaucaagcugaucgacaucgcgcucuccaaggccgacagccggcgcuucgagaacgccgugugggaccagugcaaggaccugugccacaugcacaccgggguggucguggagaagaagaagcggggcgggaaggaggagaucacgccccacugcgcccugauggacugcaucauguacgacgccgcgguguccggcggccucaacaucccgguccugcgcgccgugcugccccgggacaugguguuccgcaccagcucccccaaggucgugcucugaggacuaguuauaagacugacuagcccgaugggccucccaacgggcccuccuccccuccuugcaccgagauuaaucaaaggcucuuuucagagccaccaaaaaaaaaaaaaaaaaaaaaaaaaaaaaaaaaaaaaaaaaaaaaaaaaaaaaaaaaaaaaaaaagaauu

SEQ ID NO: 20399 - RNA, 1943 nt, Artificial Sequence
  mRNA product Design i-3 (hSL-A64-N5) comprising derived and/or modified sequence from LASV(LASV221-NIG-2010;Clade II)__AIT17625__SP-HsALB_NP(2-569) (opt1)
aggagaaagcuuaccaugaagugggugaccuucaucagccugcucuuccuguucuccagcgccuacuccagcgccuccaaggaggugaaguccuuccuguggacccagagccuccgccgggagcugagcggcuacugcuccagcaucaagcugcaggucgugaaggacgcccaggcgcuccugcacgggcuggacuucuccgaggugagcaacguccagcgccucaugcggaagcagcgccgggacgacuccgaccugaagcgccugcgggaccucaaccaggccgugaacaaccugguggagcucaagagcacccagcagaaguccauccugcgcgucggcacgcugaccagcgacgaccugcucacccuggccgccgaccuggagaagcucaaguccaaggugauccggaccgagcgcccccugagcuccgggguguacaugggcaaccugagcacgcagcagcucgagcagcggcgcgcccugcugaacaugaucgggauggucggcggcgcgcaggggacccagccgggccgggacgggguggugcgcgucugggacgugaagaaccccgaccuccugaacaaccaguucggcaccaugcccucccugacccucgccugccugacgaagcagggccagguggaccugaacgacgccguccucgcccugaccgaccuggggcucaucuacaccgcgaaguaccccaacagcuccgaccuggaccggcugagccagagccacccgauccucaacaugguggacaccaagaaguccagccugaacaucuccggcuacaacuucagccugggggccgccgugaaggccggcgccugcaugcucgacgggggcaacaugcuggagacgaucaaggucacgccccagaccguggacggcauccugaaguccauccucaaggugaagcgcagccuggggauguucgucuccgacacccccggcgagcggaaccccuacgagaacauccuguacaagaucugccucagcggggacggcuggccguacaucgcgucccgcaccagcaucguggggcgggccugggagaacaccaccguggaccuggaguccgacggcaagccccagaaggucggcaccgccgggagcaacaagucccugcagagcgccggcuuccccacggggcucaccuacucccagcugaugacccugaaggacagcaugaugcagcuggaccccuccgccaagaccuggaucgacaucgagggccgcccggaggaccccguggagaucgcgcucuaccagcccaugagcgggugcuacauccacuucuuccgggagcccacggaccugaagcaguucaagcaggacgccaaguacucccacggcaucgacgucgccgaccuguucccggcccagcccggccucaccagcgccgugaucgaggcgcugccccgcaacauggugcugaccugccaggggagcgacgacaucaagcgccuccuggacucccagggccggcgcgacaucaagcugaucgacaucgcccucagcaaggccgacucccggaaguucgagaacgccgucugggaccagugcaaggaccugugccacaugcacaccggggugguggucgagaagaagaagcgcggcgggaaggaggagaucacgccccacugcgcccugauggacugcaucauguacgacgcggccgugagcggcggccucaacaucccggugcugcgggccguccugccccgcgacaugguguuccggaccuccagccccaaggugguccucugaggacuaguuauaagacugacuagcccgaugggccucccaacgggcccuccuccccuccuugcaccgagauuaaucaaaggcucuuuucagagccaccaaaaaaaaaaaaaaaaaaaaaaaaaaaaaaaaaaaaaaaaaaaaaaaaaaaaaaaaaaaaaaaaagaauu

SEQ ID NO: 20400 - RNA, 1943 nt, Artificial Sequence
  mRNA product Design i-3 (hSL-A64-N5) comprising derived and/or modified sequence from LASV(LASV237-NIG-2010;Clade II)__AIT17639__SP-HsALB_NP(2-569) (opt1)
aggagaaagcuuaccaugaagugggugaccuucaucagccugcucuuccuguucuccagcgccuacuccagcgccuccaaggaggugaaguccuuccuguggacccagagccuccgccgggagcugagcggcuacugcuccaacaucaagcugcaggucgugaaggacgcccaggcgcuccugcacgggcuggacuucagcgagguguccaacguccagcgccucaugcggaagcagaagcgcgacgacagcgaccugaagcggcugcgcgaccucaaccaggccgugaacaaccugguggagcugaaguccacccagcagaaguccauccuccgggucggcacccugaccagcgacgaccugcucacccuggccgccgaccuggagaagcucaagagcaaggugauccgcaccgagcggccccuguccagcgggguguacaugggcaaccuguccacgcagcagcucgagcagcgccgggcccugcugaacaugaucgggauggucggcggcgcgcaggggacccagccgggccgcgacgggguggugcgggucugggacgugaagaaccccgaccuccugaacaaccaguucggcaccaugcccagccugacccucgccugccugacgaagcagggccagguggaccugaacgacgccguccucgcccugaccgaccuggggcucaucuacaccgcgaaguaccccaacuccagcgaccuggaccgccugucccagagccacccgauccucaacaugguggacaucaagaaguccagccugaacaucagcggcuacaacuucucccugggggccgccgugaaggccggcgccugcaugcucgacgggggcaacaugcuggagaccaucaaggucacgccccagaccauggacggcauccucaagagcauccugaaggugaagcggucccuggggauguucgugagcgacacccccggcgagcgcaaccccuacgagaacauccuguacaagaucugccucuccggggacggcuggccguacaucgcgagccggaccuccaucgucgggcgcgccugggagaacacgaccguggaccuggagagcgacggcaagccccagaaggugggcuccgccgggagcaacaagucccugcagagcgccggcuuccccaccgggcucaccuacucccagcugaugacgcugaaggacagcaugaugcagcuggaccccuccgccaagaccuggaucgacaucgagggccggccggaggaccccgucgagaucgcgcucuaccagcccaugagcgggugcuacauccacuucuuccgcgagcccaccgaccugaagcaguucaagcaggacgccaaguacucccacggcaucgacguggccgaccuguucccggcccagcccggccucaccagcgccgucaucgaggcgcugccccggaacauggugcugacgugccaggggagcgacgacaucaagcgccuccuggacucccagggccgccgggacaucaagcugaucgacaucgcccucagcaaggccgacucccgccgguucgagaacgccgugugggaccagugcaaggaccugugccacaugcacaccggggucgugguggagaagaagaagcgcggcgggaaggaggagaucacgccccacugcgcccugauggacugcaucauguacgacgcggccgucagcggcggccucaacaucccggugcugcgggccgugcugccccgcgacauggucuuccggaccuccagccccaagguggugcucugaggacuaguuauaagacugacuagcccgaugggccucccaacgggcccuccuccccuccuugcaccgagauuaaucaaaggcucuuuucagagccaccaaaaaaaaaaaaaaaaaaaaaaaaaaaaaaaaaaaaaaaaaaaaaaaaaaaaaaaaaaaaaaaaagaauu

SEQ ID NO: 20401 - RNA, 1943 nt, Artificial Sequence
  mRNA product Design i-3 (hSL-A64-N5) comprising derived and/or modified sequence from LASV(LASV253-NIG-2011;Clade II)__AIT17671__SP-HsALB_NP(2-569) (opt1)
aggagaaagcuuaccaugaagugggugaccuucaucagccugcucuuccuguucuccagcgccuacuccagcgccuccaaggaggugaaguccuuccuguggacccagagccuccgccgggagcugagcggcuacugcuccagcaucaagcugcaggucgugaaggacgcccaggcgcuccugcacgggcuggacuucuccgaggugagcaacguccagcgccucaugcggaagcagaagcgcgacgacuccgaccugaagcggcugcgcgaccucaaccaggccgugaacaaccugguggagcucaagagcacccagcagaaguccguccugcgggugggcacccugaccagcgacgaccugcucacccuggccgccgaccuggagaagcucaaguccaaggugauccgcaccgagcggccccugagcuccggggucuacaugggcaaccugagcacgcagcagcucgagcagcgccgggcccugcugaacaugaucgggauggugggcggcgcgcaggggacccagccgggccgcgacggggugguccgggugugggacgugaagaaccccgaccuccugaacaaccaguucggcaccaugcccucccugacccucgccugccugacgaagcaggggcaggucgaccugaacgacguggugcucgcccugaccgaccugggccucaucuacaccgccaaguaccccaacagcuccgaccuggaccgccugagccagagccacccgauccucaacauggucgacaccaagaaguccagccugaacaucuccggcuacaacuucagccugggggcggccgugaaggccggcgccugcaugcucgacgggggcaacaugcuggagacgaucaaggugacgccccagaccauggacggcauccugaaguccauccucaaggucaagaagucccuggggauguucgugagcgacacccccggcgagcggaaccccuacgagaacauccuguacaagaucugccucagcggggacggcuggccguacaucgccucccgcaccagcaucguggggcgggcgugggagaacaccaccgucgaccuggaguccgacggcaagccccagaaggugggcaccgccgggagcaacaagucccugcagagcgccggcuuccccacggggcucaccuacucccagcugaugacccugaaggacagcaugaugcagcuggaccccuccgccaagaccuggaucgacaucgagggccgcccggaggaccccgucgagaucgcccucuaccagcccaugagcgggugcuacauccacuucuuccgggagcccacggaccugaagcaguucaagcaggacgcgaaguacucccacggcaucgacgugaccgaccuguucccggcccagcccggccucaccagcgccgugaucgaggcccugccccgcaacaugguccugaccugccaggggagcgacgacaucaagcggcuccuggacucccagggccgccgcgacaucaagcugaucgacaucgcccucagcaaggcggacucccggcgcuucgagaacgccgugugggaccagugcaaggaccugugccacaugcacacggggguggucguggagaagaagaagcggggcgggaaggaggagaucacgccccacugcgcccugauggacugcaucauguacgacgccgccgugagcggcggccucaacaucccgguccugcgcgcggugcugccccgggacaugguguuccgcaccuccagccccaaggucgugcucugaggacuaguuauaagacugacuagcccgaugggccucccaacgggcccuccuccccuccuugcaccgagauuaaucaaaggcucuuuucagagccaccaaaaaaaaaaaaaaaaaaaaaaaaaaaaaaaaaaaaaaaaaaaaaaaaaaaaaaaaaaaaaaaaagaauu

SEQ ID NO: 20402 - RNA, 1943 nt, Artificial Sequence
  mRNA product Design i-3 (hSL-A64-N5) comprising derived and/or modified sequence from LASV(LASV254-NIG-2011;Clade II)__AIT17675__SP-HsALB_NP(2-569) (opt1)
aggagaaagcuuaccaugaagugggugaccuucaucagccugcucuuccuguucuccagcgccuacuccagcgccuccaaggaggugaaguccuuccuguggacccagagccuccgccgggagcugagcggcuacugcuccagcaucaagcugcaggucgugaaggacgcccaggcgcuccugcacgggcuggacuucuccgaggugagcaacguccagcgccucaugcggaagcagaagcgcgacgacuccgaccugaagcggcugcgcgaccucaaccaggccgugaacaaccugguggagcucaagagcacccagcagaaguccguccugcgggugggcacgcugaccagcgacgaccugcucacccuggccgccgaccuggagaagcucaaguccaaggugauccgcaccgagcggccccugagcuccggggucuacaugggcaaccugagcacgcagcagcucgagcagcgccgggcccugcugaacaugaucgggauggugggcggcgcgcaggggacccagccgggccgcgacggggugguccgggugugggacgugaagaaccccgaccuccugaacaaccaguucggcaccaugcccucccugacccucgccugccugacgaagcaggggcaggucgaccugaacgacgccgugcucgcccugaccgaccugggccucaucuacaccgcgaaguaccccaacagcuccgaccuggaccgccugagccagagccacccgauccucaacaugguggacaccaagaaguccagccugaacaucuccggcuacaacuucagccugggggccgccgucaaggccggcgccugcaugcucgacgggggcaacaugcuggagacgaucaaggugacgccccagaccauggacggcauccugaaguccauccucaaggugaagaagucccuggggauguucgucagcgacacccccggcgagcggaaccccuacgagaacauccuguacaagaucugccucagcggggacggcuggccguacaucgcgucccgcaccagcaucguggggcgggccugggagaacaccaucguggaccuggaguccgacggcaagccccagaaggucggcaccgccgggagcaacaagucccugcagagcgccggcuuccccaccgggcucacguacucccagcugaugacccugaaggacagcaugaugcagcuggaccccuccgccaagaccuggaucgacaucgagggccgcccggaggaccccguggagaucgcgcucuaccagcccaugagcgggugcuacauccacuucuuccgggagcccaccgaccugaagcaguucaagcaggacgccaaguacucccacggcaucgacgucgccgaccuguucccggcccagcccggccucacgagcgccgugaucgaggcgcugccccgcaacauggugcugaccugccaggggagcgacgacaucaagcggcuccuggacucccagggccgccgcgacaucaagcugaucgacaucgcccucagcaaggccgacucccggcgcuucgagaacgccgucugggaccagugcaaggaccugugccacaugcacaccggggugguggucgagaagaagaagcggggcgggaaggaggagaucacgccccacugcgcccugauggacugcaucauguacgacgcggccgugagcggcggccucaacaucccggugcugcgcgccguccugccccgggacaugguguuccgcaccuccagccccaaggugguccucugaggacuaguuauaagacugacuagcccgaugggccucccaacgggcccuccuccccuccuugcaccgagauuaaucaaaggcucuuuucagagccaccaaaaaaaaaaaaaaaaaaaaaaaaaaaaaaaaaaaaaaaaaaaaaaaaaaaaaaaaaaaaaaaaagaauu

SEQ ID NO: 20403 - RNA, 1943 nt, Artificial Sequence
  mRNA product Design i-3 (hSL-A64-N5) comprising derived and/or modified sequence from LASV(Nig08-04;Clade II)__ADU56611__SP-HsALB_NP(2-569) (opt1)
aggagaaagcuuaccaugaagugggugaccuucaucagccugcucuuccuguucuccagcgccuacuccagcgccuccaaggaggugaaguccuuccuguggacccagagccuccgccgggagcugagcggcuacugcuccaacaucaagcugcaggucgugaaggacgcccaggcgcuccugcacgggcuggacuucagcgagguguccaacguccagcgccucaugcggaagcagaagcgcgacgacggcgaccugaagcggcugcgcgaccucaaccaggccgugaacaaccugguggagcucaagagcacccagcagaaguccguccugcggguggggacccugaccagcgacgaccugcucacccuggccgccgaccuggagaagcucaaguccaaggugauccgcaccgagcggccccugagcuccggcgucuacauggggaaccugagcacgcagcagcucgagcagcgcaaggcccugcuguccaugaucggcauggugggcggggcgcagggcacccagccggggcgggacggcgugguccgcgugugggacgugaagaaccccgaccuccugaacaaccaguucgggaccaugcccagccugacccucgccugccugacgaagcagggccaggucgaccugaacgacgccgugcucgcccugaccgaccugggccucaucuacaccgcgaaguaccccaacuccagcgaccuggaccggcugucccagagccacccgauccucaacaugguggacaccaagaaguccagccugaacaucagcggguacaacuucucccugggcgccgccgucaaggccggggccugcaugcucgacggcggcaacaugcuggagacgaucaaggugacgccccagaccauggacgggauccucaagagcauccugaaggugaagcgcucccugggcauguucgucagcgacacccccggggagcggaaccccuacgagaacauccuguacaagaucugccucuccggcgacggguggccguacaucgcgagccgcaccuccaucgugggccgggccugggagaacaccaccguggaccuggagagcgacggcaagccccagaaggucgggaccgccggcuccaacaagagccugcaguccgccggguuccccacgggccucaccuacagccagcugaugacccugaaggacuccaugaugcagcuggaccccagcgccaagaccuggaucgacaucgaggggcgcccggaggaccccguggagaucgcgcucuaccagcccauguccggcugcuacauccacuucuuccgggagcccacggaccugaagcaguucaagcaggacgccaaguacagccacggcaucgacgucaccgaccuguucuccgcccagccggggcucaccagcgccgugaucgaggcccugccccgcaacauggugcugaccugccagggcagcgacgacaucaagaagcuccuggacucccaggggcggcgcgacaucaagcugaucgacaucagccucaacaaggcggacucccgccgguucgagaacgccgucugggaccagugcaaggaccugugccacaugcacacgggcgugguggucgagaagaagaagcgcgggggcaaggaggagaucacgccccacugcgcccugauggacugcaucauguucgacgccgccgugagcggcgggcucaacauccccauccugcgggcggugcugccgcgcgacauggucuuccggaccuccagccccaagguggugcucugaggacuaguuauaagacugacuagcccgaugggccucccaacgggcccuccuccccuccuugcaccgagauuaaucaaaggcucuuuucagagccaccaaaaaaaaaaaaaaaaaaaaaaaaaaaaaaaaaaaaaaaaaaaaaaaaaaaaaaaaaaaaaaaaagaauu

SEQ ID NO: 20404 - RNA, 1946 nt, Artificial Sequence
  mRNA product Design i-3 (hSL-A64-N5) comprising derived and/or modified sequence from LASV(GA391;Clade III)__AAA46284__SP-HsALB_NP(2-570) (opt1)
aggagaaagcuuaccaugaagugggugaccuucaucagccugcucuuccuguucuccagcgccuacuccagcgccuccaaggaggugcgcagcugccuguggacccagucccuccggcgcgagcugagcggcuacugcuccaacaucaagcugcaggucgugaaggacgcccaggcgcuccugcacgggcuggacuucagcgagguguccaacguccagcggcucaugcgcaagcagaagcgggacgacggcgaccugaagcgccugcgggaccucaaccaggccgugaacaaccugguggagcugaaguccacccagcagaaguccguccuccgcguggggacgcugagcuccgacgaccugcucauccuggccgccgaccuggagaagcucaagagcaaggugacccggaccgagcgcccccuguccagcggcgucuacauggggaaccuguccagccagcagcucgaccagcggcgcgcccugcugaacaugaucggcaugaccggcguguccgggggcgggaagggcgcgagcaacgggaucgugcgggucugggacgugaagaacgccgagcuccugaacaaccaguucggcacgaugccgucccugacccucgccugccugaccaagcagggccagguggaccugaacgacgccguccaggcgcucaccgaccuggggcugaucuacacggccaaguaccccaacagcagcgaccucgaccgccugucccagagccaccccauccugaacaugaucgacaccaagaaguccagccucaacaucuccggcuacaacuucagccugggggccgccgugaaggccggcgcgugcaugcuggacggcgggaacaugcucgagaccaucaaggugagcccccagaccauggacggcauccucaagagcauccugaaggucaagaagucccuggggauguucgugagcgacacgccgggcgagcggaaccccuacgagaacauccuguacaagaucugccuguccggggacggcuggagcuacaucgccucccgcaccagcaucgugggccgggccugggagaacaccgucguggaccucgagcaggacaacaagccccagaagaucgggaacggcggguccaacaagagccugcaguccgccggcuucgccgcggggcugaucuacagccagcucaugacccugaaggacuucaagugcuucaaccugauccccaacgccaagacguggauggacaucgagggccgcccggaggaccccguggagaucgcccuguaccagcccuccagcggcugcuacguccacuucuuccgggagcccaccgaccucaagcaguucaagcaggacgccaaguacagccacgggcgcgacgugaccgaccuguucgccgcgcagccgggccugaccuccgccgucaucgaggcccucccccggaacauggugaucacgugccaggggagcgaggacauccgcaagcugcuggagucccagggccgccgggacaucaagcucaucgacaucacccugagcaaggccgacucccgcaaguucgagaacgccgugugggaccaguucaaggaccugugccacaugcacaccggggucgugguggagaagaagaagcggggcggcaaggaggagaucacgccccacugcgcgcucauggacugcaucauguucgacgccgccgucagcgggggccuggacgccaaggugcugcgcgugguccucccccgggacaugguguuccgcaccuccaccccgaaggugguccugugaggacuaguuauaagacugacuagcccgaugggccucccaacgggcccuccuccccuccuugcaccgagauuaaucaaaggcucuuuucagagccaccaaaaaaaaaaaaaaaaaaaaaaaaaaaaaaaaaaaaaaaaaaaaaaaaaaaaaaaaaaaaaaaaagaauu

SEQ ID NO: 20405 - RNA, 1943 nt, Artificial Sequence
  mRNA product Design i-3 (hSL-A64-N5) comprising derived and/or modified sequence from LASV(Nig08-A19;Clade III)__ADU56619__SP-HsALB_NP(2-569) (opt1)
aggagaaagcuuaccaugaagugggugaccuucaucagccugcucuuccuguucuccagcgccuacuccagcgccuccaaggaggugaaguccuuccuguggacccagucccuccgccgggagcugagcggcuacugcuccaacaucaagcugcaggucgugaaggacgcccaggcgcuccugcacgggcuggacuucagcgagguguccaacguccagcgccucaugcggaagcagaagcgcgacgacggcgaccugaagcggcugcgcgaccucaaccaggccgugaacaaccugguggagcucaagagcacccagcagaaguccguccugcggguggggacccugagcuccgacgaccugcucgugcuggccgccgaccuggagaagcucaagagcaaggucgugcgcaccgagcggccccuguccagcggcaucuacauggggaaccuguccagccagcagcucgaccagcgcaaggcccugcugaacaugaucggcaugaccggcgggaacggcgggcggaacaccacguccgacggcaucgugcgcgucugggacgugaagaacgcggagcuccugaacaaccaguucgggaccaugccgagccugacccucgccugccugaccaagcagggccagguggaccugaacgacgccguccaggcccucacggaccugggccugaucuacaccgcgaaguaccccaacuccagcgaccucgaccggcuggcccagagccaccccauccugaacaugaucgacaccaagaaguccagccucaacaucuccggguacaacuucagccugggcgccgccgugaaggccggggcgugcaugcuggacggcggcaacaugcucgagaccaucaaggugagcccccagacgauggacgggauccucaagagcauccugaaggucaagcgcucccugggcauguucaucagcgacaccccgggggagcggaaccccuacgagaacauccuguacaagaucugccuguccggcgacggguggcccuacaucgccagccgcaccuccaucgugggccgggccugggagaacaccguggucgaccucgagagcgacaacaagccccagaagacgggcaacgggggcuccaacaagagccugcaguccgccggguucgccgcgggccugaccuacagccagcucaugacccugaaggacuccaugcugcagcuggacccgaacgccaagaccuggauggacaucgaggggcgccccgaggaccccguggagaucgcccucuaccagcccagcuccggcugcuacauccacuucuuccgggagccgacggaccugaagcaguucaagcaggacgccaaguacagccacggcaucgacgugaccgaccuguucgccgcgcagcccgggcucaccagcgccgucaucgaggcccugccccgcaacauggugaucacgugccagggcuccgaggacauccggaagcugcucgagagccaggggcgccgcgacaucaagcugaucgacaucucccugagcaaggucgacucccggaaguucgagaacgccgugugggaccaguucaaggaccucugccacaugcacaccggcaucguggucgagaagaagaagcgcgggggcaaggaggagaucacgccccacugcgcccugauggacugcaucauguucgacgcggccgugagcggcgggguggacgccaagguccugcgggccgugcucccgcgcgacaugguguuccggaccuccacccccaaggucgugcugugaggacuaguuauaagacugacuagcccgaugggccucccaacgggcccuccuccccuccuugcaccgagauuaaucaaaggcucuuuucagagccaccaaaaaaaaaaaaaaaaaaaaaaaaaaaaaaaaaaaaaaaaaaaaaaaaaaaaaaaaaaaaaaaaagaauu

SEQ ID NO: 20406 - RNA, 1943 nt, Artificial Sequence
  mRNA product Design i-3 (hSL-A64-N5) comprising derived and/or modified sequence from LASV(G1180-SLE-2010;Clade IV)__AIT17169__SP-HsALB_NP(2-569) (opt1)
aggagaaagcuuaccaugaagugggugaccuucaucagccugcucuuccuguucuccagcgccuacuccagcgccuccaaggagaucaagagcuuccuguggacccagucccuccgccgggagcugagcggcuacugcuccaacaucaagcuccagguggucaaggacgcccaggcgcugcugcacgggcuggacuucagcgagguguccaacgugcagcgccucaugcggaaggagcgccgggacgacaacgaccugaagcgccugcgggaccucaaccaggccgucaacaaccugguggagcucaagagcacccagcagaaguccauccugcgcgugggcacccugaccagcgacgaccugcucauccuggccgccgaccuggagaagcucaaguccaaggucauccggaccgagcgcccccugagcgccgggguguacaugggcaaccuguccagccagcagcucgaccagcggcgcgcgcugcuguccaugaucgggaugagcuccggcaaccagcgggcccaggccggccgcgacggggugguccgggugugggacgugaagaacgucgagcuccugaacaaccaguucggcaccaugccgagccugacgcucgccugccugaccaagcagggccagguggaccugaacgacgcggugcaggcccucaccgaccuggggcugaucuacaccgccaaguaccccaacacguccgaccucgaccgccugacccagagccaccccauccugaacaugaucgacaccaagaaguccagccucaacaucagcggguacaacuucucccugggcgccgccgucaaggcgggcgccugcaugcuggacgggggcaacaugcucgagaccaucaaggugagcccccagacgauggacgggauccugaaguccauccugaaggugaagaaggcccucggcauguucaucagcgacaccccgggcgagcggaaccccuacgagaacauccuguacaagaucugccuguccggggacggcuggcccuacaucgccagccgcaccuccaucaccgggcgggccugggagaacacggucguggaccucgagagcgacggcaagccccagaaggcgggguccaacaacagcaacaagucccugcagagcgugggcuucaccgccggccugaccuacucccagcucaugacccugaaggacgccaugcugcagcuggacccgaacgccaagacguggauggacaucgaggggcgccccgaggaccccgucgagaucgcccucuaccagcccagcuccggcugcuacauccacuucuuccgggagccgaccgaccugaagcaguucaagcaggacgcgaaguacagccacgggaucgacgugaccgaccuguucgccgcccagcccggccucaccuccgccgugaucgacgcccugccccgcaacauggucaucacgugccaggggagcgacgacauccgcaagcugcucgagagccagggccggaaggacaucaagcugaucgacaucgcgcuguccaagaccgacagccgcaaguacgagaacgccgugugggaccaguacaaggaccucugccacaugcacaccggcgucgugguggagaagaagaagcgcgggggcaaggaggagaucacgccccacugcgcccugauggacugcaucauguucgacgccgcggucuccgggggccugaacaccagcgugcuccgggccgugcugccgcgggacauggucuuccgcaccuccacgccccggguggugcugugaggacuaguuauaagacugacuagcccgaugggccucccaacgggcccuccuccccuccuugcaccgagauuaaucaaaggcucuuuucagagccaccaaaaaaaaaaaaaaaaaaaaaaaaaaaaaaaaaaaaaaaaaaaaaaaaaaaaaaaaaaaaaaaaagaauu

SEQ ID NO: 20407 - RNA, 1943 nt, Artificial Sequence
  mRNA product Design i-3 (hSL-A64-N5) comprising derived and/or modified sequence from LASV(G1442-SLE-2011;Clade IV)__AIT17181__SP-HsALB_NP(2-569) (opt1)
aggagaaagcuuaccaugaagugggugaccuucaucagccugcucuuccuguucuccagcgccuacuccagcgccuccaaggaggugaaguccuuccuguggacccagagccuccgccgggagcugagcggcuacugcuccaacaucaagcugcaggucgugaaggacgcccaggcgcuccugcacgggcuggacuucagcgagguguccaacguccagcgccucaugcggaagcagcgccgggacgacaacgaccugaagcgccugcgggaccucaaccaggccgugaacaaccugguggagcucaagagcacccagcagaaguccguccugcgcgugggcacccugaccagcgacgaccugcucgugcuggccgccgaccuggagaagcucaaguccaaggucauccggaccgagcgcccccugagcgccgggguguacaugggcaaccuguccagccagcagcucgaccagcggcgcgcgcugcugaacaugaucgggauguccggcggcauccaggggacccggacgggccgcgacggggugguccgggugugggacgugaagaacgccgaccuccugaacaaccaguucggcaccaugccgagccugacccucgccugccugaccaagcaggggcaggucgaccugaacgacguggugcaggcccucacggaccugggccugaucuacaccgcgaaguaccccaacgccuccgaccucgaccgccugacccagagccaccccauccugaacaugaucgacaccaagaaguccagccucaacaucagcggcuacaacuucucccugggggccgccgucaaggccggcgcgugcaugcuggacgggggcaacaugcucgagacgaucaaggugagcccccagaccauggacggcauccugaaguccauccugaaggugaagaagacccucgggauguucaucagcgacaccccgggcgagcggaaccccuacgagaacauccuguacaagaucugccuguccggggacggcuggcccuacaucgccagccgcacguccaucaccgggcgggccugggagaacaccgucguggaccucgagagcgacggcaagccccagaaggccggcuccaacaacagcaacaagucccugcagagcgccggguucgcggccggccugaccuacucccagcucaugacgcugaaggacgccaugcugcagcuggacccgaacgccaagaccuggauggacaucgaggggcgccccgaggaccccguggagaucgcccucuaccagcccagcuccggcugcuacauccacuucuuccgggagccgaccgaccugaagcaguucaagcaggacgcgaaguacagccacgggaucgacgucaccgaccuguucgccgcccagcccggccucacguccgccgugaucgaggcccugccccgcaacauggucaucacgugccagggcagcgacgacaucaagaagcugcucgagucccaggggcgcaaggacaucaagcugaucgacaucgcgcugagcaagaccgacagccggaaguacgagaacgccgugugggaccaguacaaggaccucugccacaugcacaccggcguggucguggagaagaagaagcgcgggggcaaggaggagaucaccccgcacugcgcccugauggacugcaucauguucgacgccgcgguguccgggggccugaacacccucguccugcgggccgugcugccccgcgacaugguguuccggaccagcacgccccgcgucgugcucugaggacuaguuauaagacugacuagcccgaugggccucccaacgggcccuccuccccuccuugcaccgagauuaaucaaaggcucuuuucagagccaccaaaaaaaaaaaaaaaaaaaaaaaaaaaaaaaaaaaaaaaaaaaaaaaaaaaaaaaaaaaaaaaaagaauu

SEQ ID NO: 20408 - RNA, 1943 nt, Artificial Sequence
  mRNA product Design i-3 (hSL-A64-N5) comprising derived and/or modified sequence from LASV(G3010-SLE-2013;Clade IV)__AIT17345__SP-HsALB_NP(2-569) (opt1)
aggagaaagcuuaccaugaagugggugaccuucaucagccugcucuuccuguucuccagcgccuacuccagcgccuccaaggagaucaagagcuuccuguggacccagucccuccgccgggagcugagcggcuacugcuccaacaucaagcuccagguggucaaggacgcccaggcgcugcugcacgggcuggacuucagcgagguguccaacgugcagcgccucaugcggaaggagcgccgggacgacaacgaccugaagcgccugcgggaccucaaccaggccgucaacaaccugguggagcucaagagcacccagcagaaguccauccugcgcgugggcacccugaccagcgacgaccugcucauccuggccgccgaccuggagaagcucaaguccaaggucacccggaccgagcgcccccugagcgccgggguguacaugggcaaccuguccagccagcagcucgaccagcggcgcgcgcugcuguccaugaucgggaugagcuccggcgugcagggcgcccgggccgggcgcgacggcgucgugcgggugugggacgucaagaacgccgagcuccugaacaaccaguucgggacgaugccgagccugacccucgcgugccugaccaagcagggccagguggaccugaacgacgugguccaggcccucaccgaccuggggcugaucuacacggccaaguaccccaacaccuccgaccucgaccgccugacccagagccaccccauccugaacaugaucgacaccaagaaguccagccucaacaucagcggcuacaacuucucccugggcgccgccgugaaggcgggggccugcaugcuggacggcgggaacaugcucgagacgaucaaggugagcccccagaccauggacggcauccugaaguccauccugaaggucaagaaggcccucggcauguucaucagcgagaccccgggggagcggaaccccuacgagaacauccuguacaagaucugccuguccggcgacggguggcccuacaucgccagccgcaccuccaucacgggccgggccugggagaacaccgugguggaccucgagagcgacgggaagccccagaaggcgggcuccaacaacagcaacaagucccugcagagcgccggcuucaccgccgggcugaccuacucccagcucaugacgcugaaggacgccaugcugcagcuggacccgaacgccaagaccuggauggacaucgagggccgccccgaggaccccgucgagguggcgcucuaccagcccagcuccgggugcuacauccacuucuuccgggagccgaccgaccugaagcaguucaagcaggacgccaaguacagccacggcaucgacgugaccgaccuguucgccgcccagcccgggcucacguccgccgucaucgacgcgcugccccgcaacauggugaucacgugccagggcagcgacgacaucaagaagcugcucgagagccagggccgcaaggacaucaagcugaucgacaucgcccuguccaagaccgacagccggaaguacgagaacgccgucugggaccaguacaaggaccucugccacaugcacaccggggugguggucgagaagaagaagcgcggcgggaaggaggagaucaccccgcacugcgcccugauggacugcaucauguucgacgcggccguguccggcgggcugaacaccagcgugcuccgggccguccugccccgcgacaugguguuccggaccuccacgccccgcgugguccugugaggacuaguuauaagacugacuagcccgaugggccucccaacgggcccuccuccccuccuugcaccgagauuaaucaaaggcucuuuucagagccaccaaaaaaaaaaaaaaaaaaaaaaaaaaaaaaaaaaaaaaaaaaaaaaaaaaaaaaaaaaaaaaaaagaauu

SEQ ID NO: 20409 - RNA, 1943 nt, Artificial Sequence
  mRNA product Design i-3 (hSL-A64-N5) comprising derived and/or modified sequence from LASV(G502-SLE-2009;Clade IV)__AIT17127__SP-HsALB_NP(2-569) (opt1)
aggagaaagcuuaccaugaagugggugaccuucaucagccugcucuuccuguucuccagcgccuacuccagcgccuccaaggagaucaagagcuuccuguggacccagucccuccgccgggagcugagcggcuacugcuccaacaucaagcuccagguggucaaggacgcccaggcgcugcugcacgggcuggacuucagcgagguguccaacgugcagcgccucaugcggaaggagcgccgggacgacaacgaccugaagcgccugcgggaccucaaccaggccgucaacaaccugguggagcucaagagcacccagcagaaguccauccugcgcgugggcacccugaccagcgacgaccugcucauccuggccgccgaccuggagaagcucaaguccaaggucauccggaccgagcgcccccugagcgccgggguguacaugggcaaccuguccagccagcagcucgaccagcggcgcgcgcugcuguccaugaucgggaugagcggcggcaaccagggggugcgggccggcaaggacggggucgugcgcgugugggacgucaagaacgccgagcuccugaacaaccaguucggcaccaugccgucccugacgcucgccugccugaccaagcagggccagguggaccugaacgacgcggugcaggcccucaccgaccuggggcugaucuacaccgccaaguaccccaacacgagcgaccucgaccggcugacccagucccaccccauccugaacaugaucgacaccaagaaguccagccucaacaucuccggcuacaacuucagccugggggccgccgucaaggcgggcgccugcaugcuggacgggggcaacaugcucgagaccaucaaggugagcccccagacgauggacggcauccucaagagcauccugaaggugaagaaggcccuggggauguucaucuccgacaccccgggcgagcgcaaccccuacgagaacauccuguacaagaucugccugagcggggacggcuggcccuacaucgccucccggaccagcaucaccgggcgcgccugggagaacacggucguggaccucgaguccgacggcaagccccagaaggcgggcagcaacaacuccaacaagagccugcaguccgccggguucaccgccggccugaccuacagccagcucaugacccugaaggacgccaugcugcagcuggacccgaacacgaagaccuggauggacaucgaggggcggcccgaggaccccguggagaucgcccucuaccagcccuccagcggcugcuacauccacuucuuccgcgagccgaccgaccugaagcaguucaagcaggacgcgaaguacucccacgggaucgacgucaccgaccuguucgccgcccagcccggccucacgagcgccgugaucgacgcccugccccggaacauggugaucacgugccagggcuccgacgacauccgcaagcugcucgagagccaggggcgcaaggacaucaagcugaucgacaucgcgcugaacaagaccgacagccggaaguacgagaacgccgucugggaccaguacaaggaccucugccacaugcacaccggcguggucguggagaagaagaagcgcgggggcaaggaggagaucaccccgcacugcgcccugauggacugcaucauguucgacgccgcgguguccgggggccugaacaccagcguccuccgggccgugcugccccgcgacaugguguuccggaccuccacgccccgcgucgugcugugaggacuaguuauaagacugacuagcccgaugggccucccaacgggcccuccuccccuccuugcaccgagauuaaucaaaggcucuuuucagagccaccaaaaaaaaaaaaaaaaaaaaaaaaaaaaaaaaaaaaaaaaaaaaaaaaaaaaaaaaaaaaaaaaagaauu

SEQ ID NO: 20410 - RNA, 1943 nt, Artificial Sequence
  mRNA product Design i-3 (hSL-A64-N5) comprising derived and/or modified sequence from LASV(G733-SLE-2010;Clade IV)__AIT17155__SP-HsALB_NP(2-569) (opt1)
aggagaaagcuuaccaugaagugggugaccuucaucagccugcucuuccuguucuccagcgccuacuccagcgccuccaaggagaucaagagcuuccuguggacccagucccuccgccgggagcugagcggcuacugcuccaacaucaagcuccagguggucaaggacgcccaggcgcugcugcacgggcuggacuucagcgagguguccaacgugcagcgccucaugcggaaggagcgccgggacgacaacgaccugaagcgccugcgggaccucaaccaggccgucaacaaccugguggagcucaagagcacccagcagaaguccgugcugcgcgucggcacccugaccagcgacgagcugcucgugcuggccgccgaccuggagaagcucaaguccaaggugauccggaccgagcgcccccugagcgccggggucuacaugggcaaccuguccagccagcagcucgaccagcggcgcgcgcugcuguccaugaucgggaugagcggcggcaaccagggggcccggaccggccgcgacgggguggugcgggucugggacgugaagaacgccgagcuccugaacaaccaguucggcaccaugccgucccugacccucgccugccugaccaagcagggccagguggaccugaacgacgcgguccaggcccucaccgaccuggggcugaucuacacggccaaguaccccaacaccagcgaccucgaccgccugacccagucccaccccauccugaacaugaucgacaccaagaaguccagccucaacaucuccggcuacaacuucagccugggggccgccgugaaggcgggcgccugcaugcuggacgggggcaacaugcucgagacgaucaaggugagcccccagaccauggacggcauccucaagagcauccugaaggucaagaaggcccuggggauguucaucuccgacaccccgggcgagcggaaccccuacgagaacauccuguacaagaucugccugagcggggacggcuggcccuacaucgccucccgcaccagcaucacggggcgggccugggagaacaccgugguggaccucgaguccgacggcaagccccagaaggcgggcagcaacaacuccaacaagagccugcaguccgccggguucaccgccggccugaccuacagccagcucaugacgcugaaggacgccaugcugcagcuggacccgaacgccaagaccuggauggacaucgaggggcgccccgaggaccccgucgagaucgcgcucuaccagcccuccagcggcugcuacauccacuucuuccgggagccgaccgaccugaagcaguucaagcaggacgccaaguacucccacgggaucgacgugaccgaccuguucgccgcccagcccggccucacgagcgccgugaucgacgcgcugccccgcaacauggucaucacgugccagggcuccgacgacauccgcaagcugcucgagagccaggggcggaaggacaucaagcugaucgacaucgcccugagcaagaucgacucccgcaaguacgagaacgccgugugggaccaguacaaggaccucugccacaugcacaccggcgucgugguggagaagaagaagcgcgggggcaaggaggagaucacgccccacugcgcccugauggacugcaucauguucgacgcggccgucagcgggggccugaacucccucgugcugcgggccgugcugccgcgggacauggucuuccgcaccagcacgccccggguggugcucugaggacuaguuauaagacugacuagcccgaugggccucccaacgggcccuccuccccuccuugcaccgagauuaaucaaaggcucuuuucagagccaccaaaaaaaaaaaaaaaaaaaaaaaaaaaaaaaaaaaaaaaaaaaaaaaaaaaaaaaaaaaaaaaaagaauu

SEQ ID NO: 20411 - RNA, 1943 nt, Artificial Sequence
  mRNA product Design i-3 (hSL-A64-N5) comprising derived and/or modified sequence from MOPV/LASV reassortant(IGS-1;Clade IV)__AFY05578__SP-HsALB_NP(2-569) (opt1)
aggagaaagcuuaccaugaagugggugaccuucaucagccugcucuuccuguucuccagcgccuacuccagcgccuccaaggagaucaagagcuuccuguggacccagucccuccgccgggagcugagcggcuacugcuccaacaucaagcuccagguggucaaggacgcccaggcgcugcugcacgggcuggacuucagcgagguguccaacgugcagcgccucaugcggaaggagcgccgggacgacaacgaccugaagcgccugcgggaccucaaccaggccgucaacaaccugguggagcucaagagcacccagcagaaguccauccugcgcgugggcacccugaccagcgacgaccugcucauccuggccgccgaccuggagaagcuccgguccaaggucauccgcaccgagcggccccugagcgccgggguguacaugggcaaccuguccagccagcagcucgaccagcgccgggcgcugcugaacaugaucgggauguccggcggcaaccagggggcccgcgccggccgggacggggugguccgcgugugggacgugaagaacgccgagcuccugagcaaccaguucggcaccaugccgucccugacgcucgcgugccugaccaagcaggggcaggucgaccugaacgacgccgugcaggcccucaccgaccugggccugaucuacaccgccaaguaccccaacacgagcgaccucgaccggcugacccagucccaccccauccugaacaugaucgacaccaagaaguccagccucaacaucuccggcuacaacuucagccugggggccgcggugaaggccggcgccugcaugcuggacgggggcaacaugcucgagaccaucaaggucagcccccagacgauggacggcauccucaagagcauccugaaggugaagaaggcccuggggauguucaucuccgacaccccgggcgagcgcaaccccuacgagaacauccuguacaagaucugccugagcggggacggcuggcccuacaucgccucccggaccagcaucaccgggcgcgcgugggagaacacgguggucgaccucgaguccgacggcaagccccagaaggccgacagcaacaacuccagcaagucccugcagagcgccggcuucaccgccgggcugaccuacucccagcucaugacccugaaggacgccaugcugcagcuggacccgaacgcgaagacguggauggacaucgagggccggcccgaggaccccguggagaucgcccucuaccagcccagcuccgggugcuacauccacuucuuccgcgagccgaccgaccugaagcaguucaagcaggacgccaaguacagccacggcaucgacgugaccgaccuguucgccacccagcccgggcucacguccgccgucaucgacgcgcugccccgcaacauggugaucacgugccagggcagcgacgacauccggaagcugcucgagagccagggccgcaaggacaucaagcugaucgacaucgaccuguccaagaccgacagccggaaguacgagaacgccgugugggaccaguacaaggaccucugccacaugcacaccggggucguggucgagaagaagaagcgcggcgggaaggaggagaucaccccgcacugcgcccugauggacugcaucauguucgacgccgcgguguccggcgggcugaacaccagcgugcuccgggccguccugccccgcgacaugguguuccggaccuccacgccccgcgugguccugugaggacuaguuauaagacugacuagcccgaugggccucccaacgggcccuccuccccuccuugcaccgagauuaaucaaaggcucuuuucagagccaccaaaaaaaaaaaaaaaaaaaaaaaaaaaaaaaaaaaaaaaaaaaaaaaaaaaaaaaaaaaaaaaaagaauu

SEQ ID NO: 20412 - RNA, 1943 nt, Artificial Sequence
  mRNA product Design i-3 (hSL-A64-N5) comprising derived and/or modified sequence from LASV(LM765-SLE-2012;Clade IV)__AIT17815__SP-HsALB_NP(2-569) (opt1)
aggagaaagcuuaccaugaagugggugaccuucaucagccugcucuuccuguucuccagcgccuacuccagcgccuccaaggagaucaagagcuuccuguggacccagucccuccgccgggagcugagcggcuacugcuccaacaucaagcuccagguggucaaggacgcccaggcgcugcugcacgggcuggacuucagcgagguguccaacgugcagcgccucaugcggaaggagcgccgggacgacaacgaccugaagcgccugcgggaccucaaccaggccgucaacaaccugguggagcucaagagcacccagcagaaguccauccugcgcgugggcacccugaccagcgacgaccugcucauccuggccgccgaccuggagaagcucaaguccaaggucacccggaccgagcgcccccugagcgccgggguguacaugggcaaccuguccagccagcagcucgaccagcggcgcgcgcugcuggacaugaucgggauguccggcagcaaccagggcgcccgggccgggcgcgacggcgugguccgggugugggacgugaagaacgccgagcuccugaacaaccaguucgggacgaugccgucccugacccucgcgugccugaccaagcagggccaggucgaccugaacgacgccgugcaggcccucaccgaccuggggcugaucuacacggccaaguaccccaacaccagcgaccucgaccgccugacccagucccaccccauccugaacaugaucgacaccaagaaguccagccucaacaucuccggcuacaacuucagccugggcgccgcggugaaggccggggccugcaugcuggacggcgggaacaugcucgagacgaucaaggucagcccccagaccauggacggcauccucaagagcauccugaaggugaagaaggcccugggcauguucaucuccgacgccccgggggagcggaaccccuacgagaacauccuguacaagaucugccugagcggcgacggguggcccuacaucgcgucccgcaccagcaucaccggccgggccugggagaacacgguggucgaccucgaguccgacgggaagccccagaaggccggcagcaacggcuccaacaagagccugcaguccgccggguucaccgccggccugaccuacagccagcucaugacccugaaggacgcgaugcugcagcuggacccgaacgccaagacguggauggacaucgaggggcgccccgaggaccccguggagaucgcccucuaccagcccuccagcggcugcuacauccacuucuuccgggagccgaccgaccugaagcaguucaagcaggacgccaaguacucccacgggaucgacgugaccgaccuguucgccgcgcagcccggccucaccagcgccgucaucgacgcccugccccgcaacauggugaucacgugccagggcuccgacgacauccgcaagcuguucgagagccaggggcggaaggacaucaagcucaucgacaucgcccugagcaagaccgacucccgcaaguacgagaacgcggugugggaccaguacaaggaccugugccacaugcacaccggcaucgucguggagaagaagaagcgcgggggcaaggaggagaucacgccccacugcgcccucauggacugcaucauguucgacgccgccgucagcgggggccugaacaccuccgugcugcgggccgugcucccgcgggacauggucuuccgcaccagcacgccccggguggugcugugaggacuaguuauaagacugacuagcccgaugggccucccaacgggcccuccuccccuccuugcaccgagauuaaucaaaggcucuuuucagagccaccaaaaaaaaaaaaaaaaaaaaaaaaaaaaaaaaaaaaaaaaaaaaaaaaaaaaaaaaaaaaaaaaagaauu

SEQ ID NO: 20413 - RNA, 1943 nt, Artificial Sequence
  mRNA product Design i-3 (hSL-A64-N5) comprising derived and/or modified sequence from LASV(LM776-SLE-2012;Clade IV)__AIT17825__SP-HsALB_NP(2-569) (opt1)
aggagaaagcuuaccaugaagugggugaccuucaucagccugcucuuccuguucuccagcgccuacuccagcgccuccaaggagaucaagagcuuccuguggacccagucccuccgccgggagcugagcuccuacugcagcaacaucaagcuccagguggucaaggacgcccaggcgcugcugcacggccuggacuucuccgaggugagcaacgugcagcgccucaugcggaaggagcgccgggacgacaacgaccugaagcgccugcgggaccucaaccaggccgucaacaaccugguggagcugaaguccacccagcagaaguccauccuccgcguggggacccugaccuccgacgaccugcucauccuggccgccgaccuggagaagcucaagagcaaggucacccggaccgagcgcccccuguccgccggcguguacauggggaaccugagcucccagcagcucgaccagcggcgcgcgcugcugagcaugaucggcauguccgggagcaaccagggcgcccgggccggccgcgacggggugguccgggugugggacgugaagaacgccgagcuccugaacaaccaguucggcacgaugccgucccugacccucgcgugccugaccaagcaggggcaggucgaccugaacgacgccgugcaggcccucaccgaccugggccugaucuacacggccaaguaccccaacaccagcgaccucgaccgccugacccagagccaccccauccugaacaugaucgacaccaagaaguccagccucaacaucuccggguacaacuucagccugggcgccgcggugaaggccggcgccugcaugcuggacgggggcaacaugcucgagacgaucaaggucagcccccagaccauggacgggauccucaagagcauccugaaggugaagaaggcccugggcauguucaucuccgacaccccgggcgagcggaaccccuacgagaacauccuguacaagaucugccugagcggggacggcuggcccuacaucgccucccgcaccagcaucacggggcgggcgugggagaacaccguggucgaccucgaguccgacggcaagccccagaaggccgggagcaacaacuccaacaagagccugcaguccgccggcuucaccgccggccugaccuacagccagcucaugacgcugaaggacgccaugcugcagcuggacccgaacgcgaagaccuggauggacaucgaggggcgccccgaggaccccguggagguggcccucuaccagcccuccagcggcugcuacauccacuucuuccgggagccgaccgaccugaagcaguucaagcaggacgccaaguacucccacgggaucgacgucaccgaccuguucgccgcccagcccggccucacgagcgcggugaucgacgcccugccccgcaacauggugaucacgugccaggggagcgacgacauccgcaagcugcucgagucccagggccggaaggacaucaagcugaucgacaucgcccugagcaagaccgacucccgcaaguacgagaacgccgucugggaccaguacaaggaccucugccacaugcacaccggcguggucguggagaagaagaagcgcgggggcaaggaggagaucaccccgcacugcgcgcugauggacugcaucauguucgacgccgccgugagcgggggccugaacaccuccguccuccgggccgugcugccccgggacaugguguuccgcaccagcacgccccgggucgugcugugaggacuaguuauaagacugacuagcccgaugggccucccaacgggcccuccuccccuccuugcaccgagauuaaucaaaggcucuuuucagagccaccaaaaaaaaaaaaaaaaaaaaaaaaaaaaaaaaaaaaaaaaaaaaaaaaaaaaaaaaaaaaaaaaagaauu

SEQ ID NO: 20414 - RNA, 1943 nt, Artificial Sequence
  mRNA product Design i-3 (hSL-A64-N5) comprising derived and/or modified sequence from LASV(Mad39;Clade IV)__ANH09723__SP-HsALB_NP(2-569) (opt1)
aggagaaagcuuaccaugaagugggugaccuucaucagccugcucuuccuguucuccagcgccuacuccagcgccuccaaggagaucaagagcuuccuguggacccagucccuccgccgggagcugagcggcuacugcuccaacaucaagcuccagguggucaaggacgcccaggcgcugcugcacgggcuggacuucagcgagguguccaacgugcagcgccucaugcggaagcagcgccgggacgacaacgaccugaagcgccugcgggaccucaaccaggccgucaacaaccugguggagcugaaguccacccagcagaaguccgugcuccgcgucggcacgcugaccagcgacgaccugcucacccuggccgccgaccuggagaagcucaaguccaaggugacccggacggagcgcccccugaccgccgggguguacaugggcaaccugagcucccagcagcucgaccagcggcgcgcgcugcugaacaugaucgggaugagcggcggcaaccagggggcccggaccggccgcgacggggucgugcgggugugggacgucaagaacgccgagcuccugaacaaccaguucggcaccaugccgucccugacgcucgccugccugaccaagcagggccagguggaccugaacgacgugguccaggcgcucaccgaccuggggcugaucuacaccgccaaguaccccaacacgagcgaccucgaccgccugacccagucccaccccauccugaacaugaucgacaccaacaagagcucccucaacaucagcggcuacaacuucagccugggggccgccgugaaggccggcgcgugcaugcuggacgggggcaacaugcucgagaccaucaaggugagcccccagacgauggacggcauccucaagagcauccugaaggucaagaagucccuggggauguucaucagcgacaccccgggcgagcggaaccccuacgagaacauccuguacaagaucugccuguccggggacggcuggcccuacaucgccagccgcaccuccaucaccgggcgggccugggagaacacggugguggaccucgagagcggcggcaagccccagaaggccggguccaacaacagcaacaagucccugcagagcgccggcuucgcggccgggcugaccuacucccagcucaugacccugaaggacgccaugcugcagcuggacccgaacgccaagaccuggauggacaucgagggccgccccgaggaccccgucgagaucgcccucuaccagcccaucagcgggugcuacauccacuucuuccgggagccgacggaccugaagcaguucaagcaggacgcgaaguacucccacggcaucgacgugaccgaccuguucgccgcccagcccggccucaccagcgccgugaucgaggcccugccccgcaacauggucaucacgugccagggguccgacgacauccgcaagcuguucgagagccagggccggaaggacaucaagcucaucgacaucgcgcuguccaagaccgacagccgcaaguacgagaacgccgugugggaccaguacaaggaccugugccacaugcacaccggggucgugguggagaagaagaagaagggcgggaaggaggagaucacgccccacugcgcccucauggacugcaucauguucgacgccgcggucagcggcggccugaacacccuggugcuccgggccgugcugccgcgcgacauggucuuccggaccuccacccccaagguggugcugugaggacuaguuauaagacugacuagcccgaugggccucccaacgggcccuccuccccuccuugcaccgagauuaaucaaaggcucuuuucagagccaccaaaaaaaaaaaaaaaaaaaaaaaaaaaaaaaaaaaaaaaaaaaaaaaaaaaaaaaaaaaaaaaaagaauu

SEQ ID NO: 20415 - RNA, 1943 nt, Artificial Sequence
  mRNA product Design i-3 (hSL-A64-N5) comprising derived and/or modified sequence from LASV(Z0947-SLE-2011;Clade IV)__AIT17841__SP-HsALB_NP(2-569) (opt1)
aggagaaagcuuaccaugaagugggugaccuucaucagccugcucuuccuguucuccagcgccuacuccagcgccuccaaggagaucaagagcuuccuguggacccagucccuccgccgggagcugagcggcuacugcuccaacaucaagcuccagguggucaaggacgcccaggcgcugcugcacgggcuggacuucagcgagguguccaacgugcagcgccucaugcggaaggagcgccgggacgacaacgaccugaagcgccugcgggaccucaaccaggccgucaacaaccugguggagcucaagagcacccagcagaaguccauccugcgcgugggcacccugaccagcgacgaccugcucauccuggccgccgaccuggagaagcucaaguccaaggucacccggaccgagcgcccccugagcgccgggguguacaugggcaaccuguccagccagcagcucgaccagcggcgcgcgcugcugaacaugaucgggauguccggcagcaaccagggcgcccggacggggcgcgacggcgugguccgggugugggacgugaagaacgccgagcuccugaacaaccaguucgggaccaugccgucccugacccucgccugccugaccaagcagggccaggucgaccugaacgacgcggugcaggcccucacggaccuggggcugaucuacaccgccaaguaccccaacaccagcgaccucgaccgccugacccagucccaccccauccugaacaugaucgacacgaagaaguccagccucaacaucuccggcuacaacuucagccugggcgccgccgugaaggcgggggccugcaugcuggacggcgggaacaugcucgagaccaucaaggucagcccccagaccauggacggcauccucaagagcauccugaaggugaagaaggcccugggcauguucaucuccgacgccccgggggagcggaaccccuacgagaacauccuguacaagaucugccugagcggcgacggguggcccuacaucgccucccgcaccagcaucacgggccgggcgugggagaacaccguggucgaccucgaguccgacgggaagccccagaaggccggcagcaacggcuccaacaagagccugcaguccgccggguucaccgccggccugaccuacagccagcucaugacgcugaaggacgccaugcugcagcuggacccgaacgcgaagaccuggauggacaucgaggggcgccccgaggaccccguggagaucgcccucuaccagcccuccagcggcugcuacauccacuucuuccgggagccgaccgaccugaagcaguucaagcaggacgccaaguacucccacgggaucgacgugaccgaccuguucgccgcccagcccggccucacgagcgcggucaucgacgcccugccccgcaacauggugaucacgugccagggcuccgacgacauccgcaagcuguucgagagccaggggcggaaggacaucaagcucaucgacaucgcccugagcaagaccgacucccgcaaguacgagaacgccgugugggaccaguacaaggaccugugccacaugcacaccggcaucgucguggagaagaagaagcgcgggggcaaggaggagaucaccccgcacugcgcgcucauggacugcaucauguucgacgccgccgucagcgggggccugaacaccuccgugcugcgggccgugcucccccgggacauggucuuccgcaccagcacgccccggguggugcugugaggacuaguuauaagacugacuagcccgaugggccucccaacgggcccuccuccccuccuugcaccgagauuaaucaaaggcucuuuucagagccaccaaaaaaaaaaaaaaaaaaaaaaaaaaaaaaaaaaaaaaaaaaaaaaaaaaaaaaaaaaaaaaaaagaauu

SEQ ID NO: 20416 - RNA, 1943 nt, Artificial Sequence
  mRNA product Design i-3 (hSL-A64-N5) comprising derived and/or modified sequence from LASV(Josiah;Clade IV)__NP_694869__SP-HsALB_NP(2-569) (opt4)
aggagaaagcuuaccaugaagugggugaccuucaucagccugcuguuccuguucagcagcgccuacagcagcgccagcaaggagaucaagagcuuccuguggacccagagccugagaagagagcugagcggcuacugcagcaacaucaagcugcagguggugaaggacgcccaggcccugcugcacggccuggacuucagcgaggugagcaacgugcagagacugaugagaaaggagagaagagacgacaacgaccugaagagacugagagaccugaaccaggccgugaacaaccugguggagcugaagagcacccagcagaagagcauccugagagugggcacccugaccagcgacgaccugcugauccuggccgccgaccuggagaagcugaagagcaaggugaucagaaccgagagaccccugagcgccggcguguacaugggcaaccugagcagccagcagcuggaccagagaagagcccugcugaacaugaucggcaugagcggcggcaaccagggcgccagagccggcagagacggcguggugagagugugggacgugaagaacgccgagcugcugaacaaccaguucggcaccaugcccagccugacccuggccugccugaccaagcagggccagguggaccugaacgacgccgugcaggcccugaccgaccugggccugaucuacaccgccaaguaccccaacaccagcgaccuggacagacugacccagagccaccccauccugaacaugaucgacaccaagaagagcagccugaacaucagcggcuacaacuucagccugggcgccgccgugaaggccggcgccugcaugcuggacggcggcaacaugcuggagaccaucaaggugagcccccagaccauggacggcauccugaagagcauccugaaggugaagaaggcccugggcauguucaucagcgacacccccggcgagagaaaccccuacgagaacauccuguacaagaucugccugagcggcgacggcuggcccuacaucgccagcagaaccagcaucaccggcagagccugggagaacaccgugguggaccuggagagcgacggcaagccccagaaggccgacagcaacaacagcagcaagagccugcagagcgccggcuucaccgccggccugaccuacagccagcugaugacccugaaggacgccaugcugcagcuggaccccaacgccaagaccuggauggacaucgagggcagacccgaggaccccguggagaucgcccuguaccagcccagcagcggcugcuacauccacuucuucagagagcccaccgaccugaagcaguucaagcaggacgccaaguacagccacggcaucgacgugaccgaccuguucgccacccagcccggccugaccagcgccgugaucgacgcccugcccagaaacauggugaucaccugccagggcagcgacgacaucagaaagcugcuggagagccagggcagaaaggacaucaagcugaucgacaucgcccugagcaagaccgacagcagaaaguacgagaacgccgugugggaccaguacaaggaccugugccacaugcacaccggcguggugguggagaagaagaagagaggcggcaaggaggagaucaccccccacugcgcccugauggacugcaucauguucgacgccgccgugagcggcggccugaacaccagcgugcugagagccgugcugcccagagacaugguguucagaaccagcacccccagaguggugcugugaggacuaguuauaagacugacuagcccgaugggccucccaacgggcccuccuccccuccuugcaccgagauuaaucaaaggcucuuuucagagccaccaaaaaaaaaaaaaaaaaaaaaaaaaaaaaaaaaaaaaaaaaaaaaaaaaaaaaaaaaaaaaaaaagaauu

SEQ ID NO: 20417 - RNA, 1943 nt, Artificial Sequence
  mRNA product Design i-3 (hSL-A64-N5) comprising derived and/or modified sequence from LASV(LP;Clade I)__AAF86702__SP-HsALB_NP(2-569) (opt4)
aggagaaagcuuaccaugaagugggugaccuucaucagccugcuguuccuguucagcagcgccuacagcagcaacagcaaggagaucaagagcuuccuguggacccagagccugagaagagagcugagcggcuacugcagcaacaucaagcugcagguggugaaggacgcccaggcccugcugcacggccuggacuucagcgaggugagcaacgugcagagacugaugagaaagcagaagagagacgacgccgaccugaagagacugagagaccugaaccaggccgugaacaaccugguggagcugaagagcacccagcagaagaacgugcugagagugggcacccugagcagcgacgaccugaucacccuggccgccgaccuggagaagcugaagagcaaggugaucagaaccgagagaccccugagcagcggcguguacaugggcaaccugagcagccagcagcuggaccagagaagagcccugcugagcaugaucggcaugagcggcggcccccagggcaacagaaccggcggcgacggcguggugagagugugggacgugaagaacgccgagcugcugaacaaccaguucggcaccaugcccagccugacccuggccugccugaccaagcagggccagguggaccugaacgacgccgugcaggcccugaccgaccugggccugaucuacaccgccaaguaccccaacagcagcgaccuggacaugcugacccagagccaccccauccugggcaugguggacaccaagaagagcagccugaacaucagcggcuacaacuucagccugggcgccgccgugaaggccggcgccugcaugcuggacggcggcaacaugcuggagaccaucaaggugagcccccagaccauggacggcauccugaagagcauccugaaggugaagagaagccugggcauguucaucagcgacacccccggcgagagaaaccccuacgagaacauccuguacaagaucugccugagcggcgagggcuggcccuacaucgccagcagaaccagcaucaccggcagagccugggagaacacccugguggaccuggagagcgacaacaagccccccaagcugaacagcgccggcagcaacaagagccugcaggccgccggccugaacgccggccugaccuacagccagcugaugacccugaaggacugcaugcugcagcuggaccccagcagcaagaccuggaucgacaucgagggcagacccgaggaccccguggagaucgcccuguuccagcccagcagcggcugcuacauccacuucuucagagagcccaccgaccugaagcaguucaagcaggacgccaaguacagccacggcaucgacgugaccgaccuguucagcacccagcccggccugaccagcgccgugaucgaggcccugcccagaaacauggugcugaccugccagggcagcgacgacaucaagaagcugcuggagagccagggcagaagagacaucaagcugaucgacaucagccugagcaaggccgacagcagaaaguucgagaacgccgugugggaccaguacaaggaccugugccacaugcacaccggcguggugguggagaagaagaagagaggcggcaaggaggagaucaccccccacugcgcccugcuggacugcaucauguucgacgccgccaccaccggcagccugaacaucaccacccugagagccgugcugcccagagacaugguguucagaaccagcacccccaagguggugcugugaggacuaguuauaagacugacuagcccgaugggccucccaacgggcccuccuccccuccuugcaccgagauuaaucaaaggcucuuuucagagccaccaaaaaaaaaaaaaaaaaaaaaaaaaaaaaaaaaaaaaaaaaaaaaaaaaaaaaaaaaaaaaaaaagaauu

SEQ ID NO: 20418 - RNA, 1943 nt, Artificial Sequence
  mRNA product Design i-3 (hSL-A64-N5) comprising derived and/or modified sequence from LASV(803213;Clade II)__AAF86704__SP-HsALB_NP(2-569) (opt4)
aggagaaagcuuaccaugaagugggugaccuucaucagccugcuguuccuguucagcagcgccuacagcagcgccagcaaggaggugaagagcuuccuguggacccagagccugagaagagagcugagcggcuacugcagcaacaucaagcugcagguggugaaggacgcccaggcccugcugcacggccuggacuucagcgaggugaacaacgugcagagacugaugagaaagcagaagagagacgacggcgaccugaagagacugagagaccugaaccaggccgugaacaaccugguggagcugaagagcacccagcagaagagcauccugagagugggcacccugaccagcgacgaccugcugacccuggccgccgaccuggagaagcugaagagcaaggugaucagaaccgagagaccccugagcagcggcguguacaugggcaaccugagcacccagcagcuggagcagagaagagcccugcugaacaugaucggcauggugggcggcgcccagggcacccagcccggcagagacggcguggugagagugugggacgugaagaaccccgaccugcugaacaaccaguucggcaccaugcccagccugacccuggccugccugaccaagcagggccagguggaccugaacgacgccgugcuggcccugaccgaccugggccugaucuacaccgccaaguaccccaacagcagcgaccuggacagacugagccagagccaccccauccugaacaugguggacaccaagaagagcagccugaacaucagcggcuacaacuucagccugggcgccgccgugaaggccggcgccugcaugcuggacggcggcaacaugcuggagaccaucaaggugaccccccagaccauggacggcauccugaagagcauccugaaggugaagagaagccugggcauguucgugagcgacacccccggcgagagaaaccccuacgagaacauccuguacaagaucugccugagcggcgacggcuggcccuacaucgccagcagaaccagcaucgugggcagagccugggagaacaccaccguggaccuggagagcgacggcaagccccagaaggugggcaccgccggcagcaacaagagccugcagagcgccggcuuccccaccggccugaccuacagccagcugaugacccugaaggacagcaugaugcagcuggaccccagcgccaagaccuggaucgacaucgagggcagacccgaggaccccguggagaucgcccuguaccagcccaugagcggcugcuacauccacuucuucagagagcccaccgaccugaagcaguucaagcaggacgccaaguacagccacggcaucgacguggccgaccuguuccccgcccagcccggccugaccagcgccgugaucgaggcccugcccagaaacauggugcugaccugccagggcagcgacgacaucaagaagcugcuggacagccagggcagaagagacaucaagcugaucgacaucagccugagcaagguggacagcagaaaguucgagaacgccgugugggaccagugcaaggaccugugccacaugcacaccggcguggugguggagaagaagaagagaggcggcaaggaggagaucaccccccacugcgcccugauggacugcaucauguucgacgccgccgugagcggcggccugaacauccccgugcugagagccgugcugcccagagacaugguguucagaaccagcagccccaagguggugcugugaggacuaguuauaagacugacuagcccgaugggccucccaacgggcccuccuccccuccuugcaccgagauuaaucaaaggcucuuuucagagccaccaaaaaaaaaaaaaaaaaaaaaaaaaaaaaaaaaaaaaaaaaaaaaaaaaaaaaaaaaaaaaaaaagaauu

SEQ ID NO: 20419 - RNA, 1946 nt, Artificial Sequence
  mRNA product Design i-3 (hSL-A64-N5) comprising derived and/or modified sequence from LASV(GA391;Clade III)__CAA36646__SP-HsALB_NP(2-570) (opt4)
aggagaaagcuuaccaugaagugggugaccuucaucagccugcuguuccuguucagcagcgccuacagcagcgccagcaaggaggugagaagcuuccuguggacccagagccugagaagagagcugagcggcuacugcagcaacaucaagcugcagguggugaaggacgcccaggcccugcugcacggccuggacuucagcgaggugagcaacgugcagagacugaugagaaagcagaagagagacgacggcgaccugaagagacugagagaccugaaccaggccgugaacaaccugguggagcugaagagcacccagcagaagagcgugcugagagugggcacccugagcagcgacgaccugcugauccuggccgccgaccuggagaagcugaagagcaaggugaccagaaccgagagaccccugagcagcggcguguacaugggcaaccugagcagccagcagcuggaccagagaagagcccugcugaacaugaucggcaugaccggcgugagcggcggcggcaagggcgccagcgacggcaucgugagagugugggacgugaagaacgccgagcugcugaacaaccaguucggcaccaugcccagccugacccuggccugccugaccaagcagggccagguggaccugaacgacgccgugcaggcccugaccgaccugggccugaucuacaccgccaaguaccccaacagcagcgaccuggacagacugagccagagccaccccauccugaacaugaucgacaccaagaagagcagccugaacaucagcggcuacaacuucagccugggcgccgccgugaaggccggcgccugcaugcuggacggcggcaacaugcuggagaccaucaaggugagcccccagaccauggacggcauccugaagagcauccugaaggugaagaagagccugggcauguucgugagcgacacccccggcgagagaaaccccuacgagaacauccuguacaagaucugccugagcggcgacggcuggcccuacaucgccagcagaaccagcaucgugggcagagccugggagaacaccgugguggaccuggagcaggacaacaagccccagaagaucggcaacggcggcagcaacaagagccugcagagcgccggcuucgccgccggccugaccuacagccagcugaugacccugaaggacuucaagugcuucaaccugauccccaacgccaagaccuggauggacaucgagggcagacccgaggaccccguggagaucgcccuguaccagcccagcagcggcugcuacgugcacuucuucagagagcccaccgaccugaagcaguucaagcaggacgccaaguacagccacggcaucgacgugaccgaccuguucgccgcccagcccggccugaccagcgccgugaucgaggcccugcccagaaacauggugaucaccugccagggcagcgaggacaucagaaagcugcuggagagccagggcagaagagacaucaagcugaucgacaucacccugagcaaggccgacagcagaaaguucgagaacgccgugugggaccaguucaaggaccugugccacaugcacaccggcguggugguggagaagaagaagagaggcggcaaggaggagaucaccccccacugcgcccugauggacugcaucauguucgacgccgccgugagcggcggccuggacgccaaggugcugagaguggugcugcccagagacaugguguucagaaccagcacccccaagguggugcugugaggacuaguuauaagacugacuagcccgaugggccucccaacgggcccuccuccccuccuugcaccgagauuaaucaaaggcucuuuucagagccaccaaaaaaaaaaaaaaaaaaaaaaaaaaaaaaaaaaaaaaaaaaaaaaaaaaaaaaaaaaaaaaaaagaauu

SEQ ID NO: 20420 - RNA, 1943 nt, Artificial Sequence
  mRNA product Design i-3 (hSL-A64-N5) comprising derived and/or modified sequence from LASV(AV;Clade V)__CCA30315__SP-HsALB_NP(2-569) (opt4)
aggagaaagcuuaccaugaagugggugaccuucaucagccugcuguuccuguucagcagcgccuacagcagcgccagcaaggaggugaagagcuuccuguggacccagagccugagaagagagcugagcggcuacugcagcaacaucaagcugcagguggugaaggacgcccaggcccugcugcacggccuggacuucagcgaggugagcaacgugcagagacugaugagaaagcagagaagagacgacagcgaccugaagagacugagagaccugaaccaggccgugaacaaccugguggagcugaagagcacccagcagaagagcgugcugagagugggcacccugagcagcgacgaccugcugacccuggccgccgaccuggagaagcugaagagcaaggugaccagaaccgagagaccccugagcagcggcguguacaugggcaaccugagcagccagcagcuggaccagagaagagcccugcugaaccugaucggcaugaccaacggcagccagggcagccaggccggcagagacggcguggugagagugugggacgugaagaacgccgagcugcugaacaaccaguucggcaccaugcccagccugacccuggccugccugaccaagcagggccagguggaccugaacgacguggugcaggcccugaccgaccugggccugaucuacaccgccaaguaccccaacaccagcgaccuggacagacugacccagagccaccccauccugaacaugaucgacaccaagaagagcagccugaacaucagcggcuacaacuucagccugggcgccgccgugaaggccggcgccugcaugcuggacggcggcaacaugcuggagaccaucaaggugagcccccagagcauggacggcauccugaagagcauccugaaggugaagagagcccugggcauguucgugagcgacacccccggcgagagaaaccccuacgagaacauccuguacaagaucugccugagcggcgacggcuggcccuacaucgccagcagaaccagcaucgugggcagagccugggagaacaccgugguggaccuggagaccgacggcaagccccagaagaucggcagcggcaacagcaacaagagccugcagagcgccggcuucagcgccggccugaccuacagccagcugaugacccugaaggacgccaugcugcagcuggaccccaacgccaagaccuggauggacaucgagggcagacccgaggaccccguggagguggcccuguaccagcccaucagcggcugcuacauccacuucuucagagagcccaccgaccugaagcaguucaagcaggacgccaaguacagccacggcaucgacaucgccgaccuguucgccgcccagcccggccugaccagcgccgugaucgaggcccugcccagaaacauggugaucaccugccagggcagcgaggacaucaagaagcugcuggagagccagggcagaaaggacaucaagcugaucgacaucgcccugagcaagaucgacagcagaaaguucgagaacgccgugugggaccaguacaaggaccugugccacaugcacaccggcguggugguggagaagaagaagagaggcggcaaggaggagaucaccccccacugcgcccugauggacugcaucauguucgacgccgccgugagcggcggccugaacacccuggugcugagagccgugcugcccagagacaugguguucagaaccagcacccccagaguggugcugugaggacuaguuauaagacugacuagcccgaugggccucccaacgggcccuccuccccuccuugcaccgagauuaaucaaaggcucuuuucagagccaccaaaaaaaaaaaaaaaaaaaaaaaaaaaaaaaaaaaaaaaaaaaaaaaaaaaaaaaaaaaaaaaaagaauu

SEQ ID NO: 20421 - RNA, 1943 nt, Artificial Sequence
  mRNA product Design i-3 (hSL-A64-N5) comprising derived and/or modified sequence from LASV(Togo/2016/7082;Clade VI)__AMR44578__SP-HsALB_NP(2-569) (opt4)
aggagaaagcuuaccaugaagugggugaccuucaucagccugcuguuccuguucagcagcgccuacagcagcaacagcaaggaggugaagagcuuccuguggacccagagccugagaagagagcugagcggcuacugcagcaacaucaagcugcagguggugaaggacgcccaggcccugcugcacggccuggacuucagcgaggugagcaacgugcagagacugaugagaaagcagaagagagacgacggcgaccugaagagacugagagaccugaaccaggccgugaacaaccugguggagcugaagagcgugcagcagaagagcauccugagagugggcacccugaccagcgacgaccugcugacccuggccgccgaccuggagaagcugaagagcaaggugaccagaaccgagagaccccugagcagcggcguguacaugggcaaccugagcagccagcagcuggaccagagaagagcccugcugagcaugaucggcaugagcggcggcaaccagaacagccagcccaagggcgacggcguggugagagugugggacgugaagaacgccgaccugcugaacaaccaguucggcaccaugcccagccugacccuggccugccugaccaagcagggccagguggaccugaacgacgccgugcaggcccugaccgaccugggccugaucuacaccgccaaguaccccaacagcagcgaccuggacagacugagccagagccaccccauccugaacaugaucgacaccaagaagagcagccugaacaucagcggcuacaacuucagccugggcgccgccaucaagaccggcgccugcaugcuggacggcggcaacaugcuggagaccaucaaggugaccccccagaccauggacggcauccugaagagcauccugaaggugaagagaagccugggcauguucaucagcgacacccccggcgagagaaaccccuacgagaacauccuguacaagaucugccugagcggcgacggcuggcccuacaucgccagcagaaccgccaucaucggcagagccugggagaacaccgugguggaccuggagagcgacagcaagccccagaagaucggcagcaacggcagcaacaagagccugcagagcgccggcuucgcccccggccugaccuacagccagcugaugacccugaaggacagcaugcugcagcuggaccccaacgccaagaccuggaucgacaucgagggcagacccgaggaccccguggagguggcccuguuccagcccaucagcggcugcuacauccacuucuucagagagcccaccgaccugaagcaguucaagcaggacgccaaguacagccacggcaucgacgugaccgaccuguucgccgcccagcccggccugaccagcgccgugaucgaggcccugcccagaaacauggugcugaccugccagggcagcgacgacaucaagaagcugcuggacagccagggcagaagagacaucaagcugaucgacgugagccugaacaagaucgacagcagaaaguucgagaacgccgugugggaccaguacaaggaccugugccacaugcacaccggcguggugguggagaagaagaagaagggcggcaaggaggagaucaccccccacugcgcccugcuggacugcaucauguucgacgccgccgugagcggcggccugaacgccaccgugcugagagccgugcugcccagagacaugguguucagaaccagcagccccaagguggugcugugaggacuaguuauaagacugacuagcccgaugggccucccaacgggcccuccuccccuccuugcaccgagauuaaucaaaggcucuuuucagagccaccaaaaaaaaaaaaaaaaaaaaaaaaaaaaaaaaaaaaaaaaaaaaaaaaaaaaaaaaaaaaaaaaagaauu

SEQ ID NO: 20422 - RNA, 1943 nt, Artificial Sequence
  mRNA product Design i-3 (hSL-A64-N5) comprising derived and/or modified sequence from LASV(KAK-428;Clade n.d. (VII))__ANH09741__SP-HsALB_NP(2-569) (opt4)
aggagaaagcuuaccaugaagugggugaccuucaucagccugcuguuccuguucagcagcgccuacagcagcaacagcaaggaggugaagagcuuccuguggacccagagccugagaagagagcugagcggcuacugcaccaacaucaagcugcagguggugaaggacgcccaggcccugcugcacggccuggacuucagcgaggugagcaacgugcagagacugaugagaaagcagaagagagacgacaacgaccugaagagacugagagaccugaaccaggccgugaacaaccugguggagcugaagagcgugcagcagaagagcgugcugaaggugggcacccugaacagcgacgaccugcugacccuggccgccgaccuggagaagcugaagagcaagguggugagaaccgagagaccccugagcagcggcguguacaugggcaaccugagcagccagcagcuggaccagagaagagcccugcugaacaugaucggcauggccggcggcagccagggcaaccagcccagcagagacggcguggugagagugugggacgugaagaacgccgaccugcugaacaaccaguucggcaccaugcccagccugacccuggccugccugaccaagcagggccagguggaccugaacgacguggugcuggcccugaccgaccugggccugaucuacaccgccaaguaccccaacagcagcgaccuggacagacugagccagaaccaccccgugcugaacaugaucgacgugaacaagagcagccugaacaucagcggcuacaacuucagccugggcgccgccgugaaggccggcgccugcaugcuggacggcggcaacaugcuggagaccaucaagaucagcccccagaccguggacggcauccugaagagcauccugaaggugaagagagcccugggcauguucgugagcgacacccccggcgagagaaaccccuacgagaacauccuguacaaggugugccugagcggcaacggcuggcccuacaucgccagcagaaccagcaucgugggcagagccugggagaacaccgugguggaccuggagagcaacaagaaccagcccaaggugggcaacaacggcagcaacaagaugcugcagagcagcggcuucgccaccggccugaccuacagccagcugaugacccugagagacagcaugcugcagcuggaccccaccgccaagaccuggaucgacaucgagggcagacccgaggaccccguggagcuggcccuguuccagcccagcagcggcugcuacauccacuucuucagagagcccaccgaccugaagcaguucaagcaggacgccaaguacagccacggcaucgacgugaacgaccuguucagcgcccagcccggccugaccagcgccgugcuggaggcccugcccagaaacauggugcugaccugccagggcagcgacgacaucagaaagcugcuggacagccaggacagaaaggacaucaagcugaucgacaucagccugagcaaggccgacgccagaaaguucgagaacgacgugugggaccaguucaaggaccugugccacaugcacaccggcaucgugguggagaagaagaagaagggcggcaagcaggagaugaccccccacugcgcccugcuggacugcaucauguucgacgccgccgugagcggcggccugaacgugcccacccugagagccgugcugcccaccgacaugguguucagaaccaucaccaccaagguggugcugugaggacuaguuauaagacugacuagcccgaugggccucccaacgggcccuccuccccuccuugcaccgagauuaaucaaaggcucuuuucagagccaccaaaaaaaaaaaaaaaaaaaaaaaaaaaaaaaaaaaaaaaaaaaaaaaaaaaaaaaaaaaaaaaaagaauu

SEQ ID NO: 20423 - RNA, 1943 nt, Artificial Sequence; identical to SEQ ID NO: 20417
  mRNA product Design i-3 (hSL-A64-N5) comprising derived and/or modified sequence from LASV(Pinneo-NIG-1969;Clade I)__AIT17837__SP-HsALB_NP(2-569) (opt4)

SEQ ID NO: 20424 - RNA, 1943 nt, Artificial Sequence
  mRNA product Design i-3 (hSL-A64-N5) comprising derived and/or modified sequence from LASV(ISTH0009-NIG-2011;Clade II)__AIT17405__SP-HsALB_NP(2-569) (opt4)
aggagaaagcuuaccaugaagugggugaccuucaucagccugcuguuccuguucagcagcgccuacagcagcgugagcaaggaggugaagagcuuccuguggacccagagccugagaagagagcugagcggcuacugcagcaacaucaagcugcagguggugaaggacgcccaggcccugcugcacggccuggacuucagcgaggugagcaacgugcagagacugaugagaaagcagaagagagacgacagcgaccugaagagacugagagaccugaaccaggccgugaacaaccugguggagcugaagagcacccagcagaagagcauccugagagugggcacccugaccagcgacgaccugcugacccuggccgccgaccuggagaagcugaagagcaaggugaucagaaccgagagaccccugagcagcggcguguacaugggcaaccugagcacccagcagcuggagcagagaagagcccugcugaacaugaucggcauggugggcggcgcccagggcacccagcccggcagagacggcguggugagagugugggacgugaagaaccccgaccugcugaacaaccaguucggcaccaugcccagccugacccuggccugccugaccaagcagggccagguggaccugaacgacgccgugcuggcccugaccgaccugggccugaucuacaccgccaaguaccccaacagcagcgaccuggacagacugagccagagccaccccauccugaacaugguggacaucaagaagagcagccugaacaucagcggcuacaacuucagccugggcgccgccgugaaggccggcgccugcaugcuggacggcggcaacaugcuggagaccaucaaggugaccccccagaccauggacggcauccugaagagcauccugaaggugaagagaagccugggcauguucgugagcgacacccccggcgagagaaaccccuacgagaacauccuguacaagaucugccugagcggcgacggcuggcccuacaucgccagcagaaccagcaucgugggcagagccugggagaacaccaccguggaccuggagagcgacggcaagccccagaaggugggcagcgccggcagcaacaagagccugcagagcgccggcuuccccaccggccugaccuacagccagcugaugacccugaaggacagcaugaugcagcuggaccccagcgccaagaccuggaucgacaucgagggcagacccgaggaccccguggagaucgcccuguaccagcccaugagcggcugcuacauccacuucuucagagagcccaccgaccugaagcaguucaagcaggacgccaaguacagccacggcaucgacguggccgaccuguuccccgcccagcccggccugaccagcgccgugaucgaggcccugcccagaaacauggugcugaccugccagggcagcgacgacaucaagagacugcuggacagccagggcagaagagacaucaagcugaucgacaucgcccugagcaaggccgacagcagaagauucgagaacgccgugugggaccagugcaaggaccugugccacaugcacaccggcguggugguggagaagaagaagagaggcggcaaggaggagaucaccccccacugcgcccugauggacugcaucauguacgacgccgccgugagcggcggccugaacauccccgugcugagagccgugcugcccagagacaugguguucagaaccagcagccccaagguggugcugugaggacuaguuauaagacugacuagcccgaugggccucccaacgggcccuccuccccuccuugcaccgagauuaaucaaaggcucuuuucagagccaccaaaaaaaaaaaaaaaaaaaaaaaaaaaaaaaaaaaaaaaaaaaaaaaaaaaaaaaaaaaaaaaaagaauu

SEQ ID NO: 20425 - RNA, 1943 nt, Artificial Sequence
  mRNA product Design i-3 (hSL-A64-N5) comprising derived and/or modified sequence from LASV(ISTH2010-NIG-2012;Clade II)__AIT17483__SP-HsALB_NP(2-569) (opt4)
aggagaaagcuuaccaugaagugggugaccuucaucagccugcuguuccuguucagcagcgccuacagcagcgccagcaaggaggugaagagcuuccuguggacccagagccugagaagagagcugagcggcuacugcagcaacaucaagcugcagguggugaaggacgcccaggcccugcugcacggccuggacuucagcgaggugagcaacgugcagagacugaugagaaagcagaagagagacgacagcgaccugaagagacugagagaccugaaccaggccgugaacaaccugguggagcugaagagcacccagcagaagagcauccugagagugggcacccugaccagcgacgaccugcugacccuggccgccgaccuggagaagcugaagagcaaggugaucagaaccgagagaccccugagcagcggcguguacaugggcaaccugagcacccagcagcuggagcagagaagagcccugcugaaccugaucggcauggugggcggcgcccagggcacccagcccggcagagacggcguggugagagugugggacgugaagaaccccgaccugcugaacaaccaguucggcaccaugcccagccugacccuggccugccugaccaagcagggccagguggaccugaacgacgccgugcuggcccugaccgaccugggccugaucuacaccgccaaguaccccaacagcagcgaccuggacagacugagccagagccaccccauccugaacaugguggacaccaagaagagcagccugaacaucagcggcuucaacuucagccugggcgccgccgugaaggccggcgccugcaugcuggacggcggcaacaugcuggagaccaucaaggugaccccccagaccauggacggcauccugaagagcauccugaaggugaagaagagccugggcauguucgugagcgacacccccggcgagagaaaccccuacgagaacauccuguacaagaucugccugagcggcgacggcuggcccuacaucgccagcagaaccagcaucgugggcagagccugggagaacaccaccguggaccuggagagcgacggcaagccccacaaggugggcaccgccggcagcaacaagagccugcagagcgccggcuuccccaccggccugaccuacagccagcugaugacccugaaggacagcaugaugcagcuggaccccagcgccaagaccuggaucgacaucgagggcagacccgaggaccccguggagaucgcccuguaccagcccaugagcggcugcuacauccacuucuucagagagcccaccgaccugaagcaguucaagcaggacgccaaguacagccacggcaucgacguggccgaccuguuccccgcccagcccggccugaccagcgccgugaucgaggcccugcccagaaacauggugcugaccugccagggcagcgacgacaucaagagacugcuggacagccagggcagaagagacaucaagcugaucgacaucgcccugagcaaggccgacagcagaagauucgagaacgccgugugggaccagugcaaggaccugugccacaugcacaccggcguggugguggagaagaagaagagaggcggcaaggaggagaucaccccccacugcgcccugauggacugcaucauguacgacgccgccgugagcggcggccugaacauccccgugcugagagccgugcugcccagagacaugguguucagaaccagcagccccaagguggugcugugaggacuaguuauaagacugacuagcccgaugggccucccaacgggcccuccuccccuccuugcaccgagauuaaucaaaggcucuuuucagagccaccaaaaaaaaaaaaaaaaaaaaaaaaaaaaaaaaaaaaaaaaaaaaaaaaaaaaaaaaaaaaaaaaagaauu

SEQ ID NO: 20426 - RNA, 1943 nt, Artificial Sequence
  mRNA product Design i-3 (hSL-A64-N5) comprising derived and/or modified sequence from LASV(Lassa virus/H.sapiens-wt/NGA/2015/ISTH_0543;Clade II)__AVO03640__SP-HsALB_NP(2-569) (opt4)
aggagaaagcuuaccaugaagugggugaccuucaucagccugcuguuccuguucagcagcgccuacagcagcgccagcaaggaggugaagagcuuccuguggacccagagccugagaagagagcugagcggcuacugcagcaacaucaagcugcagguggugaaggacgcccaggcccugcugcacggccuggacuucagcgaggugagcaacgugcagagacugaugagaaagcagaagagagacgacagcgaccugaagagacugagagaccugaaccaggccgugaacaaccugguggagcugaagagcacccagcagaagagcauccugagagugggcacccugaccagcgacgaccugcugacccuggccgccgaccuggagaagcugaagagcaaggugaucagaaccgagagaccccugagcagcggcguguacaugggcaaccugagcacccagcagcuggagcagagaagagcccugcugaacaugaucggcauggugggcggcgcccagggcacccagcccggcagagacggcguggugagagugugggacgugaagaaccccgaccugcugaacaaccaguucggcaccaugcccagccugacccuggccugccugaccaagcagggccagguggaccugaacgacgccgugcuggcccugaccgaccugggccugaucuacaccgccaaguaccccaacagcagcgaccuggacagacugagccagagccaccccauccugaacaugguggacaccaagaagagcagccugaacaucagcggcuacaacuucagccugggcgccgccgugaaggccggcgccugcaugcuggacggcggcaacaugcuggagaccaucaaggugaccccccagaccauggacggcauccugaagagcauccugaaggugaagaagagccugggcauguucgugagcgacacccccggcgagagaaaccccuacgagaacauccuguacaagaucugccugagcggcgacggcuggcccuacaucgccagcagaaccagcaucgugggcagagccugggagaacaccaccguggaccuggagagcgacggcaagccccagaaggugggcagcgccggcagcaacaagagccugcagagcgccggcuuccccaccggccugaccuacagccagcugaugacccugaaggacagcaugaugcagcuggaccccagcgccaagaccuggaucgacaucgagggcagacccgaggaccccguggagaucgcccuguaccagcccaugagcggcugcuacauccacuucuucagagagcccaccgaccugaagcaguucaagcaggacgccaaguacagccacggcaucgacguggccgaccuguuccccgcccagcccggccugaccagcgccgugaucgaggcccugcccagaaacauggugcugaccugccagggcagcgacgacaucaagagacugcuggacagccagggcagaaaggacaucaagcugaucgacaucgcccugagcaaggccgacagcagaagauucgagaacgccgugugggaccagugcaaggaccugugccacaugcacaccggcguggugguggagaagaagaagagaggcggcaaggaggagaucaccccccacugcgcccugauggacugcaucauguacgacgccgccgugagcggcggccugaacauccccgugcugagagccgugcugcccagagacaugguguucagaaccagcagccccaagguggugcugugaggacuaguuauaagacugacuagcccgaugggccucccaacgggcccuccuccccuccuugcaccgagauuaaucaaaggcucuuuucagagccaccaaaaaaaaaaaaaaaaaaaaaaaaaaaaaaaaaaaaaaaaaaaaaaaaaaaaaaaaaaaaaaaaagaauu

SEQ ID NO: 20427 - RNA, 1943 nt, Artificial Sequence
  mRNA product Design i-3 (hSL-A64-N5) comprising derived and/or modified sequence from LASV(Lassa virus/H.sapiens-wt/NGA/2016/ISTH_0009;Clade II)__AVO03572__SP-HsALB_NP(2-569) (opt4)
aggagaaagcuuaccaugaagugggugaccuucaucagccugcuguuccuguucagcagcgccuacagcagcgccagcaaggaggugaagagcuuccuguggacccagagccugagaagagagcugagcggcuacugcagcaacaucaagcugcagguggugaaggacgcccaggcccugcugcacggccuggacuucagcgaggugagcaacgugcagagacugaugagaaagcagaagagagacgacagcgaccugaagagacugagagaccugaaccaggccgugaacaaccugguggagcugaagagcacccagcagaagagcauccugagagugggcacccugaccagcgacgaccugcugacccuggccgccgaccuggagaagcugaagagcaaggugaucagaaccgagagaccccugagcagcggcguguacaugggcaaccugagcacccagcagcuggagcagagaagagcccugcugaacaugaucggcauggugggcggcgcccagggcacccagcccggcagagacggcguggugagagugugggacgugaagaaccccgaccugcugaacaaccaguucggcaccaugcccagccugacccuggccugccugaccaagcagggccagguggaccugaacgacgccgugcuggcccugaccgaccugggccugaucuacaccgccaaguaccccaacagcagcgaccuggacagacugagccagagccaccccauccugaacaugguggacaccaagaagagcagccugaacaucagcggcuacaacuucagccugggcgccgccgugaaggccggcgccugcaugcuggacggcggcaacaugcuggagaccaucaaggugaccccccagaccauggacggcauccugaagagcauccugaaggugaagaagagccugggcauguucgugagcgacacccccggcgagagaaaccccuacgagaacauccuguacaagaucugccugagcggcgacggcuggcccuacaucgccagcagaaccagcaucgugggcagagccugggagaacaccaccguggaccuggagagcgacggcaagccccagaaggugggcagcgccggcagcaacaagagccugcagagcgccggcuuccccaccggccugaccuacagccagcugaugacccugaaggacagcaugaugcagcuggaccccagcgccaagaccuggaucgacaucgagggcagacccgaggaccccguggagaucgcccuguaccagcccaugagcggcugcuacauccacuucuucagagagcccaccgaccugaagcaguucaagcaggacgccaaguacagccacggcaucgacguggccgaccuguuccccgcccagcccggccugaccagcgccgugaucgaggcccugcccagaaacauggugcugaccugccagggcagcgacgacaucaagagacugcuggacagccagggcagaagagacaucaagcugaucgacaucgcccugagcaaggccgacagcagaagauucgagaacgccgugugggaccagugcaaggaccugugccacaugcacaccggcguggugguggagaagaagaagagaggcggcaaggaggagaucaccccccacugcgcccugauggacugcaucauguacgacgccgccgugagcggcggccugaacauccccgugcugagagccgugcugcccagagacaugguguucagaaccagcagccccaagguggugcugugaggacuaguuauaagacugacuagcccgaugggccucccaacgggcccuccuccccuccuugcaccgagauuaaucaaaggcucuuuucagagccaccaaaaaaaaaaaaaaaaaaaaaaaaaaaaaaaaaaaaaaaaaaaaaaaaaaaaaaaaaaaaaaaaagaauu

SEQ ID NO: 20428 - RNA, 1943 nt, Artificial Sequence
  mRNA product Design i-3 (hSL-A64-N5) comprising derived and/or modified sequence from LASV(Lassa virus/H.sapiens-wt/NGA/2016/ISTH_0017;Clade II)__AVO03568__SP-HsALB_NP(2-569) (opt4)
aggagaaagcuuaccaugaagugggugaccuucaucagccugcuguuccuguucagcagcgccuacagcagcgccagcaaggaggugaagagcuuccuguggacccagagccugagaagagagcugagcggcuacugcagcagcaucaagcugcagguggugaaggacgcccaggcccugcugcacggccuggacuucagcgaggugagcaacgugcagagacugaugagaaagcagaagagagacgacagcgaccugaagagacugagagaccugaaccaggccgugaacaaccugguggagcugaagagcacccagcagaagagcauccugagagugggcacccugaccagcgacgaccugcugacccuggccgccgaccuggagaagcugaagagcaaggugaucagaaccgagagaccccugagcagcggcguguacaugggcaaccugagcacccagcagcuggagcagagaagagcccugcugaacaugaucggcauggccggcggcgcccagggcacccagcccggcagagacggcguggugagagugugggacgugaagaaccccgaccugcugaacaaccaguucggcaccaugcccagccugacccuggccugccugaccaagcagggccagguggaccugaacgacgccgugcuggcccugaccgaccugggccugaucuacaccgccaaguaccccaacagcagcgaccuggacagacugagccagagccaccccauccugaacaugguggacaccaagaagagcagccugaacaucagcggcuacaacuucagccugggcgccgccgugaaggccggcgccugcaugcuggacggcggcaacaugcuggagaccaucaaggugaccccccagaccauggacggcauccugaagagcauccugaaggugaagagaagccugggcauguucgugagcgacgcccccggcgagagaaaccccuacgagaacauccuguacaagaucugccugagcggcgacggcuggcccuacaucgccagcagaaccagcaucgugggcagagccugggagaacaccaccguggaccuggagagcgacggcaagccccagaaggugggcgccaccggcagcaacaagagccugcagagcgccggcuuccccaccggccugaccuacagccagcugaugacccugaaggacagcaugaugcagcuggaccccagcgccaagaccuggaucgacaucgagggcagacccgaggaccccguggagguggcccuguaccagcccgugagcggcugcuacauccacuucuucagagagcccaccgaccugaagcaguucaagcaggacgccaaguacagccacggcaucgacguggccgaccuguuccccgcccagcccggccugaccagcgccgugaucgaggcccugcccagaaacauggugcugaccugccagggcagcgacgacaucaagaagcugcuggacagccagggcagaaaggacaucaagcugaucgacaucgcccugagcaaggccgacagcagaagauucgagaacgccgugugggaccagugcaaggaccugugccacaugcacaccggcguggugguggagaagaagaagagaggcggcaaggaggagaucaccccccacugcgcccugauggacugcaucauguacgacgccgccgugagcggcggccugaacauccccgugcugagagccgugcugcccagagacaugguguucagaaccagcagccccaagguggugcugugaggacuaguuauaagacugacuagcccgaugggccucccaacgggcccuccuccccuccuugcaccgagauuaaucaaaggcucuuuucagagccaccaaaaaaaaaaaaaaaaaaaaaaaaaaaaaaaaaaaaaaaaaaaaaaaaaaaaaaaaaaaaaaaaagaauu

SEQ ID NO: 20429 - RNA, 1943 nt, Artificial Sequence
  mRNA product Design i-3 (hSL-A64-N5) comprising derived and/or modified sequence from LASV(Lassa virus/H.sapiens-wt/NGA/2018/ISTH_0959;Clade II)__AVV65100__SP-HsALB_NP(2-569) (opt4)
aggagaaagcuuaccaugaagugggugaccuucaucagccugcuguuccuguucagcagcgccuacagcagcgccagcaaggaggugaagagcuuccuguggacccagagccugagaagagagcugagcggcuacugcagcaacaucaagcugcagguggugaaggacgcccaggcccugcugcacggccuggacuucagcgaggugagcaacgugcagagacugaugagaaagcagaagagagacgacagcgaccugaagagacugagagaccugaaccaggccgugaacaaccugguggagcugaagagcacccagcagaagagcauccugagagugggcacccugaccagcgacgaccugcugacccuggccgccgaccuggagaagcugaagagcaaggugaucagaaccgagagaccccugagcagcggcguguacaugggcaaccugagcacccagcagcuggagcagagaagagcccugcugaaccugaucggcauggugggcggcgcccagggcacccagcccggcagagacggcguggugagagugugggacgugaagaaccccgaccugcugaacaaccaguucggcaccaugcccagccugacccuggccugccugaccaagcagggccagguggaccugaacgacguggugcuggcccugaccgaccugggccugaucuacaccgccaaguaccccaacagcagcgaccuggacagacugagccagagccaccccauccugaacaugguggacaccaagaagagcagccugaacaucagcggcuucaacuucagccugggcgccgccgugaaggccggcgccugcaugcuggacggcggcaacaugcuggagaccaucaaggugaccccccagaccauggacggcauccugaagagcauccugaaggugaagaagagccugggcauguucgugagcgacacccccggcgagagaaaccccuacgagaacauccuguacaagaucugccugagcggcgacggcuggcccuacaucgccagcagaaccagcaucgugggcagagccugggagaacaccaccguggaccuggagagcgacggcaagccccacaaggugggcaccgccggcagcaacaagagccugcagagcgccggcuuccccaccggccugaccuacagccagcugaugacccugaaggacagcaugaugcagcuggaccccagcgccaagaccuggaucgacaucgagggcagacccgaggaccccguggagaucgcccuguaccagcccaugagcggcugcuacauccacuucuucagagagcccaccgaccugaagcaguucaagcaggacgccaaguacagccacggcaucgacguggccgaccuguuccccgcccagcccggccugaccagcgccgugaucgaggcccugcccagaaacauggugcugaccugccagggcagcgacgacaucaagagacugcuggacagccagggcagaaaggacaucaagcugaucgacaucgcccugagcaagaccgacagcagaagauucgagaacgccgugugggaccagugcaaggaccugugccacaugcacaccggcguggugguggagaagaagaagagaggcggcaaggaggagaucaccccccacugcgcccugauggacugcaucauguacgacgccgccgugagcggcggccugaacauccccgugcugagagccgugcugcccagagacaugguguucagaaccagcagccccaagguggugcugugaggacuaguuauaagacugacuagcccgaugggccucccaacgggcccuccuccccuccuugcaccgagauuaaucaaaggcucuuuucagagccaccaaaaaaaaaaaaaaaaaaaaaaaaaaaaaaaaaaaaaaaaaaaaaaaaaaaaaaaaaaaaaaaaagaauu

SEQ ID NO: 20430 - RNA, 1943 nt, Artificial Sequence
  mRNA product Design i-3 (hSL-A64-N5) comprising derived and/or modified sequence from LASV(LASV003-NIG-2008;Clade II)__AIT17581__SP-HsALB_NP(2-569) (opt4)
aggagaaagcuuaccaugaagugggugaccuucaucagccugcuguuccuguucagcagcgccuacagcagcgccagcaaggaggugaagagcuuccuguggacccagagccugagaagagagcugagcggcuacugcagcagcaucaagcugcagguggugaaggacgcccaggcccugcugcacggccuggacuucagcgaggugagcaacgugcagagacugaugagaaagcagaagagagacgacagcgaccugaagagacugagagaccugaaccaggccgugaacaaccugguggagcugaagagcacccagcagaagagcgugcugagagugggcacccugaccagcgacgaccugcugacccuggccgccgaccuggagaagcugaagagcaaggugaucagaaccgagagaccccugagcagcggcguguacaugggcaaccugagcgcccagcagcuggagcagagaagaacccugcugaacaugaucggcauggugggcggcgcccagggcacccagcccggcagagacggcguggugagagugugggacgugaagaaccccgaccugcugaacaaccaguucggcaccaugcccagccugacccuggccugccugaccaagcagggccagguggaccugaacgacguggugcuggcccugaccgaccugggccugaucuacaccgccaaguaccccaacagcagcgaccuggacagacugagccagagccaccccauccugagcaugguggacaccaagaagagcagccugaacaucagcggcuacaacuucagccugggcgccgccgugaaggccggcgccugcaugcuggacggcggcaacaugcuggagaccaucaaggugaccccccagaccauggacggcauccugaagagcauccugaaggugaagaagagccugggcauguucgugagcgacacccccggcgagagaaaccccuacgagaacauccuguacaagaucugccugagcggcgacggcuggcccuacaucgccagcagaaccagcaucgugggcagagccugggagaacaccaccguggaccuggagagcgacggcaagccccagaaggugggcaccgccggcagcaacaagagccugcagagcgccggcuuccccaccggccugaccuacagccagcugaugacccugaaggacagcaugaugcagcuggaccccagcgccaagaccuggaucgacaucgagggcagacccgaggaccccguggagaucgcccuguaccagcccaugagcggcugcuacauccacuucuucagagagcccaccgaccugaagcaguucaagcaggacgccaaguacagccacggcaucgacgugaccgaccuguuccccgcccagcccggccugaccagcgccgugaucgaggcccugcccagaaacauggugcugaccugccagggcagcgacgacaucaagagacugcuggacagccagggcagaagagacaucaagcugaucgacaucgcccugagcaaggccgacagcagaagauucgagaacgccgugugggaccagugcaaggaccugugccacaugcacaccggcguggugguggagaagaagaagagaggcggcaaggaggagaucaccccccacugcgcccugauggacugcaucauguacgacgccgccgugagcggcggccugaacauccccgugcugagagccgugcugcccagagacaugguguucagaaccagcagccccaagguggugcugugaggacuaguuauaagacugacuagcccgaugggccucccaacgggcccuccuccccuccuugcaccgagauuaaucaaaggcucuuuucagagccaccaaaaaaaaaaaaaaaaaaaaaaaaaaaaaaaaaaaaaaaaaaaaaaaaaaaaaaaaaaaaaaaaagaauu

SEQ ID NO: 20431 - RNA, 1943 nt, Artificial Sequence
  mRNA product Design i-3 (hSL-A64-N5) comprising derived and/or modified sequence from LASV(LASV035-NIG-2009;Clade II)__AIT17589__SP-HsALB_NP(2-569) (opt4)
aggagaaagcuuaccaugaagugggugaccuucaucagccugcuguuccuguucagcagcgccuacagcagcgccagcaaggaggugaagagcuuccuguggacccagagccugagaagagagcugagcggcuacugcagcagcaucaagcugcagguggugaaggacgcccaggcccugcugcacggccuggacuucagcgaggugagcaacgugcagagacugaugagaaagcagaagagagacgacagcgaccugaagagacugagagaccugaaccaggccgugaacaaccugguggagcugaagagcacccagcagaagagcauccugagagugggcacccugaccagcgacgaccugcugacccuggccgccgaccuggagaagcugaagagcaaggugaucagaaccgagagaccccugagcagcggcguguacaugggcaaccugagcgcccagcagcuggagcagagaagagcccugcugaacaugaucggcauggugggcggcgcccagggcacccagcccggcagagacggcguggugagagugugggacgugaagaaccccgaccugcugaacaaccaguucggcaccaugcccagccugacccuggccugccugaccaagcagggccagguggaccugaacgacgccgugcuggcccugaccgaccugggccugaucuacaccgccaaguaccccaacagcagcgaccuggacagacugagccagagccaccccauccugaacaugguggacaccaagaagagcagccugaacaucagcggcuacaacuucagccugggcgccgccgugaaggccggcgccugcaugcuggacggcggcaacaugcuggagaccaucaaggugaccccccagaccauggacggcauccugaagagcauccugaaggugaagagaagccugggcauguucgugagcgacacccccggcgagagaaaccccuacgagaacauccuguacaagaucugccugagcggcgacggcuggcccuacaucgccagcagaaccagcaucgugggcagagccugggagaacaccaccguggaccuggagagcgacggcaagccccagaaggugggcaccaccggcagcaacaagagccugcagagcgccggcuuccccaccggccugaccuacagccagcugaugacccugaaggacagcaugaugcagcuggaccccagcgccaagaccuggaucgacaucgagggcagacccgaggaccccguggagaucgcccuguaccagcccaugagcggcugcuacauccacuucuucagagagcccaccgaccugaagcaguucaagcaggacgccaaguacagccacggcaucgacguggccgaccuguuccccgcccagcccggccugaccagcgccgugaucgaggcccugcccagaaacauggugcugaccugccagggcagcgacgacaucaagaagcugcuggacagccagggcagaagagacaucaagcugaucgacaucgcccugagcaaggccgacagcagaaaguucgagaacgccgugugggaccagugcaaggaccugugccacaugcacaccggcguggugguggagaagaagaagagaggcggcaaggaggagaucaccccccacugcgcccugauggacugcaucauguacgacgccgccgugagcggcggccugaacauccccgugcugagagccgugcugcccagagacaugguguucagaaccagcagccccaagguggugcugugaggacuaguuauaagacugacuagcccgaugggccucccaacgggcccuccuccccuccuugcaccgagauuaaucaaaggcucuuuucagagccaccaaaaaaaaaaaaaaaaaaaaaaaaaaaaaaaaaaaaaaaaaaaaaaaaaaaaaaaaaaaaaaaaagaauu

SEQ ID NO: 20432 - RNA, 1943 nt, Artificial Sequence
  mRNA product Design i-3 (hSL-A64-N5) comprising derived and/or modified sequence from LASV(LASV1000-NIG-2009;Clade II)__AIT17783__SP-HsALB_NP(2-569) (opt4)
aggagaaagcuuaccaugaagugggugaccuucaucagccugcuguuccuguucagcagcgccuacagcagcgccagcaaggaggugaagagcuuccuguggacccagagccugagaagagagcugagcggcuacugcagcaacaucaagcugcagguggugaaggacgcccaggcccugcugcacggccuggacuucagcgaggugagcaacgugcagagacugaugagaaagcagaagagagacgacagcgaccugaagagacugagagaccugaaccaggccgugaacaaccugguggagcugaagagcacccagcagaagagcauccugagagugggcacccugaccagcgacgaccugcugacccuggccgccgaccuggagaagcugaagagcaaggugaucagaaccgagagaccccugagcagcggcguguacaugggcaaccugagcacccagcagcuggagcagagaagagcccugcugaacaugaucggcauggugggcggcgcccagggcacccagcccggcagagacggcguggugagagugugggacgugaagaaccccgaccugcugaacaaccaguucggcaccaugcccagccugacccuggccugccugaccaagcagggccagguggaccugaacgacguggugcuggcccugaccgaccugggccugaucuacaccgccaaguaccccaacagcagcgaccuggacagacugagccagagccaccccauccugaacaugguggacaccaagaagagcagccugaacaucagcggcuacaacuucagccugggcgccgccgugaaggccggcgccugcaugcuggacggcggcaacaugcuggagaccaucaaggugaccccccagaccauggacggcauccugaagagcauccugaaggugaagaagagccugggcauguucgugagcgacacccccggcgagagaaaccccuacgagaacauccuguacaagaucugccugagcggcgacggcuggcccuacaucgccagcagaaccagcaucgugggcagagccugggagaacaccaccguggaccuggagagcgacggcaagccccagaaggugggcaccgccggcagcaacaagagccugcagagcgccggcuuccccaccggccugaccuacagccagcugaugacccugaaggacagcaugaugcagcuggaccccagcgccaagaccuggaucgacaucgagggcagacccgaggaccccguggagaucgcccuguaccagcccgugagcggcugcuacauccacuucuucagagagcccaccgaccugaagcaguucaagcaggacgccaaguacagccacggcaucgacguggccgaccuguuccccgcccagcccggccugaccagcgccgugaucgaggcccugcccagaaacauggugcugaccugccagggcagcgacgacaucaagagacugcuggacagccagggcagaagagacaucaagcugaucgacaucgcccugagcaaggccgacagcagaagauucgagaacgccgugugggaccagugcaaggaccugugccacaugcacaccggcguggugguggagaagaagaagagaggcggcaaggaggagaucaccccccacugcgcccugauggacugcaucauguacgacgccgccgugagcggcggccugaacauccccgugcugagagccgugcugcccagagacaugguguucagaaccagcagccccaagguggugcugugaggacuaguuauaagacugacuagcccgaugggccucccaacgggcccuccuccccuccuugcaccgagauuaaucaaaggcucuuuucagagccaccaaaaaaaaaaaaaaaaaaaaaaaaaaaaaaaaaaaaaaaaaaaaaaaaaaaaaaaaaaaaaaaaagaauu

SEQ ID NO: 20433 - RNA, 1943 nt, Artificial Sequence
  mRNA product Design i-3 (hSL-A64-N5) comprising derived and/or modified sequence from LASV(LASV221-NIG-2010;Clade II)__AIT17625__SP-HsALB_NP(2-569) (opt4)
aggagaaagcuuaccaugaagugggugaccuucaucagccugcuguuccuguucagcagcgccuacagcagcgccagcaaggaggugaagagcuuccuguggacccagagccugagaagagagcugagcggcuacugcagcagcaucaagcugcagguggugaaggacgcccaggcccugcugcacggccuggacuucagcgaggugagcaacgugcagagacugaugagaaagcagagaagagacgacagcgaccugaagagacugagagaccugaaccaggccgugaacaaccugguggagcugaagagcacccagcagaagagcauccugagagugggcacccugaccagcgacgaccugcugacccuggccgccgaccuggagaagcugaagagcaaggugaucagaaccgagagaccccugagcagcggcguguacaugggcaaccugagcacccagcagcuggagcagagaagagcccugcugaacaugaucggcauggugggcggcgcccagggcacccagcccggcagagacggcguggugagagugugggacgugaagaaccccgaccugcugaacaaccaguucggcaccaugcccagccugacccuggccugccugaccaagcagggccagguggaccugaacgacgccgugcuggcccugaccgaccugggccugaucuacaccgccaaguaccccaacagcagcgaccuggacagacugagccagagccaccccauccugaacaugguggacaccaagaagagcagccugaacaucagcggcuacaacuucagccugggcgccgccgugaaggccggcgccugcaugcuggacggcggcaacaugcuggagaccaucaaggugaccccccagaccguggacggcauccugaagagcauccugaaggugaagagaagccugggcauguucgugagcgacacccccggcgagagaaaccccuacgagaacauccuguacaagaucugccugagcggcgacggcuggcccuacaucgccagcagaaccagcaucgugggcagagccugggagaacaccaccguggaccuggagagcgacggcaagccccagaaggugggcaccgccggcagcaacaagagccugcagagcgccggcuuccccaccggccugaccuacagccagcugaugacccugaaggacagcaugaugcagcuggaccccagcgccaagaccuggaucgacaucgagggcagacccgaggaccccguggagaucgcccuguaccagcccaugagcggcugcuacauccacuucuucagagagcccaccgaccugaagcaguucaagcaggacgccaaguacagccacggcaucgacguggccgaccuguuccccgcccagcccggccugaccagcgccgugaucgaggcccugcccagaaacauggugcugaccugccagggcagcgacgacaucaagagacugcuggacagccagggcagaagagacaucaagcugaucgacaucgcccugagcaaggccgacagcagaaaguucgagaacgccgugugggaccagugcaaggaccugugccacaugcacaccggcguggugguggagaagaagaagagaggcggcaaggaggagaucaccccccacugcgcccugauggacugcaucauguacgacgccgccgugagcggcggccugaacauccccgugcugagagccgugcugcccagagacaugguguucagaaccagcagccccaagguggugcugugaggacuaguuauaagacugacuagcccgaugggccucccaacgggcccuccuccccuccuugcaccgagauuaaucaaaggcucuuuucagagccaccaaaaaaaaaaaaaaaaaaaaaaaaaaaaaaaaaaaaaaaaaaaaaaaaaaaaaaaaaaaaaaaaagaauu

SEQ ID NO: 20434 - RNA, 1943 nt, Artificial Sequence
  mRNA product Design i-3 (hSL-A64-N5) comprising derived and/or modified sequence from LASV(LASV237-NIG-2010;Clade II)__AIT17639__SP-HsALB_NP(2-569) (opt4)
aggagaaagcuuaccaugaagugggugaccuucaucagccugcuguuccuguucagcagcgccuacagcagcgccagcaaggaggugaagagcuuccuguggacccagagccugagaagagagcugagcggcuacugcagcaacaucaagcugcagguggugaaggacgcccaggcccugcugcacggccuggacuucagcgaggugagcaacgugcagagacugaugagaaagcagaagagagacgacagcgaccugaagagacugagagaccugaaccaggccgugaacaaccugguggagcugaagagcacccagcagaagagcauccugagagugggcacccugaccagcgacgaccugcugacccuggccgccgaccuggagaagcugaagagcaaggugaucagaaccgagagaccccugagcagcggcguguacaugggcaaccugagcacccagcagcuggagcagagaagagcccugcugaacaugaucggcauggugggcggcgcccagggcacccagcccggcagagacggcguggugagagugugggacgugaagaaccccgaccugcugaacaaccaguucggcaccaugcccagccugacccuggccugccugaccaagcagggccagguggaccugaacgacgccgugcuggcccugaccgaccugggccugaucuacaccgccaaguaccccaacagcagcgaccuggacagacugagccagagccaccccauccugaacaugguggacaucaagaagagcagccugaacaucagcggcuacaacuucagccugggcgccgccgugaaggccggcgccugcaugcuggacggcggcaacaugcuggagaccaucaaggugaccccccagaccauggacggcauccugaagagcauccugaaggugaagagaagccugggcauguucgugagcgacacccccggcgagagaaaccccuacgagaacauccuguacaagaucugccugagcggcgacggcuggcccuacaucgccagcagaaccagcaucgugggcagagccugggagaacaccaccguggaccuggagagcgacggcaagccccagaaggugggcagcgccggcagcaacaagagccugcagagcgccggcuuccccaccggccugaccuacagccagcugaugacccugaaggacagcaugaugcagcuggaccccagcgccaagaccuggaucgacaucgagggcagacccgaggaccccguggagaucgcccuguaccagcccaugagcggcugcuacauccacuucuucagagagcccaccgaccugaagcaguucaagcaggacgccaaguacagccacggcaucgacguggccgaccuguuccccgcccagcccggccugaccagcgccgugaucgaggcccugcccagaaacauggugcugaccugccagggcagcgacgacaucaagagacugcuggacagccagggcagaagagacaucaagcugaucgacaucgcccugagcaaggccgacagcagaagauucgagaacgccgugugggaccagugcaaggaccugugccacaugcacaccggcguggugguggagaagaagaagagaggcggcaaggaggagaucaccccccacugcgcccugauggacugcaucauguacgacgccgccgugagcggcggccugaacauccccgugcugagagccgugcugcccagagacaugguguucagaaccagcagccccaagguggugcugugaggacuaguuauaagacugacuagcccgaugggccucccaacgggcccuccuccccuccuugcaccgagauuaaucaaaggcucuuuucagagccaccaaaaaaaaaaaaaaaaaaaaaaaaaaaaaaaaaaaaaaaaaaaaaaaaaaaaaaaaaaaaaaaaagaauu

SEQ ID NO: 20435 - RNA, 1943 nt, Artificial Sequence
  mRNA product Design i-3 (hSL-A64-N5) comprising derived and/or modified sequence from LASV(LASV253-NIG-2011;Clade II)__AIT17671__SP-HsALB_NP(2-569) (opt4)
aggagaaagcuuaccaugaagugggugaccuucaucagccugcuguuccuguucagcagcgccuacagcagcgccagcaaggaggugaagagcuuccuguggacccagagccugagaagagagcugagcggcuacugcagcagcaucaagcugcagguggugaaggacgcccaggcccugcugcacggccuggacuucagcgaggugagcaacgugcagagacugaugagaaagcagaagagagacgacagcgaccugaagagacugagagaccugaaccaggccgugaacaaccugguggagcugaagagcacccagcagaagagcgugcugagagugggcacccugaccagcgacgaccugcugacccuggccgccgaccuggagaagcugaagagcaaggugaucagaaccgagagaccccugagcagcggcguguacaugggcaaccugagcacccagcagcuggagcagagaagagcccugcugaacaugaucggcauggugggcggcgcccagggcacccagcccggcagagacggcguggugagagugugggacgugaagaaccccgaccugcugaacaaccaguucggcaccaugcccagccugacccuggccugccugaccaagcagggccagguggaccugaacgacguggugcuggcccugaccgaccugggccugaucuacaccgccaaguaccccaacagcagcgaccuggacagacugagccagagccaccccauccugaacaugguggacaccaagaagagcagccugaacaucagcggcuacaacuucagccugggcgccgccgugaaggccggcgccugcaugcuggacggcggcaacaugcuggagaccaucaaggugaccccccagaccauggacggcauccugaagagcauccugaaggugaagaagagccugggcauguucgugagcgacacccccggcgagagaaaccccuacgagaacauccuguacaagaucugccugagcggcgacggcuggcccuacaucgccagcagaaccagcaucgugggcagagccugggagaacaccaccguggaccuggagagcgacggcaagccccagaaggugggcaccgccggcagcaacaagagccugcagagcgccggcuuccccaccggccugaccuacagccagcugaugacccugaaggacagcaugaugcagcuggaccccagcgccaagaccuggaucgacaucgagggcagacccgaggaccccguggagaucgcccuguaccagcccaugagcggcugcuacauccacuucuucagagagcccaccgaccugaagcaguucaagcaggacgccaaguacagccacggcaucgacgugaccgaccuguuccccgcccagcccggccugaccagcgccgugaucgaggcccugcccagaaacauggugcugaccugccagggcagcgacgacaucaagagacugcuggacagccagggcagaagagacaucaagcugaucgacaucgcccugagcaaggccgacagcagaagauucgagaacgccgugugggaccagugcaaggaccugugccacaugcacaccggcguggugguggagaagaagaagagaggcggcaaggaggagaucaccccccacugcgcccugauggacugcaucauguacgacgccgccgugagcggcggccugaacauccccgugcugagagccgugcugcccagagacaugguguucagaaccagcagccccaagguggugcugugaggacuaguuauaagacugacuagcccgaugggccucccaacgggcccuccuccccuccuugcaccgagauuaaucaaaggcucuuuucagagccaccaaaaaaaaaaaaaaaaaaaaaaaaaaaaaaaaaaaaaaaaaaaaaaaaaaaaaaaaaaaaaaaaagaauu

SEQ ID NO: 20436 - RNA, 1943 nt, Artificial Sequence
  mRNA product Design i-3 (hSL-A64-N5) comprising derived and/or modified sequence from LASV(LASV254-NIG-2011;Clade II)__AIT17675__SP-HsALB_NP(2-569) (opt4)
aggagaaagcuuaccaugaagugggugaccuucaucagccugcuguuccuguucagcagcgccuacagcagcgccagcaaggaggugaagagcuuccuguggacccagagccugagaagagagcugagcggcuacugcagcagcaucaagcugcagguggugaaggacgcccaggcccugcugcacggccuggacuucagcgaggugagcaacgugcagagacugaugagaaagcagaagagagacgacagcgaccugaagagacugagagaccugaaccaggccgugaacaaccugguggagcugaagagcacccagcagaagagcgugcugagagugggcacccugaccagcgacgaccugcugacccuggccgccgaccuggagaagcugaagagcaaggugaucagaaccgagagaccccugagcagcggcguguacaugggcaaccugagcacccagcagcuggagcagagaagagcccugcugaacaugaucggcauggugggcggcgcccagggcacccagcccggcagagacggcguggugagagugugggacgugaagaaccccgaccugcugaacaaccaguucggcaccaugcccagccugacccuggccugccugaccaagcagggccagguggaccugaacgacgccgugcuggcccugaccgaccugggccugaucuacaccgccaaguaccccaacagcagcgaccuggacagacugagccagagccaccccauccugaacaugguggacaccaagaagagcagccugaacaucagcggcuacaacuucagccugggcgccgccgugaaggccggcgccugcaugcuggacggcggcaacaugcuggagaccaucaaggugaccccccagaccauggacggcauccugaagagcauccugaaggugaagaagagccugggcauguucgugagcgacacccccggcgagagaaaccccuacgagaacauccuguacaagaucugccugagcggcgacggcuggcccuacaucgccagcagaaccagcaucgugggcagagccugggagaacaccaucguggaccuggagagcgacggcaagccccagaaggugggcaccgccggcagcaacaagagccugcagagcgccggcuuccccaccggccugaccuacagccagcugaugacccugaaggacagcaugaugcagcuggaccccagcgccaagaccuggaucgacaucgagggcagacccgaggaccccguggagaucgcccuguaccagcccaugagcggcugcuacauccacuucuucagagagcccaccgaccugaagcaguucaagcaggacgccaaguacagccacggcaucgacguggccgaccuguuccccgcccagcccggccugaccagcgccgugaucgaggcccugcccagaaacauggugcugaccugccagggcagcgacgacaucaagagacugcuggacagccagggcagaagagacaucaagcugaucgacaucgcccugagcaaggccgacagcagaagauucgagaacgccgugugggaccagugcaaggaccugugccacaugcacaccggcguggugguggagaagaagaagagaggcggcaaggaggagaucaccccccacugcgcccugauggacugcaucauguacgacgccgccgugagcggcggccugaacauccccgugcugagagccgugcugcccagagacaugguguucagaaccagcagccccaagguggugcugugaggacuaguuauaagacugacuagcccgaugggccucccaacgggcccuccuccccuccuugcaccgagauuaaucaaaggcucuuuucagagccaccaaaaaaaaaaaaaaaaaaaaaaaaaaaaaaaaaaaaaaaaaaaaaaaaaaaaaaaaaaaaaaaaagaauu

SEQ ID NO: 20437 - RNA, 1943 nt, Artificial Sequence
  mRNA product Design i-3 (hSL-A64-N5) comprising derived and/or modified sequence from LASV(Nig08-04;Clade II)__ADU56611__SP-HsALB_NP(2-569) (opt4)
aggagaaagcuuaccaugaagugggugaccuucaucagccugcuguuccuguucagcagcgccuacagcagcgccagcaaggaggugaagagcuuccuguggacccagagccugagaagagagcugagcggcuacugcagcaacaucaagcugcagguggugaaggacgcccaggcccugcugcacggccuggacuucagcgaggugagcaacgugcagagacugaugagaaagcagaagagagacgacggcgaccugaagagacugagagaccugaaccaggccgugaacaaccugguggagcugaagagcacccagcagaagagcgugcugagagugggcacccugaccagcgacgaccugcugacccuggccgccgaccuggagaagcugaagagcaaggugaucagaaccgagagaccccugagcagcggcguguacaugggcaaccugagcacccagcagcuggagcagagaaaggcccugcugagcaugaucggcauggugggcggcgcccagggcacccagcccggcagagacggcguggugagagugugggacgugaagaaccccgaccugcugaacaaccaguucggcaccaugcccagccugacccuggccugccugaccaagcagggccagguggaccugaacgacgccgugcuggcccugaccgaccugggccugaucuacaccgccaaguaccccaacagcagcgaccuggacagacugagccagagccaccccauccugaacaugguggacaccaagaagagcagccugaacaucagcggcuacaacuucagccugggcgccgccgugaaggccggcgccugcaugcuggacggcggcaacaugcuggagaccaucaaggugaccccccagaccauggacggcauccugaagagcauccugaaggugaagagaagccugggcauguucgugagcgacacccccggcgagagaaaccccuacgagaacauccuguacaagaucugccugagcggcgacggcuggcccuacaucgccagcagaaccagcaucgugggcagagccugggagaacaccaccguggaccuggagagcgacggcaagccccagaaggugggcaccgccggcagcaacaagagccugcagagcgccggcuuccccaccggccugaccuacagccagcugaugacccugaaggacagcaugaugcagcuggaccccagcgccaagaccuggaucgacaucgagggcagacccgaggaccccguggagaucgcccuguaccagcccaugagcggcugcuacauccacuucuucagagagcccaccgaccugaagcaguucaagcaggacgccaaguacagccacggcaucgacgugaccgaccuguucagcgcccagcccggccugaccagcgccgugaucgaggcccugcccagaaacauggugcugaccugccagggcagcgacgacaucaagaagcugcuggacagccagggcagaagagacaucaagcugaucgacaucagccugaacaaggccgacagcagaagauucgagaacgccgugugggaccagugcaaggaccugugccacaugcacaccggcguggugguggagaagaagaagagaggcggcaaggaggagaucaccccccacugcgcccugauggacugcaucauguucgacgccgccgugagcggcggccugaacauccccauccugagagccgugcugcccagagacaugguguucagaaccagcagccccaagguggugcugugaggacuaguuauaagacugacuagcccgaugggccucccaacgggcccuccuccccuccuugcaccgagauuaaucaaaggcucuuuucagagccaccaaaaaaaaaaaaaaaaaaaaaaaaaaaaaaaaaaaaaaaaaaaaaaaaaaaaaaaaaaaaaaaaagaauu

SEQ ID NO: 20438 - RNA, 1946 nt, Artificial Sequence
  mRNA product Design i-3 (hSL-A64-N5) comprising derived and/or modified sequence from LASV(GA391;Clade III)__AAA46284__SP-HsALB_NP(2-570) (opt4)
aggagaaagcuuaccaugaagugggugaccuucaucagccugcuguuccuguucagcagcgccuacagcagcgccagcaaggaggugagaagcugccuguggacccagagccugagaagagagcugagcggcuacugcagcaacaucaagcugcagguggugaaggacgcccaggcccugcugcacggccuggacuucagcgaggugagcaacgugcagagacugaugagaaagcagaagagagacgacggcgaccugaagagacugagagaccugaaccaggccgugaacaaccugguggagcugaagagcacccagcagaagagcgugcugagagugggcacccugagcagcgacgaccugcugauccuggccgccgaccuggagaagcugaagagcaaggugaccagaaccgagagaccccugagcagcggcguguacaugggcaaccugagcagccagcagcuggaccagagaagagcccugcugaacaugaucggcaugaccggcgugagcggcggcggcaagggcgccagcaacggcaucgugagagugugggacgugaagaacgccgagcugcugaacaaccaguucggcaccaugcccagccugacccuggccugccugaccaagcagggccagguggaccugaacgacgccgugcaggcccugaccgaccugggccugaucuacaccgccaaguaccccaacagcagcgaccuggacagacugagccagagccaccccauccugaacaugaucgacaccaagaagagcagccugaacaucagcggcuacaacuucagccugggcgccgccgugaaggccggcgccugcaugcuggacggcggcaacaugcuggagaccaucaaggugagcccccagaccauggacggcauccugaagagcauccugaaggugaagaagagccugggcauguucgugagcgacacccccggcgagagaaaccccuacgagaacauccuguacaagaucugccugagcggcgacggcuggagcuacaucgccagcagaaccagcaucgugggcagagccugggagaacaccgugguggaccuggagcaggacaacaagccccagaagaucggcaacggcggcagcaacaagagccugcagagcgccggcuucgccgccggccugaucuacagccagcugaugacccugaaggacuucaagugcuucaaccugauccccaacgccaagaccuggauggacaucgagggcagacccgaggaccccguggagaucgcccuguaccagcccagcagcggcugcuacgugcacuucuucagagagcccaccgaccugaagcaguucaagcaggacgccaaguacagccacggcagagacgugaccgaccuguucgccgcccagcccggccugaccagcgccgugaucgaggcccugcccagaaacauggugaucaccugccagggcagcgaggacaucagaaagcugcuggagagccagggcagaagagacaucaagcugaucgacaucacccugagcaaggccgacagcagaaaguucgagaacgccgugugggaccaguucaaggaccugugccacaugcacaccggcguggugguggagaagaagaagagaggcggcaaggaggagaucaccccccacugcgcccugauggacugcaucauguucgacgccgccgugagcggcggccuggacgccaaggugcugagaguggugcugcccagagacaugguguucagaaccagcacccccaagguggugcugugaggacuaguuauaagacugacuagcccgaugggccucccaacgggcccuccuccccuccuugcaccgagauuaaucaaaggcucuuuucagagccaccaaaaaaaaaaaaaaaaaaaaaaaaaaaaaaaaaaaaaaaaaaaaaaaaaaaaaaaaaaaaaaaaagaauu

SEQ ID NO: 20439 - RNA, 1943 nt, Artificial Sequence
  mRNA product Design i-3 (hSL-A64-N5) comprising derived and/or modified sequence from LASV(Nig08-A19;Clade III)__ADU56619__SP-HsALB_NP(2-569) (opt4)
aggagaaagcuuaccaugaagugggugaccuucaucagccugcuguuccuguucagcagcgccuacagcagcgccagcaaggaggugaagagcuuccuguggacccagagccugagaagagagcugagcggcuacugcagcaacaucaagcugcagguggugaaggacgcccaggcccugcugcacggccuggacuucagcgaggugagcaacgugcagagacugaugagaaagcagaagagagacgacggcgaccugaagagacugagagaccugaaccaggccgugaacaaccugguggagcugaagagcacccagcagaagagcgugcugagagugggcacccugagcagcgacgaccugcuggugcuggccgccgaccuggagaagcugaagagcaagguggugagaaccgagagaccccugagcagcggcaucuacaugggcaaccugagcagccagcagcuggaccagagaaaggcccugcugaacaugaucggcaugaccggcggcaacggcggcagaaacaccaccagcgacggcaucgugagagugugggacgugaagaacgccgagcugcugaacaaccaguucggcaccaugcccagccugacccuggccugccugaccaagcagggccagguggaccugaacgacgccgugcaggcccugaccgaccugggccugaucuacaccgccaaguaccccaacagcagcgaccuggacagacuggcccagagccaccccauccugaacaugaucgacaccaagaagagcagccugaacaucagcggcuacaacuucagccugggcgccgccgugaaggccggcgccugcaugcuggacggcggcaacaugcuggagaccaucaaggugagcccccagaccauggacggcauccugaagagcauccugaaggugaagagaagccugggcauguucaucagcgacacccccggcgagagaaaccccuacgagaacauccuguacaagaucugccugagcggcgacggcuggcccuacaucgccagcagaaccagcaucgugggcagagccugggagaacaccgugguggaccuggagagcgacaacaagccccagaagaccggcaacggcggcagcaacaagagccugcagagcgccggcuucgccgccggccugaccuacagccagcugaugacccugaaggacagcaugcugcagcuggaccccaacgccaagaccuggauggacaucgagggcagacccgaggaccccguggagaucgcccuguaccagcccagcagcggcugcuacauccacuucuucagagagcccaccgaccugaagcaguucaagcaggacgccaaguacagccacggcaucgacgugaccgaccuguucgccgcccagcccggccugaccagcgccgugaucgaggcccugcccagaaacauggugaucaccugccagggcagcgaggacaucagaaagcugcuggagagccagggcagaagagacaucaagcugaucgacaucagccugagcaagguggacagcagaaaguucgagaacgccgugugggaccaguucaaggaccugugccacaugcacaccggcaucgugguggagaagaagaagagaggcggcaaggaggagaucaccccccacugcgcccugauggacugcaucauguucgacgccgccgugagcggcggcguggacgccaaggugcugagagccgugcugcccagagacaugguguucagaaccagcacccccaagguggugcugugaggacuaguuauaagacugacuagcccgaugggccucccaacgggcccuccuccccuccuugcaccgagauuaaucaaaggcucuuuucagagccaccaaaaaaaaaaaaaaaaaaaaaaaaaaaaaaaaaaaaaaaaaaaaaaaaaaaaaaaaaaaaaaaaagaauu

SEQ ID NO: 20440 - RNA, 1943 nt, Artificial Sequence
  mRNA product Design i-3 (hSL-A64-N5) comprising derived and/or modified sequence from LASV(G1180-SLE-2010;Clade IV)__AIT17169__SP-HsALB_NP(2-569) (opt4)
aggagaaagcuuaccaugaagugggugaccuucaucagccugcuguuccuguucagcagcgccuacagcagcgccagcaaggagaucaagagcuuccuguggacccagagccugagaagagagcugagcggcuacugcagcaacaucaagcugcagguggugaaggacgcccaggcccugcugcacggccuggacuucagcgaggugagcaacgugcagagacugaugagaaaggagagaagagacgacaacgaccugaagagacugagagaccugaaccaggccgugaacaaccugguggagcugaagagcacccagcagaagagcauccugagagugggcacccugaccagcgacgaccugcugauccuggccgccgaccuggagaagcugaagagcaaggugaucagaaccgagagaccccugagcgccggcguguacaugggcaaccugagcagccagcagcuggaccagagaagagcccugcugagcaugaucggcaugagcagcggcaaccagagagcccaggccggcagagacggcguggugagagugugggacgugaagaacguggagcugcugaacaaccaguucggcaccaugcccagccugacccuggccugccugaccaagcagggccagguggaccugaacgacgccgugcaggcccugaccgaccugggccugaucuacaccgccaaguaccccaacaccagcgaccuggacagacugacccagagccaccccauccugaacaugaucgacaccaagaagagcagccugaacaucagcggcuacaacuucagccugggcgccgccgugaaggccggcgccugcaugcuggacggcggcaacaugcuggagaccaucaaggugagcccccagaccauggacggcauccugaagagcauccugaaggugaagaaggcccugggcauguucaucagcgacacccccggcgagagaaaccccuacgagaacauccuguacaagaucugccugagcggcgacggcuggcccuacaucgccagcagaaccagcaucaccggcagagccugggagaacaccgugguggaccuggagagcgacggcaagccccagaaggccggcagcaacaacagcaacaagagccugcagagcgugggcuucaccgccggccugaccuacagccagcugaugacccugaaggacgccaugcugcagcuggaccccaacgccaagaccuggauggacaucgagggcagacccgaggaccccguggagaucgcccuguaccagcccagcagcggcugcuacauccacuucuucagagagcccaccgaccugaagcaguucaagcaggacgccaaguacagccacggcaucgacgugaccgaccuguucgccgcccagcccggccugaccagcgccgugaucgacgcccugcccagaaacauggugaucaccugccagggcagcgacgacaucagaaagcugcuggagagccagggcagaaaggacaucaagcugaucgacaucgcccugagcaagaccgacagcagaaaguacgagaacgccgugugggaccaguacaaggaccugugccacaugcacaccggcguggugguggagaagaagaagagaggcggcaaggaggagaucaccccccacugcgcccugauggacugcaucauguucgacgccgccgugagcggcggccugaacaccagcgugcugagagccgugcugcccagagacaugguguucagaaccagcacccccagaguggugcugugaggacuaguuauaagacugacuagcccgaugggccucccaacgggcccuccuccccuccuugcaccgagauuaaucaaaggcucuuuucagagccaccaaaaaaaaaaaaaaaaaaaaaaaaaaaaaaaaaaaaaaaaaaaaaaaaaaaaaaaaaaaaaaaaagaauu

SEQ ID NO: 20441 - RNA, 1943 nt, Artificial Sequence
  mRNA product Design i-3 (hSL-A64-N5) comprising derived and/or modified sequence from LASV(G1442-SLE-2011;Clade IV)__AIT17181__SP-HsALB_NP(2-569) (opt4)
aggagaaagcuuaccaugaagugggugaccuucaucagccugcuguuccuguucagcagcgccuacagcagcgccagcaaggaggugaagagcuuccuguggacccagagccugagaagagagcugagcggcuacugcagcaacaucaagcugcagguggugaaggacgcccaggcccugcugcacggccuggacuucagcgaggugagcaacgugcagagacugaugagaaagcagagaagagacgacaacgaccugaagagacugagagaccugaaccaggccgugaacaaccugguggagcugaagagcacccagcagaagagcgugcugagagugggcacccugaccagcgacgaccugcuggugcuggccgccgaccuggagaagcugaagagcaaggugaucagaaccgagagaccccugagcgccggcguguacaugggcaaccugagcagccagcagcuggaccagagaagagcccugcugaacaugaucggcaugagcggcggcauccagggcaccagaaccggcagagacggcguggugagagugugggacgugaagaacgccgaccugcugaacaaccaguucggcaccaugcccagccugacccuggccugccugaccaagcagggccagguggaccugaacgacguggugcaggcccugaccgaccugggccugaucuacaccgccaaguaccccaacgccagcgaccuggacagacugacccagagccaccccauccugaacaugaucgacaccaagaagagcagccugaacaucagcggcuacaacuucagccugggcgccgccgugaaggccggcgccugcaugcuggacggcggcaacaugcuggagaccaucaaggugagcccccagaccauggacggcauccugaagagcauccugaaggugaagaagacccugggcauguucaucagcgacacccccggcgagagaaaccccuacgagaacauccuguacaagaucugccugagcggcgacggcuggcccuacaucgccagcagaaccagcaucaccggcagagccugggagaacaccgugguggaccuggagagcgacggcaagccccagaaggccggcagcaacaacagcaacaagagccugcagagcgccggcuucgccgccggccugaccuacagccagcugaugacccugaaggacgccaugcugcagcuggaccccaacgccaagaccuggauggacaucgagggcagacccgaggaccccguggagaucgcccuguaccagcccagcagcggcugcuacauccacuucuucagagagcccaccgaccugaagcaguucaagcaggacgccaaguacagccacggcaucgacgugaccgaccuguucgccgcccagcccggccugaccagcgccgugaucgaggcccugcccagaaacauggugaucaccugccagggcagcgacgacaucaagaagcugcuggagagccagggcagaaaggacaucaagcugaucgacaucgcccugagcaagaccgacagcagaaaguacgagaacgccgugugggaccaguacaaggaccugugccacaugcacaccggcguggugguggagaagaagaagagaggcggcaaggaggagaucaccccccacugcgcccugauggacugcaucauguucgacgccgccgugagcggcggccugaacacccuggugcugagagccgugcugcccagagacaugguguucagaaccagcacccccagaguggugcugugaggacuaguuauaagacugacuagcccgaugggccucccaacgggcccuccuccccuccuugcaccgagauuaaucaaaggcucuuuucagagccaccaaaaaaaaaaaaaaaaaaaaaaaaaaaaaaaaaaaaaaaaaaaaaaaaaaaaaaaaaaaaaaaaagaauu

SEQ ID NO: 20442 - RNA, 1943 nt, Artificial Sequence
  mRNA product Design i-3 (hSL-A64-N5) comprising derived and/or modified sequence from LASV(G3010-SLE-2013;Clade IV)__AIT17345__SP-HsALB_NP(2-569) (opt4)
aggagaaagcuuaccaugaagugggugaccuucaucagccugcuguuccuguucagcagcgccuacagcagcgccagcaaggagaucaagagcuuccuguggacccagagccugagaagagagcugagcggcuacugcagcaacaucaagcugcagguggugaaggacgcccaggcccugcugcacggccuggacuucagcgaggugagcaacgugcagagacugaugagaaaggagagaagagacgacaacgaccugaagagacugagagaccugaaccaggccgugaacaaccugguggagcugaagagcacccagcagaagagcauccugagagugggcacccugaccagcgacgaccugcugauccuggccgccgaccuggagaagcugaagagcaaggugaccagaaccgagagaccccugagcgccggcguguacaugggcaaccugagcagccagcagcuggaccagagaagagcccugcugagcaugaucggcaugagcagcggcgugcagggcgccagagccggcagagacggcguggugagagugugggacgugaagaacgccgagcugcugaacaaccaguucggcaccaugcccagccugacccuggccugccugaccaagcagggccagguggaccugaacgacguggugcaggcccugaccgaccugggccugaucuacaccgccaaguaccccaacaccagcgaccuggacagacugacccagagccaccccauccugaacaugaucgacaccaagaagagcagccugaacaucagcggcuacaacuucagccugggcgccgccgugaaggccggcgccugcaugcuggacggcggcaacaugcuggagaccaucaaggugagcccccagaccauggacggcauccugaagagcauccugaaggugaagaaggcccugggcauguucaucagcgagacccccggcgagagaaaccccuacgagaacauccuguacaagaucugccugagcggcgacggcuggcccuacaucgccagcagaaccagcaucaccggcagagccugggagaacaccgugguggaccuggagagcgacggcaagccccagaaggccggcagcaacaacagcaacaagagccugcagagcgccggcuucaccgccggccugaccuacagccagcugaugacccugaaggacgccaugcugcagcuggaccccaacgccaagaccuggauggacaucgagggcagacccgaggaccccguggagguggcccuguaccagcccagcagcggcugcuacauccacuucuucagagagcccaccgaccugaagcaguucaagcaggacgccaaguacagccacggcaucgacgugaccgaccuguucgccgcccagcccggccugaccagcgccgugaucgacgcccugcccagaaacauggugaucaccugccagggcagcgacgacaucaagaagcugcuggagagccagggcagaaaggacaucaagcugaucgacaucgcccugagcaagaccgacagcagaaaguacgagaacgccgugugggaccaguacaaggaccugugccacaugcacaccggcguggugguggagaagaagaagagaggcggcaaggaggagaucaccccccacugcgcccugauggacugcaucauguucgacgccgccgugagcggcggccugaacaccagcgugcugagagccgugcugcccagagacaugguguucagaaccagcacccccagaguggugcugugaggacuaguuauaagacugacuagcccgaugggccucccaacgggcccuccuccccuccuugcaccgagauuaaucaaaggcucuuuucagagccaccaaaaaaaaaaaaaaaaaaaaaaaaaaaaaaaaaaaaaaaaaaaaaaaaaaaaaaaaaaaaaaaaagaauu

SEQ ID NO: 20443 - RNA, 1943 nt, Artificial Sequence
  mRNA product Design i-3 (hSL-A64-N5) comprising derived and/or modified sequence from LASV(G502-SLE-2009;Clade IV)__AIT17127__SP-HsALB_NP(2-569) (opt4)
aggagaaagcuuaccaugaagugggugaccuucaucagccugcuguuccuguucagcagcgccuacagcagcgccagcaaggagaucaagagcuuccuguggacccagagccugagaagagagcugagcggcuacugcagcaacaucaagcugcagguggugaaggacgcccaggcccugcugcacggccuggacuucagcgaggugagcaacgugcagagacugaugagaaaggagagaagagacgacaacgaccugaagagacugagagaccugaaccaggccgugaacaaccugguggagcugaagagcacccagcagaagagcauccugagagugggcacccugaccagcgacgaccugcugauccuggccgccgaccuggagaagcugaagagcaaggugaucagaaccgagagaccccugagcgccggcguguacaugggcaaccugagcagccagcagcuggaccagagaagagcccugcugagcaugaucggcaugagcggcggcaaccagggcgugagagccggcaaggacggcguggugagagugugggacgugaagaacgccgagcugcugaacaaccaguucggcaccaugcccagccugacccuggccugccugaccaagcagggccagguggaccugaacgacgccgugcaggcccugaccgaccugggccugaucuacaccgccaaguaccccaacaccagcgaccuggacagacugacccagagccaccccauccugaacaugaucgacaccaagaagagcagccugaacaucagcggcuacaacuucagccugggcgccgccgugaaggccggcgccugcaugcuggacggcggcaacaugcuggagaccaucaaggugagcccccagaccauggacggcauccugaagagcauccugaaggugaagaaggcccugggcauguucaucagcgacacccccggcgagagaaaccccuacgagaacauccuguacaagaucugccugagcggcgacggcuggcccuacaucgccagcagaaccagcaucaccggcagagccugggagaacaccgugguggaccuggagagcgacggcaagccccagaaggccggcagcaacaacagcaacaagagccugcagagcgccggcuucaccgccggccugaccuacagccagcugaugacccugaaggacgccaugcugcagcuggaccccaacaccaagaccuggauggacaucgagggcagacccgaggaccccguggagaucgcccuguaccagcccagcagcggcugcuacauccacuucuucagagagcccaccgaccugaagcaguucaagcaggacgccaaguacagccacggcaucgacgugaccgaccuguucgccgcccagcccggccugaccagcgccgugaucgacgcccugcccagaaacauggugaucaccugccagggcagcgacgacaucagaaagcugcuggagagccagggcagaaaggacaucaagcugaucgacaucgcccugaacaagaccgacagcagaaaguacgagaacgccgugugggaccaguacaaggaccugugccacaugcacaccggcguggugguggagaagaagaagagaggcggcaaggaggagaucaccccccacugcgcccugauggacugcaucauguucgacgccgccgugagcggcggccugaacaccagcgugcugagagccgugcugcccagagacaugguguucagaaccagcacccccagaguggugcugugaggacuaguuauaagacugacuagcccgaugggccucccaacgggcccuccuccccuccuugcaccgagauuaaucaaaggcucuuuucagagccaccaaaaaaaaaaaaaaaaaaaaaaaaaaaaaaaaaaaaaaaaaaaaaaaaaaaaaaaaaaaaaaaaagaauu

SEQ ID NO: 20444 - RNA, 1943 nt, Artificial Sequence
  mRNA product Design i-3 (hSL-A64-N5) comprising derived and/or modified sequence from LASV(G733-SLE-2010;Clade IV)__AIT17155__SP-HsALB_NP(2-569) (opt4)
aggagaaagcuuaccaugaagugggugaccuucaucagccugcuguuccuguucagcagcgccuacagcagcgccagcaaggagaucaagagcuuccuguggacccagagccugagaagagagcugagcggcuacugcagcaacaucaagcugcagguggugaaggacgcccaggcccugcugcacggccuggacuucagcgaggugagcaacgugcagagacugaugagaaaggagagaagagacgacaacgaccugaagagacugagagaccugaaccaggccgugaacaaccugguggagcugaagagcacccagcagaagagcgugcugagagugggcacccugaccagcgacgagcugcuggugcuggccgccgaccuggagaagcugaagagcaaggugaucagaaccgagagaccccugagcgccggcguguacaugggcaaccugagcagccagcagcuggaccagagaagagcccugcugagcaugaucggcaugagcggcggcaaccagggcgccagaaccggcagagacggcguggugagagugugggacgugaagaacgccgagcugcugaacaaccaguucggcaccaugcccagccugacccuggccugccugaccaagcagggccagguggaccugaacgacgccgugcaggcccugaccgaccugggccugaucuacaccgccaaguaccccaacaccagcgaccuggacagacugacccagagccaccccauccugaacaugaucgacaccaagaagagcagccugaacaucagcggcuacaacuucagccugggcgccgccgugaaggccggcgccugcaugcuggacggcggcaacaugcuggagaccaucaaggugagcccccagaccauggacggcauccugaagagcauccugaaggugaagaaggcccugggcauguucaucagcgacacccccggcgagagaaaccccuacgagaacauccuguacaagaucugccugagcggcgacggcuggcccuacaucgccagcagaaccagcaucaccggcagagccugggagaacaccgugguggaccuggagagcgacggcaagccccagaaggccggcagcaacaacagcaacaagagccugcagagcgccggcuucaccgccggccugaccuacagccagcugaugacccugaaggacgccaugcugcagcuggaccccaacgccaagaccuggauggacaucgagggcagacccgaggaccccguggagaucgcccuguaccagcccagcagcggcugcuacauccacuucuucagagagcccaccgaccugaagcaguucaagcaggacgccaaguacagccacggcaucgacgugaccgaccuguucgccgcccagcccggccugaccagcgccgugaucgacgcccugcccagaaacauggugaucaccugccagggcagcgacgacaucagaaagcugcuggagagccagggcagaaaggacaucaagcugaucgacaucgcccugagcaagaucgacagcagaaaguacgagaacgccgugugggaccaguacaaggaccugugccacaugcacaccggcguggugguggagaagaagaagagaggcggcaaggaggagaucaccccccacugcgcccugauggacugcaucauguucgacgccgccgugagcggcggccugaacagccuggugcugagagccgugcugcccagagacaugguguucagaaccagcacccccagaguggugcugugaggacuaguuauaagacugacuagcccgaugggccucccaacgggcccuccuccccuccuugcaccgagauuaaucaaaggcucuuuucagagccaccaaaaaaaaaaaaaaaaaaaaaaaaaaaaaaaaaaaaaaaaaaaaaaaaaaaaaaaaaaaaaaaaagaauu

SEQ ID NO: 20445 - RNA, 1943 nt, Artificial Sequence
  mRNA product Design i-3 (hSL-A64-N5) comprising derived and/or modified sequence from MOPV/LASV reassortant(IGS-1;Clade IV)__AFY05578__SP-HsALB_NP(2-569) (opt4)
aggagaaagcuuaccaugaagugggugaccuucaucagccugcuguuccuguucagcagcgccuacagcagcgccagcaaggagaucaagagcuuccuguggacccagagccugagaagagagcugagcggcuacugcagcaacaucaagcugcagguggugaaggacgcccaggcccugcugcacggccuggacuucagcgaggugagcaacgugcagagacugaugagaaaggagagaagagacgacaacgaccugaagagacugagagaccugaaccaggccgugaacaaccugguggagcugaagagcacccagcagaagagcauccugagagugggcacccugaccagcgacgaccugcugauccuggccgccgaccuggagaagcugagaagcaaggugaucagaaccgagagaccccugagcgccggcguguacaugggcaaccugagcagccagcagcuggaccagagaagagcccugcugaacaugaucggcaugagcggcggcaaccagggcgccagagccggcagagacggcguggugagagugugggacgugaagaacgccgagcugcugagcaaccaguucggcaccaugcccagccugacccuggccugccugaccaagcagggccagguggaccugaacgacgccgugcaggcccugaccgaccugggccugaucuacaccgccaaguaccccaacaccagcgaccuggacagacugacccagagccaccccauccugaacaugaucgacaccaagaagagcagccugaacaucagcggcuacaacuucagccugggcgccgccgugaaggccggcgccugcaugcuggacggcggcaacaugcuggagaccaucaaggugagcccccagaccauggacggcauccugaagagcauccugaaggugaagaaggcccugggcauguucaucagcgacacccccggcgagagaaaccccuacgagaacauccuguacaagaucugccugagcggcgacggcuggcccuacaucgccagcagaaccagcaucaccggcagagccugggagaacaccgugguggaccuggagagcgacggcaagccccagaaggccgacagcaacaacagcagcaagagccugcagagcgccggcuucaccgccggccugaccuacagccagcugaugacccugaaggacgccaugcugcagcuggaccccaacgccaagaccuggauggacaucgagggcagacccgaggaccccguggagaucgcccuguaccagcccagcagcggcugcuacauccacuucuucagagagcccaccgaccugaagcaguucaagcaggacgccaaguacagccacggcaucgacgugaccgaccuguucgccacccagcccggccugaccagcgccgugaucgacgcccugcccagaaacauggugaucaccugccagggcagcgacgacaucagaaagcugcuggagagccagggcagaaaggacaucaagcugaucgacaucgaccugagcaagaccgacagcagaaaguacgagaacgccgugugggaccaguacaaggaccugugccacaugcacaccggcguggugguggagaagaagaagagaggcggcaaggaggagaucaccccccacugcgcccugauggacugcaucauguucgacgccgccgugagcggcggccugaacaccagcgugcugagagccgugcugcccagagacaugguguucagaaccagcacccccagaguggugcugugaggacuaguuauaagacugacuagcccgaugggccucccaacgggcccuccuccccuccuugcaccgagauuaaucaaaggcucuuuucagagccaccaaaaaaaaaaaaaaaaaaaaaaaaaaaaaaaaaaaaaaaaaaaaaaaaaaaaaaaaaaaaaaaaagaauu

SEQ ID NO: 20446 - RNA, 1943 nt, Artificial Sequence
  mRNA product Design i-3 (hSL-A64-N5) comprising derived and/or modified sequence from LASV(LM765-SLE-2012;Clade IV)__AIT17815__SP-HsALB_NP(2-569) (opt4)
aggagaaagcuuaccaugaagugggugaccuucaucagccugcuguuccuguucagcagcgccuacagcagcgccagcaaggagaucaagagcuuccuguggacccagagccugagaagagagcugagcggcuacugcagcaacaucaagcugcagguggugaaggacgcccaggcccugcugcacggccuggacuucagcgaggugagcaacgugcagagacugaugagaaaggagagaagagacgacaacgaccugaagagacugagagaccugaaccaggccgugaacaaccugguggagcugaagagcacccagcagaagagcauccugagagugggcacccugaccagcgacgaccugcugauccuggccgccgaccuggagaagcugaagagcaaggugaccagaaccgagagaccccugagcgccggcguguacaugggcaaccugagcagccagcagcuggaccagagaagagcccugcuggacaugaucggcaugagcggcagcaaccagggcgccagagccggcagagacggcguggugagagugugggacgugaagaacgccgagcugcugaacaaccaguucggcaccaugcccagccugacccuggccugccugaccaagcagggccagguggaccugaacgacgccgugcaggcccugaccgaccugggccugaucuacaccgccaaguaccccaacaccagcgaccuggacagacugacccagagccaccccauccugaacaugaucgacaccaagaagagcagccugaacaucagcggcuacaacuucagccugggcgccgccgugaaggccggcgccugcaugcuggacggcggcaacaugcuggagaccaucaaggugagcccccagaccauggacggcauccugaagagcauccugaaggugaagaaggcccugggcauguucaucagcgacgcccccggcgagagaaaccccuacgagaacauccuguacaagaucugccugagcggcgacggcuggcccuacaucgccagcagaaccagcaucaccggcagagccugggagaacaccgugguggaccuggagagcgacggcaagccccagaaggccggcagcaacggcagcaacaagagccugcagagcgccggcuucaccgccggccugaccuacagccagcugaugacccugaaggacgccaugcugcagcuggaccccaacgccaagaccuggauggacaucgagggcagacccgaggaccccguggagaucgcccuguaccagcccagcagcggcugcuacauccacuucuucagagagcccaccgaccugaagcaguucaagcaggacgccaaguacagccacggcaucgacgugaccgaccuguucgccgcccagcccggccugaccagcgccgugaucgacgcccugcccagaaacauggugaucaccugccagggcagcgacgacaucagaaagcuguucgagagccagggcagaaaggacaucaagcugaucgacaucgcccugagcaagaccgacagcagaaaguacgagaacgccgugugggaccaguacaaggaccugugccacaugcacaccggcaucgugguggagaagaagaagagaggcggcaaggaggagaucaccccccacugcgcccugauggacugcaucauguucgacgccgccgugagcggcggccugaacaccagcgugcugagagccgugcugcccagagacaugguguucagaaccagcacccccagaguggugcugugaggacuaguuauaagacugacuagcccgaugggccucccaacgggcccuccuccccuccuugcaccgagauuaaucaaaggcucuuuucagagccaccaaaaaaaaaaaaaaaaaaaaaaaaaaaaaaaaaaaaaaaaaaaaaaaaaaaaaaaaaaaaaaaaagaauu

SEQ ID NO: 20447 - RNA, 1943 nt, Artificial Sequence
  mRNA product Design i-3 (hSL-A64-N5) comprising derived and/or modified sequence from LASV(LM776-SLE-2012;Clade IV)__AIT17825__SP-HsALB_NP(2-569) (opt4)
aggagaaagcuuaccaugaagugggugaccuucaucagccugcuguuccuguucagcagcgccuacagcagcgccagcaaggagaucaagagcuuccuguggacccagagccugagaagagagcugagcagcuacugcagcaacaucaagcugcagguggugaaggacgcccaggcccugcugcacggccuggacuucagcgaggugagcaacgugcagagacugaugagaaaggagagaagagacgacaacgaccugaagagacugagagaccugaaccaggccgugaacaaccugguggagcugaagagcacccagcagaagagcauccugagagugggcacccugaccagcgacgaccugcugauccuggccgccgaccuggagaagcugaagagcaaggugaccagaaccgagagaccccugagcgccggcguguacaugggcaaccugagcagccagcagcuggaccagagaagagcccugcugagcaugaucggcaugagcggcagcaaccagggcgccagagccggcagagacggcguggugagagugugggacgugaagaacgccgagcugcugaacaaccaguucggcaccaugcccagccugacccuggccugccugaccaagcagggccagguggaccugaacgacgccgugcaggcccugaccgaccugggccugaucuacaccgccaaguaccccaacaccagcgaccuggacagacugacccagagccaccccauccugaacaugaucgacaccaagaagagcagccugaacaucagcggcuacaacuucagccugggcgccgccgugaaggccggcgccugcaugcuggacggcggcaacaugcuggagaccaucaaggugagcccccagaccauggacggcauccugaagagcauccugaaggugaagaaggcccugggcauguucaucagcgacacccccggcgagagaaaccccuacgagaacauccuguacaagaucugccugagcggcgacggcuggcccuacaucgccagcagaaccagcaucaccggcagagccugggagaacaccgugguggaccuggagagcgacggcaagccccagaaggccggcagcaacaacagcaacaagagccugcagagcgccggcuucaccgccggccugaccuacagccagcugaugacccugaaggacgccaugcugcagcuggaccccaacgccaagaccuggauggacaucgagggcagacccgaggaccccguggagguggcccuguaccagcccagcagcggcugcuacauccacuucuucagagagcccaccgaccugaagcaguucaagcaggacgccaaguacagccacggcaucgacgugaccgaccuguucgccgcccagcccggccugaccagcgccgugaucgacgcccugcccagaaacauggugaucaccugccagggcagcgacgacaucagaaagcugcuggagagccagggcagaaaggacaucaagcugaucgacaucgcccugagcaagaccgacagcagaaaguacgagaacgccgugugggaccaguacaaggaccugugccacaugcacaccggcguggugguggagaagaagaagagaggcggcaaggaggagaucaccccccacugcgcccugauggacugcaucauguucgacgccgccgugagcggcggccugaacaccagcgugcugagagccgugcugcccagagacaugguguucagaaccagcacccccagaguggugcugugaggacuaguuauaagacugacuagcccgaugggccucccaacgggcccuccuccccuccuugcaccgagauuaaucaaaggcucuuuucagagccaccaaaaaaaaaaaaaaaaaaaaaaaaaaaaaaaaaaaaaaaaaaaaaaaaaaaaaaaaaaaaaaaaagaauu

SEQ ID NO: 20448 - RNA, 1943 nt, Artificial Sequence
  mRNA product Design i-3 (hSL-A64-N5) comprising derived and/or modified sequence from LASV(Mad39;Clade IV)__ANH09723__SP-HsALB_NP(2-569) (opt4)
aggagaaagcuuaccaugaagugggugaccuucaucagccugcuguuccuguucagcagcgccuacagcagcgccagcaaggagaucaagagcuuccuguggacccagagccugagaagagagcugagcggcuacugcagcaacaucaagcugcagguggugaaggacgcccaggcccugcugcacggccuggacuucagcgaggugagcaacgugcagagacugaugagaaagcagagaagagacgacaacgaccugaagagacugagagaccugaaccaggccgugaacaaccugguggagcugaagagcacccagcagaagagcgugcugagagugggcacccugaccagcgacgaccugcugacccuggccgccgaccuggagaagcugaagagcaaggugaccagaaccgagagaccccugaccgccggcguguacaugggcaaccugagcagccagcagcuggaccagagaagagcccugcugaacaugaucggcaugagcggcggcaaccagggcgccagaaccggcagagacggcguggugagagugugggacgugaagaacgccgagcugcugaacaaccaguucggcaccaugcccagccugacccuggccugccugaccaagcagggccagguggaccugaacgacguggugcaggcccugaccgaccugggccugaucuacaccgccaaguaccccaacaccagcgaccuggacagacugacccagagccaccccauccugaacaugaucgacaccaacaagagcagccugaacaucagcggcuacaacuucagccugggcgccgccgugaaggccggcgccugcaugcuggacggcggcaacaugcuggagaccaucaaggugagcccccagaccauggacggcauccugaagagcauccugaaggugaagaagagccugggcauguucaucagcgacacccccggcgagagaaaccccuacgagaacauccuguacaagaucugccugagcggcgacggcuggcccuacaucgccagcagaaccagcaucaccggcagagccugggagaacaccgugguggaccuggagagcggcggcaagccccagaaggccggcagcaacaacagcaacaagagccugcagagcgccggcuucgccgccggccugaccuacagccagcugaugacccugaaggacgccaugcugcagcuggaccccaacgccaagaccuggauggacaucgagggcagacccgaggaccccguggagaucgcccuguaccagcccaucagcggcugcuacauccacuucuucagagagcccaccgaccugaagcaguucaagcaggacgccaaguacagccacggcaucgacgugaccgaccuguucgccgcccagcccggccugaccagcgccgugaucgaggcccugcccagaaacauggugaucaccugccagggcagcgacgacaucagaaagcuguucgagagccagggcagaaaggacaucaagcugaucgacaucgcccugagcaagaccgacagcagaaaguacgagaacgccgugugggaccaguacaaggaccugugccacaugcacaccggcguggugguggagaagaagaagaagggcggcaaggaggagaucaccccccacugcgcccugauggacugcaucauguucgacgccgccgugagcggcggccugaacacccuggugcugagagccgugcugcccagagacaugguguucagaaccagcacccccaagguggugcugugaggacuaguuauaagacugacuagcccgaugggccucccaacgggcccuccuccccuccuugcaccgagauuaaucaaaggcucuuuucagagccaccaaaaaaaaaaaaaaaaaaaaaaaaaaaaaaaaaaaaaaaaaaaaaaaaaaaaaaaaaaaaaaaaagaauu

SEQ ID NO: 20449 - RNA, 1943 nt, Artificial Sequence
  mRNA product Design i-3 (hSL-A64-N5) comprising derived and/or modified sequence from LASV(Z0947-SLE-2011;Clade IV)__AIT17841__SP-HsALB_NP(2-569) (opt4)
aggagaaagcuuaccaugaagugggugaccuucaucagccugcuguuccuguucagcagcgccuacagcagcgccagcaaggagaucaagagcuuccuguggacccagagccugagaagagagcugagcggcuacugcagcaacaucaagcugcagguggugaaggacgcccaggcccugcugcacggccuggacuucagcgaggugagcaacgugcagagacugaugagaaaggagagaagagacgacaacgaccugaagagacugagagaccugaaccaggccgugaacaaccugguggagcugaagagcacccagcagaagagcauccugagagugggcacccugaccagcgacgaccugcugauccuggccgccgaccuggagaagcugaagagcaaggugaccagaaccgagagaccccugagcgccggcguguacaugggcaaccugagcagccagcagcuggaccagagaagagcccugcugaacaugaucggcaugagcggcagcaaccagggcgccagaaccggcagagacggcguggugagagugugggacgugaagaacgccgagcugcugaacaaccaguucggcaccaugcccagccugacccuggccugccugaccaagcagggccagguggaccugaacgacgccgugcaggcccugaccgaccugggccugaucuacaccgccaaguaccccaacaccagcgaccuggacagacugacccagagccaccccauccugaacaugaucgacaccaagaagagcagccugaacaucagcggcuacaacuucagccugggcgccgccgugaaggccggcgccugcaugcuggacggcggcaacaugcuggagaccaucaaggugagcccccagaccauggacggcauccugaagagcauccugaaggugaagaaggcccugggcauguucaucagcgacgcccccggcgagagaaaccccuacgagaacauccuguacaagaucugccugagcggcgacggcuggcccuacaucgccagcagaaccagcaucaccggcagagccugggagaacaccgugguggaccuggagagcgacggcaagccccagaaggccggcagcaacggcagcaacaagagccugcagagcgccggcuucaccgccggccugaccuacagccagcugaugacccugaaggacgccaugcugcagcuggaccccaacgccaagaccuggauggacaucgagggcagacccgaggaccccguggagaucgcccuguaccagcccagcagcggcugcuacauccacuucuucagagagcccaccgaccugaagcaguucaagcaggacgccaaguacagccacggcaucgacgugaccgaccuguucgccgcccagcccggccugaccagcgccgugaucgacgcccugcccagaaacauggugaucaccugccagggcagcgacgacaucagaaagcuguucgagagccagggcagaaaggacaucaagcugaucgacaucgcccugagcaagaccgacagcagaaaguacgagaacgccgugugggaccaguacaaggaccugugccacaugcacaccggcaucgugguggagaagaagaagagaggcggcaaggaggagaucaccccccacugcgcccugauggacugcaucauguucgacgccgccgugagcggcggccugaacaccagcgugcugagagccgugcugcccagagacaugguguucagaaccagcacccccagaguggugcugugaggacuaguuauaagacugacuagcccgaugggccucccaacgggcccuccuccccuccuugcaccgagauuaaucaaaggcucuuuucagagccaccaaaaaaaaaaaaaaaaaaaaaaaaaaaaaaaaaaaaaaaaaaaaaaaaaaaaaaaaaaaaaaaaagaauu

SEQ ID NO: 20450 - RNA, 1943 nt, Artificial Sequence
  mRNA product Design i-3 (hSL-A64-N5) comprising derived and/or modified sequence from LASV(Josiah;Clade IV)__NP_694869__SP-HsALB_NP(2-569) (opt5)
aggagaaagcuuaccaugaagugggugaccuucaucagccugcucuuucuguucuccucugccuacagcagcgccuccaaggagaucaaaucuuuccuguggacccagagccucagacgggaacuguccggcuacugcucuaacauuaagcugcaaguggucaaagacgcucaggcccugcuccacgggcuggauuuuagcgagguuuccaaugugcagcgccuuaugagaaaggaacggcgcgacgauaacgaccugaaaagacuccgggaucugaaucaggcggugaacaaucuggucgagcucaagucuacacaacaaaagagcauccugcgcgugggaacgcuuaccuccgacgaucugcucauucuggcugccgaccuugaaaaacuuaagagcaaaguuaucagaacagagcggccccucucugccggcguguauauggggaaccuguccagccagcagcuggaucagcgcagagcucuccugaauaugauuggaaugucuggcgggaaccagggagcccgggcuggccgcgacggcgucgugagaguuugggaugugaagaaugccgagcuucugaacaaucaguucgggaccaugccuucccucacacuggcgugucuuaccaaacagggacaagucgaccugaacgaugccgugcaggcucucacagaccugggccugaucuacaccgccaaguauccgaauacgagcgaccucgaucggcugacccagucucaucccauccuuaacaugauugacacaaagaaauccagccugaauaucuccggguacaacuuuucucucggagcugccgugaaggcgggcgccugcaugcuggaugggggaaacaugcuugaaaccauuaaagucagcccucaaacaauggacggcauccugaaguccauucucaaaguuaagaaagcucugggcauguucaucagcgauacccccggggagcgcaauccuuaugaaaacauucuguacaagaucugucucucuggagacggcuggcccuauaucgccuccagaacgagcauuacagggcgggcuugggagaauaccgugguggaucuggagucugacggaaagccucagaaagccgauagcaacaauuccucuaagagccuucaguccgccggcuuuacagcugggcugaccuacagccagcucaugacccugaaagacgcgaugcugcaacuugauccgaacgccaagacauggauggacaucgaaggaagacccgaggacccugucgaaauugcucucuaccagcccucuuccggcugcuauauccacuucuuucgcgagccuacggaucugaaacaguucaagcaggacgccaaguacagccauggcauugaugugaccgaccuguuugccacacaacccgggcucaccucugcuguuaucgaugcccugccgcggaauauggugaucacaugucagggauccgacgauauuagaaaacuucuggaaagccagggccgcaaggacaucaaacucauugauaucgcgcuguccaagaccgacucucggaaauaugagaacgcugucugggaucaguacaaggaccugugccacaugcauacgggggugguuguggagaagaaaaagagaggaggcaaagaagagauuacaccucacugugcccuuauggauugcaucauguucgacgccgcugucagcgggggccucaauaccuccgugcugcgcgccguccugccccgggacaugguguuuagaaccucuacaccucgcguugugcucugaggacuaguuauaagacugacuagcccgaugggccucccaacgggcccuccuccccuccuugcaccgagauuaaucaaaggcucuuuucagagccaccaaaaaaaaaaaaaaaaaaaaaaaaaaaaaaaaaaaaaaaaaaaaaaaaaaaaaaaaaaaaaaaaagaauu

SEQ ID NO: 20451 - RNA, 1943 nt, Artificial Sequence
  mRNA product Design i-3 (hSL-A64-N5) comprising derived and/or modified sequence from LASV(LP;Clade I)__AAF86702__SP-HsALB_NP(2-569) (opt5)
aggagaaagcuuaccaugaagugggugaccuucaucagccugcucuuucuguucuccucugccuacagcagcaacuccaaggagaucaaaucuuuccuguggacccagagccucagacgggaacuguccggcuacugcucuaauauuaagcuccaaguggucaaagacgcccaggcucugcuccacgggcuggauuuuagcgagguuuccaacgugcagcgccuuaugagaaagcagaaacgggacgaugccgaccugaagcgccucagagaucugaaucaagcggugaacaaucuggucgaacucaagucuacacagcagaaaaacgugcugcggguuggaacgcuuagcuccgacgaucugaucacccucgcugccgaccuggagaaacuuaaaagcaaggugauucgcacagaaagaccccugucuuccggcgucuauauggggaaucucagcucucagcaacuggaucagcggcgcgcccugcucuccaugaucggaaugagcggcgggccucagggaaacagaaccggcggcgacggggugguucgggugugggaugucaaaaaugcugagcugcuuaacaaucaguucggaacaaugccgucucugacccucgccugucugacaaagcaaggccagguggaccuuaacgaugcugugcaggcccugaccgaccucgggcugauuuacacggcgaaguaucccaauuccagcgaccuggauaugcucacccaaucccauccuauccugggaauggucgacacaaagaagucuagccuuaacaucuccggcuacaauuuuagccugggggccgcuguuaaagccggagcuugcaugcucgauggcggcaacaugcuggagaccauuaaggugucuccccagacaauggacgggauccuuaaauccauucugaaggugaaacgcagccucggaauguucaucucugauaccccuggcgaaagaaaccccuaugagaauauucuguacaagaucugucugagcggggaaggauggccuuauauugccucccggacgucuaucacaggccgcgcgugggagaacacccucgucgaccuggagagcgauaauaagccgcccaaacuuaacuccgccgggagcaauaagucucugcaggcugccggacucaacgcuggccugacauacucccagcugaugacccuuaaagacugcaugcuccaacuggauccuagcucuaagaccuggaucgacauugaaggcagacccgaggauccuguggaaaucgcccuguuucagcccuccagcggguguuacauucacuucuuucgggagccgacagaccucaaacaguucaagcaggacgccaaguauucccauggaaucgauguuacggaccuguuuucuacccaaccuggccuuacaagcgcugugauugaagcgcugcccagaaauaugguccuuaccugccagggguccgaugacaucaaaaagcugcuggagucucagggacgccgggauaucaaacuuauugacaucagccucuccaaggccgauagcagaaaauucgagaacgcugugugggaccaguacaaggaucugugucacaugcauacaggcguuguggucgaaaagaaaaagcgcgggggcaaagaggaaauuaccccucacugcgcccugcucgacuguaucauguuugaugccgcuacgacaggaucucugaauauuaccacccuucgggccgugcugcccagagacauggucuuccgcacauccacccccaaggugguucucugaggacuaguuauaagacugacuagcccgaugggccucccaacgggcccuccuccccuccuugcaccgagauuaaucaaaggcucuuuucagagccaccaaaaaaaaaaaaaaaaaaaaaaaaaaaaaaaaaaaaaaaaaaaaaaaaaaaaaaaaaaaaaaaaagaauu

SEQ ID NO: 20452 - RNA, 1943 nt, Artificial Sequence
  mRNA product Design i-3 (hSL-A64-N5) comprising derived and/or modified sequence from LASV(803213;Clade II)__AAF86704__SP-HsALB_NP(2-569) (opt5)
aggagaaagcuuaccaugaagugggugaccuucaucagccugcucuuucuguucuccucugccuacagcagcgccuccaaggaggugaaaucuuuccuguggacccagagccucagacgggaacuguccggcuacugcucuaacaucaaacuucaagucguuaaggacgcucaggcccugcuccacgggcuggauuuuagcgaggugaauaacgugcagcgccuuaugagaaagcagaaacgggacgauggagaccugaagcgccucagagaucugaaucaagcggucaacaaucugguggaacucaaguccacacagcagaaaucuauucugcggguuggcacgcuuaccagcgacgaucugcucacacuggcugccgaccuugagaagcugaaauccaaggugauccgcaccgaaagaccccucagcucuggggucuauaugggaaaccuguccacacagcaacuggagcagcggcgcgcccuccugaauaugauuggcauggugggaggagcucagggcacccagccuggcagagaugggguugugcgggucugggacgugaaaaacccggaucuucugaauaaccaauucggaacaaugcccagccucacccuggccugucuuacgaagcagggccagguggaccugaaugaugcuguccucgcccugaccgaccuggggcucaucuacacagcgaaguauccuaacucuuccgaccuggaucgccuuagccaaucucaucccauucugaauaugguugacaccaaaaaguccagccucaacaucuccggauacaauuuuucucugggcgccgcugugaaagccggggcuugcaugcuugauggaggcaacaugcuggagacaaucaaggugaccccucagacgauggacggcauucucaaaagcauccugaaggucaaaagaucccuggggauguucgugagcgauacacccggagaacggaacccuuaugagaauauucucuacaagaucugucugucuggcgacggguggccguauauugccucccgcaccagcaucguugggagagcgugggaaaacacaaccguggaucuugagucugacggcaagccccagaaagucgggaccgccggaagcaauaagucccugcagucugcuggcuuuccuacaggccucacguacagccaacugaugacccugaaagauuccaugaugcagcuugaccccagcgccaagacauggauugauaucgaggggcggccugaagaccccguggagaucgcucucuaccagccgaugucuggaugcuauauucacuucuuuagagaaccuaccgaccugaaacaguucaagcaagaugccaaguacucccauggcaucgacguugccgaucuguuucccgcucagccugggcucacaagcgcggugauugaggcccugccccgcaacaugguccuuaccugucagggaucugacgauaucaaaaagcugcucgacucccagggccggagagauauuaaacugaucgacaucagccuguccaagguggauucucgcaaauucgaaaaugcugucugggaccaaugcaaggaucuuugucacaugcauacgggggugguuguggagaagaaaaagcggggcggaaaagaggaaauuacaccccacugcgcccucauggacuguaucauguuugaugccgcugucagcggcgggcugaacauuccugugcugagagccguucucccgcgcgacaugguguuccggaccuccucucccaaggucgugcugugaggacuaguuauaagacugacuagcccgaugggccucccaacgggcccuccuccccuccuugcaccgagauuaaucaaaggcucuuuucagagccaccaaaaaaaaaaaaaaaaaaaaaaaaaaaaaaaaaaaaaaaaaaaaaaaaaaaaaaaaaaaaaaaaagaauu

SEQ ID NO: 20453 - RNA, 1946 nt, Artificial Sequence
  mRNA product Design i-3 (hSL-A64-N5) comprising derived and/or modified sequence from LASV(GA391;Clade III)__CAA36646__SP-HsALB_NP(2-570) (opt5)
aggagaaagcuuaccaugaagugggugaccuucaucagccugcucuuucuguucuccucugccuacagcagcgccuccaaggaggugagaucuuuccuguggacccagagccuccggcgcgaacuguccggcuacugcucuaacaucaaacuucaagucguuaaggacgcucaggcccugcuccacgggcuggauuuuagcgagguguccaaugugcagagacuuaugcggaaacagaagcgcgacgauggagaccugaaaagacuccgggaucugaaccaagcggucaauaaccugguggaacucaagucuacacagcagaaaagcguucugcgcgugggcacgcuuuccagcgacgaucugcucauucuggcugccgaccuugagaaacugaagucuaaagucaccagaacagaacggccccucuccagcgggguguauaugggaaaucugucuucccagcaacuggaucagcgcagagcccuccugaacaugaucggcaugaccgggguuagcggaggcggcaagggggcuucugacggaauugugcgggucugggaugugaaaaaugccgagcuucugaacaaucaguucggcacaaugccuucccucacccuggcuugucuuacaaagcaggggcaaguggaccugaacgaugccguccaggcgcucaccgaccugggacugaucuacacggccaaguauccgaauagcuccgaccucgaucgccugucucagagccaucccauucuuaacaugaucgacaccaaaaaguccagccugaauaucucuggcuacaacuuuucccucggggcugccguuaaagcuggagccugcaugcuggauggcggcaauaugcuugagacaauuaaggugagcccucaaaccauggacgggauccugaaaucuauucucaaggugaaaaagagccugggaauguucgucuccgauacacccggcgaaagaaacccuuaugagaacauccuguacaagauuugucucucuggggacggauggcccuauaucgcgagccggaccuccauugugggccgcgccugggaaaauacgguuguggaucuggagcaggacaacaaaccucagaagaucgggaauggaggcagcaacaaaucucuucaguccgcuggcuuugccgcugggcugacauacagccaacucaugacccugaaggauuucaaaugcuuuaaucugaucccgaacgccaagacauggauggacauugagggaagacccgaagauccugucgagaucgcccuuuaccagcccucuuccggcuguuaugugcacuucuuucgggaaccuaccgaccucaagcaguucaaacaggacgcuaaguacagccaugggauugauguuaccgaccuguuugcggcccaacccggacugacauccgcugugaucgaggcccucccgagaaauauggucauuacgugccagggcucugaagauauccgcaaacugcuugagagccaggggcggagagacaucaagcugauugauaucacccucuccaaagccgacucucgcaaguucgagaacgcugugugggaucaguuuaaggaccugugucacaugcauacaggcgucgugguugaaaagaagaaacggggaggcaaggaggaaauuaccccucacugcgcccugauggauuguaucauguucgacgcggcugugagcgggggacuugaugccaaaguccucagagugguucugccccgcgacaugguguuccggacauccaccccuaaggucgugcugugaggacuaguuauaagacugacuagcccgaugggccucccaacgggcccuccuccccuccuugcaccgagauuaaucaaaggcucuuuucagagccaccaaaaaaaaaaaaaaaaaaaaaaaaaaaaaaaaaaaaaaaaaaaaaaaaaaaaaaaaaaaaaaaaagaauu

SEQ ID NO: 20454 - RNA, 1943 nt, Artificial Sequence
  mRNA product Design i-3 (hSL-A64-N5) comprising derived and/or modified sequence from LASV(AV;Clade V)__CCA30315__SP-HsALB_NP(2-569) (opt5)
aggagaaagcuuaccaugaagugggugaccuucaucagccugcucuuucuguucuccucugccuacagcagcgccuccaaggaggugaaaucuuuccuguggacccagagccucagacgggaacuguccggcuacugcucuaacaucaaacuucaagucguuaaggacgcucaggcccugcuccacgggcuggauuuuagcgagguguccaaugugcagcgccuuaugagaaagcagcggcgcgacgauucugaccugaaaagacuccgggaucugaaccaagcggucaauaaccugguggaacucaagagcacacagcagaaguccguucugcgcgugggaacgcuuagcucugacgaucugcucacccuggcugccgaccuugagaaacugaaguccaaagucacaagaaccgaacggccccucagcucuggcguguauauggggaaucuguccagccagcaacuggaucagcgcagagcccuccugaaccuuauuggaaugacaaauggcucucaggggucccaggcuggacgggacggcguugugcgcgucugggaugugaagaacgccgagcugcucaauaaccaauucggcaccaugccuagccugacacuugcuugucugaccaaacagggacagguggaccucaaugaugucguucaagcccugacggaccuggggcucaucuacaccgcgaaguauccgaacacauccgaccuggauagacuuacccagucucaucccauucugaauaugaucgacacaaagaaaagcucccucaacauuagcggcuacaauuuuucucugggggccgcugugaaggccggagcuugcaugcuugauggcgggaacaugcuggagaccaucaaaguguccccucagagcauggacggaauccucaagucuauucugaaagucaagcgggcccugggcauguucgugagcgauacgcccggcgaacgcaacccuuaugagaauauccucuacaaaauuugucuguccggggacggauggcccuauaucgcgucuagaacaagcauuguuggccgggccugggaaaacaccguggucgaucuugagacagacgggaagccucagaagaucggauccggcaauagcaacaaaucucugcaauccgcuggguuuagcgccggacucaccuacucucagcugaugacccugaaggaugcuaugcuucagcucgacccgaaugccaaaacauggauggauauugagggcagacccgaagacccuguggagguugcccuguaccagcccaucuccggcugcuauauccacuucuuucgcgaaccuacggaccugaagcaauucaaacaggaugcuaaguacagccaugggauugacaucgcggaucucuuugccgcucagcccggacugaccuccgccgugauugaggcccuuccgcggaacauggucaucacaugucagggcucugaagacauuaagaaacugcucgagagccaagggagaaaggauaucaaacugaucgacauugcucuguccaagaucgauucucgcaaauucgagaaugccgugugggaccaguauaaggaucuuugccacaugcauaccggagucgugguugaaaagaaaaagcggggcgggaaagaggaaauuacaccucacugugcgcucauggacugcaucauguuugaugcugccgugagcggcggacugaacacccugguccucagagccgugcugccccgcgacaugguuuuccggacguccacaccuagagugguccuuugaggacuaguuauaagacugacuagcccgaugggccucccaacgggcccuccuccccuccuugcaccgagauuaaucaaaggcucuuuucagagccaccaaaaaaaaaaaaaaaaaaaaaaaaaaaaaaaaaaaaaaaaaaaaaaaaaaaaaaaaaaaaaaaaagaauu

SEQ ID NO: 20455 - RNA, 1943 nt, Artificial Sequence
  mRNA product Design i-3 (hSL-A64-N5) comprising derived and/or modified sequence from LASV(Togo/2016/7082;Clade VI)__AMR44578__SP-HsALB_NP(2-569) (opt5)
aggagaaagcuuaccaugaagugggugaccuucaucagccugcucuuucuguucuccucugccuacagcagcaacuccaaggaggugaaaucuuuccuguggacccagagccucagacgggaacuguccggcuacugcucuaauaucaaacuucaagucguuaaagacgcccaggcucugcuccacgggcuggauuuuagcgagguguccaacgugcagcgccuuaugagaaagcagaaacgggacgauggagaccugaagcgccucagagaucugaaucaagccgucaacaaucugguggaacucaagucuguucagcagaaaagcauucugcgggugggcacacuuacguccgacgaucugcucacccuggcggcugaccuugagaagcugaaaagcaaggucacacgcaccgaaagaccccucucuuccgggguguauaugggaaaccugagcucucagcaacuggaucagcggcgcgcccuccuguccaugaucggcaugagcgggggaaaucagaacucucagccuaaaggcgacggcguugugagagucugggaugugaagaaugccgaccuucugaacaaucaauucgggacaaugccgucccucacccuggcuugucuuacaaagcagggacagguggaucugaacgacgccguccaagcucucaccgaccugggccugauuuacacggccaaauaucccaauagcuccgaucucgaccggcugucucagagccauccuauccuuaacaugauugauaccaagaaauccagccugaauaucucuggguacaacuuuucccucggagcggccaucaagacaggcgcuugcaugcuggacgggggaaacaugcuugagaccauuaaaguuacaccccagaccauggauggcauccucaagagcauucugaaagugaagcgcucucugggcauguucaucagcgacacgccuggggagagaaaucccuaugaaaacauucuguacaagaucugucucuccggagauggcuggccuuauauugccucucggacagcuaucaucgggcgcgccugggagaauaccguggucgaccuggaaagcgauuccaaaccgcagaagauuggaagcaacggcucuaauaaaucccuucaaagcgcgggguuugcccccggacugacauacucucagcucaugacccugaaggacuccaugcugcagcuugauccuaacgcuaaaaccuggaucgacauugagggcagacccgaggacccuguggaaguugcccucuuccagcccaucagcggcugcuacauucacuuuuuccgggagccgacagaucugaagcaauuuaagcaggacgcuaaauauucccaugggaucgaugugacggaccuguucgccgcccagccuggacucaccucugcugucaucgaagcgcugcccagaaauauggugcuuacaugucagggcagcgaugacauuaagaaacugcucgauucccaagggcgccgggacaucaagcugauugauguuucucugaacaaaaucgacagcagaaaguuugagaaugccgugugggaucaguacaaggaccuuugccacaugcauaccggagucguggucgaaaagaagaaaaagggcgggaaagaggagauuacaccucacugugcucuccuggauugcaucauguucgacgccgccguguccggcggacugaacgcuaccguucuccgcgccgugcugccccgggacauggucuuuagaacgagcucucccaaggugguucuuugaggacuaguuauaagacugacuagcccgaugggccucccaacgggcccuccuccccuccuugcaccgagauuaaucaaaggcucuuuucagagccaccaaaaaaaaaaaaaaaaaaaaaaaaaaaaaaaaaaaaaaaaaaaaaaaaaaaaaaaaaaaaaaaaagaauu

SEQ ID NO: 20456 - RNA, 1943 nt, Artificial Sequence
  mRNA product Design i-3 (hSL-A64-N5) comprising derived and/or modified sequence from LASV(KAK-428;Clade n.d. (VII))__ANH09741__SP-HsALB_NP(2-569) (opt5)
aggagaaagcuuaccaugaagugggugaccuucaucagccugcucuuucuguucuccucugccuacagcagcaacuccaaggaggugaaaucuuuccuguggacccagagccucagacgggaacuguccggcuacugcacaaauaucaaacuucaagucguuaaggacgcccaggcucugcuccacgggcuggauuuuucugaggugagcaacgugcagcgccuuaugagaaagcagaaacgggacgauaaugaccugaagcgccucagagaucugaaccaagccgucaauaaccugguggaacucaaguccguucagcagaaaucugugcugaaggucggaacgcuuaauagcgacgaucugcucacccuggcggcugaccuugagaaacugaaguccaaagugguucggacagaacgcccccucagcucuggcguguauauggggaaccuguccagccagcaacuggaucagagacgggcccuccugaauaugauuggaauggccggcgggucucagggaaaccagccuucccgcgacggcgucgugagagugugggaugucaagaaugcugaccuucugaacaaucaauucggcaccaugccgagccucacacuggccugucuuaccaagcaggggcagguugaucugaacgacguggugcucgcucugacagaccugggacucaucuacaccgccaaauaucccaauucuuccgaucuggaccggcuuagccaaaaccauccuguccugaacaugauugaugugaauaaguccucucucaacaucagcggcuacaauuuuucccugggggcggccguuaaagcuggagccugcaugcuugacggcgggaacaugcuggagacgauuaagaucagcccccagaccguggauggaauccucaaaucuauucugaaggucaaacgcgcucugggcauguucguguccgacacaccuggcgagagaaaucccuaugaaaacauccucuacaagguuugucugagcgggaauggauggccuuauauugccucucggaccagcaucgugggccgcgcgugggagaacacagucguggaucuugaauccaauaagaaccagccgaaagucgggaauaacggaucuaauaagaugcugcagagcuccggcuuugccaccgggcucacguacagccaacugaugacacugagagacucuaugcuucagcucgaucccaccgcuaaaacauggauugacaucgagggacggccugaggaucccguggaacuggcccuguuccagccuuccagcggcugcuacauucacuuuuucagagagcccaccgaccucaagcaguuuaaacaagacgcuaaguauucucauggcaucgauguuaacgaccuguucuccgcccagccggggcuuaccagcgccgugcuggaagcucucccucgcaauaugguccugacaugucagggauccgaugacauccggaagcugcuugauucucaggacagaaaagauauuaagcucaucgacauuagccuguccaaagcggaugcccgcaaguuugagaacgacgugugggaucaauucaaagaccugugccacaugcauacgggcaucguuguggaaaagaagaaaaagggagggaaacaggagaugacaccccacugugcucuccuggauugcauuauguuugacgccgccgucucuggcgggcuuaacgugccuacccugcgggcugugcuccccaccgacaugguuuucagaacaaucaccacgaaggucgugcugugaggacuaguuauaagacugacuagcccgaugggccucccaacgggcccuccuccccuccuugcaccgagauuaaucaaaggcucuuuucagagccaccaaaaaaaaaaaaaaaaaaaaaaaaaaaaaaaaaaaaaaaaaaaaaaaaaaaaaaaaaaaaaaaaagaauu

SEQ ID NO: 20457 - RNA, 1943 nt, Artificial Sequence; identical to SEQ ID NO: 20451
  mRNA product Design i-3 (hSL-A64-N5) comprising derived and/or modified sequence from LASV(Pinneo-NIG-1969;Clade I)__AIT17837__SP-HsALB_NP(2-569) (opt5)

SEQ ID NO: 20458 - RNA, 1943 nt, Artificial Sequence
  mRNA product Design i-3 (hSL-A64-N5) comprising derived and/or modified sequence from LASV(ISTH0009-NIG-2011;Clade II)__AIT17405__SP-HsALB_NP(2-569) (opt5)
aggagaaagcuuaccaugaagugggugaccuucaucagccugcucuuucuguucuccucugccuacagcagcguguccaaggaggucaaaucuuuccuguggacccagagccucagacgggaacuguccggcuacugcucuaacaucaaacuucaaguugugaaggacgcccaggcucugcuccacgggcuggauuuuagcgagguguccaauguccagcgccuuaugagaaagcagaaacgggacgauucugaccugaagcgccucagagaucugaaccaagccgugaauaaccugguugaacucaagagcacacagcagaaauccauucugcgggugggaacgcuuaccagcgacgaucugcucacacuggcggcugaccuugagaagcugaaaucuaaggucauccgcaccgaaagaccccucuccagcggcguguauauggggaaucugucuacacagcaacuggagcagcggcgcgcccuccugaacaugauuggaaugguuggcggggcccagggaacccagccuggcagagauggcgugguccgggugugggacgugaaaaauccggaucuucugaacaaucaauucgggacaaugcccucccucacccuggcuugucuuacgaagcagggacaggucgaccugaacgaugccguucucgcucugaccgaccugggccucaucuacacagccaaguauccuaauagcucugaccuggaucgccuuucccaaagccaucccauucugaacaugguggacaucaaaaaguccucucucaauaucagcggguacaacuuuucccugggagcggccgugaaagcuggcgccugcaugcuugaugggggaaauaugcuggagaccauuaaggucacaccucagaccauggacggcauccucaaaagcauucugaaggugaaaagaucucugggcauguucguuuccgauacgcccggggaacggaacccuuaugagaacauccucuacaagauuugucugagcggagacggcuggccguauaucgcuucucgcacaagcauuguggggagagccugggaaaauaccacagucgaucuugaguccgacggaaagccccagaaagugggcucugcggggagcaacaagucccugcagagcgccggauuuccuaccggccucaccuacucucaacugaugacacugaaagauuccaugaugcagcuugaccccagcgcuaagacguggaucgauaucgagggccggccugaagaccccguugagauugcccucuaccagccgaugucugggugcuauauccacuucuuuagagaaccuaccgaccugaaacaguucaagcaagaugcuaaguacucccauggaauugacguggccgaucuguuucccgcccagccuggccucacaagcgcugucaucgaggcgcugccccgcaauauggugcuuaccugucagggguccgacgauauuaaacggcugcucgacucucagggaagacgcgauaucaagcugaucgacauugcccugagcaaagcugauucccggagauucgaaaacgccgucugggaccaaugcaaggaucuuugucacaugcauacaggcgugguuguggagaaaaagaagcgcgggggcaaagaggaaaucacgccccacugcgcccucauggacuguauuauguaugaugcugccgucucuggaggccugaauaucccugugcugcgggcgguucucccgagagacaugguguuucgcaccagcucccccaaggucgugcugugaggacuaguuauaagacugacuagcccgaugggccucccaacgggcccuccuccccuccuugcaccgagauuaaucaaaggcucuuuucagagccaccaaaaaaaaaaaaaaaaaaaaaaaaaaaaaaaaaaaaaaaaaaaaaaaaaaaaaaaaaaaaaaaaagaauu

SEQ ID NO: 20459 - RNA, 1943 nt, Artificial Sequence
  mRNA product Design i-3 (hSL-A64-N5) comprising derived and/or modified sequence from LASV(ISTH2010-NIG-2012;Clade II)__AIT17483__SP-HsALB_NP(2-569) (opt5)
aggagaaagcuuaccaugaagugggugaccuucaucagccugcucuuucuguucuccucugccuacagcagcgccuccaaggaggugaaaucuuuccuguggacccagagccucagacgggaacuguccggcuacugcucuaacaucaaacuucaagucguuaaggacgcucaggcccugcuccacgggcuggauuuuagcgagguguccaaugugcagcgccuuaugagaaagcagaaacgggacgauucugaccugaagcgccucagagaucugaaccaagcggucaauaaccugguggaacucaagagcacacagcagaaauccauucugcggguuggaacgcuuaccagcgacgaucugcucacacuggcugccgaccuugagaagcugaaaucuaaggugauccgcaccgaaagaccccucuccagcggcgucuauauggggaaucugucuacacagcaacuggagcagcggcgcgcccuccugaaccuuauuggaauggugggcggggcucagggaacccagccuggcagagauggcguugugcgggucugggacgugaaaaauccggaucugcucaacaaucaauucgggacaaugcccucccugacccuugccugucugacgaagcagggacagguggaccucaacgaugcuguccuggcccugaccgaccucggccugaucuacacagcgaaguauccuaauagcucugaccuugaucgccugucccaaagccaucccauucucaacaugguugacaccaaaaaguccucucugaauaucagcggguuuaacuucucccuuggagccgcugugaaagccggcgcuugcaugcuggaugggggaaauaugcucgagacaaucaaggugaccccucagacgauggacggcauucugaaaagcauccugaaggucaaaaagucucucggcauguuuguguccgauacacccggggaaagaaacccuuacgagaacauucuguauaagaucugucuuagcggagacggcuggccguacauugccucucggaccagcaucguugggcgcgcgugggaaaauacaaccguggaucuggaguccgacggaaaaccccacaaggucggcaccgccgggucuaacaaaagccuccaguccgcuggauucccuacaggccugacguauagccagcugaugacccuuaaggauucuaugaugcaacucgaccccuccgccaaaacauggauugauaucgagggcagaccugaagaccccguggagaucgcucuguaccagccgaugagcgggugcuacauucacuuuuuccgggaaccuaccgaccugaagcaguuuaagcaggaugccaaauauucucauggaaucgacguugccgaucucuuccccgcucaaccuggccugacauccgcggugauugaggcccuucccagaaauaugguccugaccugucaggggagcgacgauaucaagcgccuccuggacucccagggacggagagauauuaaacugaucgacaucgcucuuucuaaggccgauagccgccgguuugaaaacgccgugugggaccagugcaaagaucucugucauaugcacacgggcgucgugguugagaagaagaaaagagggggcaaggaggaaauuacaccccacugcgcucugauggacuguaucauguacgaugccgcgguguccggaggccugaauauuccuguccuccgcgcugugcugccgcgggacaugguuuucagaaccucuagccccaaagugguccuuugaggacuaguuauaagacugacuagcccgaugggccucccaacgggcccuccuccccuccuugcaccgagauuaaucaaaggcucuuuucagagccaccaaaaaaaaaaaaaaaaaaaaaaaaaaaaaaaaaaaaaaaaaaaaaaaaaaaaaaaaaaaaaaaaagaauu

SEQ ID NO: 20460 - RNA, 1943 nt, Artificial Sequence
  mRNA product Design i-3 (hSL-A64-N5) comprising derived and/or modified sequence from LASV(Lassa virus/H.sapiens-wt/NGA/2015/ISTH_0543;Clade II)__AVO03640__SP-HsALB_NP(2-569) (opt5)
aggagaaagcuuaccaugaagugggugaccuucaucagccugcucuuucuguucuccucugccuacagcagcgccuccaaggaggugaaaucuuuccuguggacccagagccucagacgggaacuguccggcuacugcucuaacaucaaacuucaagucguuaaggacgcucaggcccugcuccacgggcuggauuuuagcgagguguccaaugugcagcgccuuaugagaaagcagaaacgggacgauucugaccugaagcgccucagagaucugaaccaagcggucaauaaccugguggaacucaagagcacacagcagaaauccauucugcggguuggaacgcuuaccagcgacgaucugcucacacuggcugccgaccuugagaagcugaaaucuaaggugauccgcaccgaaagaccccucuccagcggcgucuauauggggaaucugucuacacagcaacuggagcagcggcgcgcccuccugaacaugauuggaauggugggcggggcucagggaacccagccuggcagagauggcguugugcgggucugggacgugaaaaauccggaucuucugaacaaucaauucgggacaaugcccucccucacccuggccugucuuacgaagcagggacagguggaccugaacgaugcuguccucgcccugaccgaccugggccucaucuacacagcgaaguauccuaauagcucugaccuggaucgccuuucccaaagccaucccauucugaacaugguugacaccaaaaaguccucucucaauaucagcggguacaacuuuucccugggagccgcugugaaagccggcgcuugcaugcuugaugggggaaauaugcuggagacaaucaaggugaccccucagacgauggacggcauucucaaaagcauccugaaggucaaaaagucucugggcauguucguguccgauacacccggggaaagaaacccuuaugagaacauucucuacaagaucugucugagcggagacggcuggccguauauugccucucggaccagcaucguugggcgcgcgugggaaaauacaaccguggaucuugaguccgacggaaaaccccagaaggucggcucugccgggagcaacaaaucccugcagagcgcuggauuuccuaccggccucacauacucucaacugaugacgcugaaggauuccaugaugcagcuugaccccagcgccaaaaccuggauugauaucgagggcagaccugaagaccccguggagaucgcucucuaccagccgaugucugggugcuauauucacuucuuucgggaaccuacagaccugaagcaguucaagcaagaugccaaauacucccauggaaucgacguugccgaucuguuucccgcucagccuggccucaccagcgcggugauugaggcccugcccagaaauaugguccuuacaugucagggguccgacgauaucaagcgccugcucgacucucagggacggaaagauauuaagcugaucgacaucgcucugagcaaagccgauuccagacgcuucgaaaacgccgugugggaccaaugcaaggaucuuugucacaugcauaccggcgucgugguugagaagaaaaagagagggggcaaagaggaaauuacgccccacugcgcucucauggacuguaucauguaugaugccgcggugucuggaggccugaauauuccuguccugcgggcugugcucccgcgcgacaugguuuuucggacaagcucccccaaggugguccugugaggacuaguuauaagacugacuagcccgaugggccucccaacgggcccuccuccccuccuugcaccgagauuaaucaaaggcucuuuucagagccaccaaaaaaaaaaaaaaaaaaaaaaaaaaaaaaaaaaaaaaaaaaaaaaaaaaaaaaaaaaaaaaaaagaauu

SEQ ID NO: 20461 - RNA, 1943 nt, Artificial Sequence
  mRNA product Design i-3 (hSL-A64-N5) comprising derived and/or modified sequence from LASV(Lassa virus/H.sapiens-wt/NGA/2016/ISTH_0009;Clade II)__AVO03572__SP-HsALB_NP(2-569) (opt5)
aggagaaagcuuaccaugaagugggugaccuucaucagccugcucuuucuguucuccucugccuacagcagcgccuccaaggaggugaaaucuuuccuguggacccagagccucagacgggaacuguccggcuacugcucuaacaucaaacuucaagucguuaaggacgcucaggcccugcuccacgggcuggauuuuagcgagguguccaaugugcagcgccuuaugagaaagcagaaacgggacgauucugaccugaagcgccucagagaucugaaccaagcggucaauaaccugguggaacucaagagcacacagcagaaauccauucugcggguuggaacgcuuaccagcgacgaucugcucacacuggcugccgaccuugagaagcugaaaucuaaggugauccgcaccgaaagaccccucuccagcggcgucuauauggggaaucugucuacacagcaacuggagcagcggcgcgcccuccugaacaugauuggaauggugggcggggcucagggaacccagccuggcagagauggcguugugcgggucugggacgugaaaaauccggaucuucugaacaaucaauucgggacaaugcccucccucacccuggccugucuuacgaagcagggacagguggaccugaacgaugcuguccucgcccugaccgaccugggccucaucuacacagcgaaguauccuaauagcucugaccuggaucgccuuucccaaagccaucccauucugaacaugguugacaccaaaaaguccucucucaauaucagcggguacaacuuuucccugggagccgcugugaaagccggcgcuugcaugcuugaugggggaaauaugcuggagacaaucaaggugaccccucagacgauggacggcauucucaaaagcauccugaaggucaaaaagucucugggcauguucguguccgauacacccggggaaagaaacccuuaugagaacauucucuacaagaucugucugagcggagacggcuggccguauauugccucucggaccagcaucguugggcgcgcgugggaaaauacaaccguggaucuugaguccgacggaaaaccccagaaggucggcucugccgggagcaacaaaucccugcagagcgcuggauuuccuaccggccucacauacucucaacugaugacgcugaaggauuccaugaugcagcuugaccccagcgccaaaaccuggauugauaucgagggcagaccugaagaccccguggagaucgcucucuaccagccgaugucugggugcuauauucacuucuuucgggaaccuacagaccugaagcaguucaagcaagaugccaaauacucccauggaaucgacguugccgaucuguuucccgcucagccuggccucaccagcgcggugauugaggcccugcccagaaauaugguccuuacaugucagggguccgacgauaucaagcgccugcucgacucucagggacggagagauauuaaacugaucgacaucgcucugagcaaggccgauucccgccgguucgaaaacgccgugugggaccaaugcaaagaucuuugucacaugcauaccggcgucgugguugagaagaagaaaagagggggcaaggaggaaauuacgccccacugcgcucucauggacuguaucauguaugaugccgcggugucuggaggccugaauauuccuguccugcgcgcugugcucccgcgggacaugguuuuuagaacaagcucccccaaagugguccugugaggacuaguuauaagacugacuagcccgaugggccucccaacgggcccuccuccccuccuugcaccgagauuaaucaaaggcucuuuucagagccaccaaaaaaaaaaaaaaaaaaaaaaaaaaaaaaaaaaaaaaaaaaaaaaaaaaaaaaaaaaaaaaaaagaauu

SEQ ID NO: 20462 - RNA, 1943 nt, Artificial Sequence
  mRNA product Design i-3 (hSL-A64-N5) comprising derived and/or modified sequence from LASV(Lassa virus/H.sapiens-wt/NGA/2016/ISTH_0017;Clade II)__AVO03568__SP-HsALB_NP(2-569) (opt5)
aggagaaagcuuaccaugaagugggugaccuucaucagccugcucuuucuguucuccucugccuacagcagcgccuccaaggaggugaaaucuuuccuguggacccagagccucagacgggaacuguccggcuacugcucuagcaucaaacuucaagucguuaaggacgcucaggcccugcuccacgggcuggauuuuuccgaggugucuaacgugcagcgccuuaugagaaagcagaaacgggacgauagcgaccugaagcgccucagagaucugaaucaagcggucaacaaucugguggaacucaaguccacacagcagaaaagcauucugcggguuggaacgcuuaccucugacgaucugcucacacuggcugccgaccuugagaagcugaaauccaaggugauccgcaccgaaagaccccucagcucuggcgucuauauggggaaccuguccacacagcaacuggagcagcggcgcgcccuccugaauaugauuggaauggcuggcggggcccagggaacccagccuggcagagauggcgugguucgggugugggacgucaaaaacccggaucuucugaauaaccaauucgggacaaugcccagccucacccuggcuugucuuacgaagcagggacagguggaccugaaugaugccgugcucgcgcugaccgaccugggccucaucuacacagccaaguauccuaacucuuccgaccuggaucgccuuagccaaucccaucccauucugaauauggucgacaccaaaaagucuagccucaacaucuccggguacaauuuuagccugggagcugccguuaaagcuggcgccugcaugcuugaugggggaaacaugcuggagacaaucaaggugaccccucagacgauggacggcauucucaaaucuauccugaaggugaaaagaucccugggcauguucgucagcgaugcgcccggggaacggaauccuuaugagaacauucucuacaagaucugucugucuggagacggcuggccguauauugccagccgcacauccaucguggggagagcuugggaaaacaccacaguugaucuugagucugacggaaagccccagaaagugggcgccaccgggagcaauaagucccugcagagcgcuggauuuccuaccggccucacauacucucaacugaugacgcugaaagauuccaugaugcagcuugaccccagcgccaagaccuggauugauaucgagggccggccugaagaccccgucgagguggcccucuaccagccgguuucugggugcuauauccacuucuuuagagaaccuacagaccugaaacaguucaagcaagaugcuaaguacucccauggaauugacguggcggaucuguuucccgcccagccuggccucaccagcgcugucaucgaggcccugccccgcaacauggugcuuacaugucagggguccgacgauauuaaaaagcugcucgacucucagggacggaaagauaucaagcugauugacaucgcccugagcaaagcugauuccagacgcuucgaaaaugccgucugggaccaaugcaaggaucuuugucacaugcauaccggcgugguuguggagaagaaaaagagagggggcaaagaggaaaucacgccccacugcgcgcucauggacuguauuauguaugaugcugccgucucuggaggccugaacaucccugugcugcgggccguucucccgcgcgacaugguguuucggacaagcucccccaaggucgugcugugaggacuaguuauaagacugacuagcccgaugggccucccaacgggcccuccuccccuccuugcaccgagauuaaucaaaggcucuuuucagagccaccaaaaaaaaaaaaaaaaaaaaaaaaaaaaaaaaaaaaaaaaaaaaaaaaaaaaaaaaaaaaaaaaagaauu

SEQ ID NO: 20463 - RNA, 1943 nt, Artificial Sequence
  mRNA product Design i-3 (hSL-A64-N5) comprising derived and/or modified sequence from LASV(Lassa virus/H.sapiens-wt/NGA/2018/ISTH_0959;Clade II)__AVV65100__SP-HsALB_NP(2-569) (opt5)
aggagaaagcuuaccaugaagugggugaccuucaucagccugcucuuucuguucuccucugccuacagcagcgccuccaaggaggugaaaucuuuccuguggacccagagccucagacgggaacuguccggcuacugcucuaacaucaaacuucaagucguuaaggacgcucaggcccugcuccacgggcuggauuuuagcgagguguccaaugugcagcgccuuaugagaaagcagaaacgggacgauucugaccugaagcgccucagagaucugaaccaagcggucaauaaccugguggaacucaagagcacccagcagaaauccauucugcggguuggaacgcuuaccagcgacgaucugcucacacuggcugccgaccuugagaagcugaaaucuaaggugauccgcaccgaaagaccccucuccagcggcgucuauauggggaaucugucuacacagcaacuggagcagcggcgcgcccuccugaaccuuauuggaauggugggcggggcucagggaacccagccuggcagagauggcguugugcgggucugggacgugaaaaauccggaucugcucaacaaucaauucgggacaaugcccucccugacccuugccugucugacgaagcagggacagguggaccucaacgaugucguucuggcucugaccgaccucggccugaucuacacagccaaguauccuaauagcucugaccuugaucgccugucccaaagccaucccauucucaacaugguggacaccaaaaaguccucucugaauaucagcggguuuaacuucucccuuggagcggccgugaaagcuggcgccugcaugcuggaugggggaaauaugcucgagacaaucaaggucaccccucagacgauggacggcauucugaaaagcauccugaaggugaaaaagucucucggcauguuuguuuccgauacacccggggaaagaaacccuuacgagaacauucuguauaagaucugucuuagcggagacggcuggccguacauugcuucucggaccagcaucguggggcgcgccugggaaaauacaaccgucgaucuggaguccgacggaaaaccccacaaggugggcaccgcggggucuaacaaaagccuccaguccgccggauucccuacaggccugacguauagccagcugaugacccuuaaggauucuaugaugcaacucgaccccuccgcuaaaacauggauugauaucgagggcagaccugaagaccccguugagaucgcccuguaccagccgaugagcgggugcuacauucacuuuuuccgggaaccuaccgaccugaagcaguuuaagcaggaugcuaaauauucucauggaaucgacguggccgaucucuuccccgcccaaccuggccugacauccgcugucauugaggcgcuucccagaaauauggugcugaccugucaggggagcgacgauaucaagcgccuccuggacucccagggacggaaagauauuaagcugaucgacaucgcccuuucuaaaacggauagcagacgcuuugaaaacgcugucugggaccagugcaaggaucucugucauaugcacacaggcgugguuguggagaagaaaaagagagggggcaaagaggaaauuacaccccacugcgcccugauggacuguaucauguacgaugccgcugucuccggaggccugaauauuccugugcuccgggccguucugccgcgcgacaugguguuccggaccucuagccccaaggucgugcuuugaggacuaguuauaagacugacuagcccgaugggccucccaacgggcccuccuccccuccuugcaccgagauuaaucaaaggcucuuuucagagccaccaaaaaaaaaaaaaaaaaaaaaaaaaaaaaaaaaaaaaaaaaaaaaaaaaaaaaaaaaaaaaaaaagaauu

SEQ ID NO: 20464 - RNA, 1943 nt, Artificial Sequence
  mRNA product Design i-3 (hSL-A64-N5) comprising derived and/or modified sequence from LASV(LASV003-NIG-2008;Clade II)__AIT17581__SP-HsALB_NP(2-569) (opt5)
aggagaaagcuuaccaugaagugggugaccuucaucagccugcucuuucuguucuccucugccuacagcagcgccuccaaggaggugaaaucuuuccuguggacccagagccucagacgggaacuguccggcuacugcucuagcaucaaacuucaagucguuaaggacgcucaggcccugcuccacgggcuggauuuuuccgaggugucuaacgugcagcgccuuaugagaaagcagaaacgggacgauagcgaccugaagcgccucagagaucugaaucaagcggucaacaaucugguggaacucaaguccacccagcagaaaagcguucugcgggugggaacgcuuaccucugacgaucugcucacacuggcugccgaccuugagaagcugaaauccaaggucauucgcaccgaaagaccccucagcucuggcguguauauggggaaccuguccgcccagcaacuggagcagcggcgcacacuccugaauaugaucggaaugguuggcggggcucagggaacccagccuggcagagauggcgugguccgggugugggacgugaaaaacccggaucuucugaauaaccaauucgggacaaugcccagccucacccuggccugucuuacgaagcagggacaggucgaccugaaugauguugugcucgcucugaccgaccugggccucauuuacacagccaaguauccuaacucuuccgaccuggaucgccuuagccaaucccaucccauccugucuaugguggacaccaaaaagagcucccucaauauuagcggguacaacuuuucucugggagcggccgucaaagcuggcgccugcaugcuugaugggggaaauaugcuggagacaaucaaggugaccccucagacgauggacggcauccucaaauccauucugaagguuaaaaagagccugggcauguucgugucugauacacccggggaaagaaacccuuaugagaauauccucuacaagauuugucugagcggagacggcuggccguauaucgcuucccggaccucuauugucgggcgcgccugggaaaacacaaccguggaucuugagagcgacggaaaaccccagaagguuggcaccgcgggguccaacaaaagccugcagucugccggauuuccuacaggccucacguacucccaacugaugacccugaaggauagcaugaugcagcuugaccccucugcuaaaacauggaucgauauugagggcagaccugaagaccccguggagaucgcccucuaccagccgauguccgggugcuauauccacuucuuucgggaaccuaccgaccugaagcaguucaagcaagaugcuaaauacagccauggaauugacgucacagaucuguuucccgcccagccuggccucaccuccgccgugaucgaggcucugcccagaaauaugguccuuacgugucaggggucugacgauauuaagcgccugcucgacagccagggacggagagauaucaaacugauugacaucgcgcuguccaaggccgauucucgccgguucgaaaacgcugugugggaccaaugcaaagaucuuugucacaugcauacaggcguuguggucgagaagaagaaaagagggggcaaggaggaaaucacaccccacugcgcccucauggacuguauuauguaugaugccgcugugagcggaggccugaauaucccuguucugcgcgccgugcucccgcgggacauggucuuuagaaccuccagccccaaaguggugcugugaggacuaguuauaagacugacuagcccgaugggccucccaacgggcccuccuccccuccuugcaccgagauuaaucaaaggcucuuuucagagccaccaaaaaaaaaaaaaaaaaaaaaaaaaaaaaaaaaaaaaaaaaaaaaaaaaaaaaaaaaaaaaaaaagaauu

SEQ ID NO: 20465 - RNA, 1943 nt, Artificial Sequence
  mRNA product Design i-3 (hSL-A64-N5) comprising derived and/or modified sequence from LASV(LASV035-NIG-2009;Clade II)__AIT17589__SP-HsALB_NP(2-569) (opt5)
aggagaaagcuuaccaugaagugggugaccuucaucagccugcucuuucuguucuccucugccuacagcagcgccuccaaggaggugaaaucuuuccuguggacccagagccucagacgggaacuguccggcuacugcucuagcaucaaacuucaagucguuaaagacgcucaggcccugcuccacgggcuggauuuuuccgaggugucuaacgugcagcgccuuaugagaaagcagaaacgggacgauagcgaccugaagcgccucagagaucugaaucaagcggucaacaaucugguggaacucaaguccacacagcagaaaagcauucugcggguuggaacgcuuaccucugacgaucugcucacacuggcugccgaccuugagaagcugaaauccaaggugauccgcaccgaaagaccccucagcucuggcgucuauauggggaaccuguccgcccagcaacuggagcagcggcgcgcucuccugaauaugauuggaauggugggcggggcccagggaacacagccuggcagagauggcguugugcgggucugggacgugaaaaacccggaucuucugaauaaccaauucgggaccaugcccagccucacacuggcuugucuuaccaagcagggacagguggaccugaaugaugccguccucgcgcugacggaccugggccucaucuacaccgccaaguauccuaacucuuccgaccuggaucgccuuagccaaucccaucccauucugaauaugguugacacaaagaagucuagccucaacaucuccggguacaauuuuagccugggagcugccgugaaagcuggcgccugcaugcuugaugggggaaacaugcuggagaccaucaaggugacaccucagaccauggacggcauucucaaaucuauccugaaggucaaaagaucccugggcauguucgugagcgauacgcccggggaacggaauccuuaugagaacauucucuacaagaucugucugucuggagacggcuggccguauauugcgagccgcacauccaucguugggagagccugggaaaacaccacaguggaucuugagucugacggaaagccccagaaagucggcaccaccgggagcaauaagucccugcagagcgcuggauuuccuacaggccucacguacucucaacugaugacccugaaagauuccaugaugcagcuugaccccagcgccaagacauggauugauaucgagggccggccugaagaccccguggagaucgcucucuaccagccgaugucugggugcuauauucacuucuuuagagaaccuaccgaccugaaacaguucaagcaagaugccaaguacucccauggaaucgacguugccgaucuguuucccgcucagccuggccucacaagcgcggugauugaggcccugccccgcaacaugguccuuaccugucagggguccgacgauaucaaaaagcugcucgacucucagggacggagagauauuaaacugaucgacaucgcucugagcaaggccgauucccgcaaauucgaaaaugccgugugggaccaaugcaaggaucuuugucacaugcauacgggcgucgugguugagaagaaaaagagagggggcaaagaggaaauuacaccccacugcgcucucauggacuguaucauguaugaugccgcggugucuggaggccugaacauuccuguccugcgggcugugcucccgcgcgacaugguuuuucggaccagcucccccaaggugguccugugaggacuaguuauaagacugacuagcccgaugggccucccaacgggcccuccuccccuccuugcaccgagauuaaucaaaggcucuuuucagagccaccaaaaaaaaaaaaaaaaaaaaaaaaaaaaaaaaaaaaaaaaaaaaaaaaaaaaaaaaaaaaaaaaagaauu

SEQ ID NO: 20466 - RNA, 1943 nt, Artificial Sequence
  mRNA product Design i-3 (hSL-A64-N5) comprising derived and/or modified sequence from LASV(LASV1000-NIG-2009;Clade II)__AIT17783__SP-HsALB_NP(2-569) (opt5)
aggagaaagcuuaccaugaagugggugaccuucaucagccugcucuuucuguucuccucugccuacagcagcgccuccaaggaggugaaaucuuuccuguggacccagagccucagacgggaacuguccggcuacugcucuaacaucaaacuucaagucguuaaggacgcucaggcccugcuccacgggcuggauuuuagcgagguguccaaugugcagcgccuuaugagaaagcagaaacgggacgauucugaccugaagcgccucagagaucugaaccaagcggucaauaaccugguggaacucaagagcacacagcagaaauccauucugcggguuggaacgcuuaccagcgacgaucugcucacacuggcugccgaccuugagaagcugaaaucuaaggugauccgcaccgaaagaccccucuccagcggcgucuauauggggaaucugucuacacagcaacuggagcagcggcgcgcccuccugaacaugauuggaauggugggcggggcucagggaacccagccuggcagagauggcguugugcgggucugggacgugaaaaauccggaucuucugaacaaucaauucgggacaaugcccucccucacccuggccugucuuacgaagcagggacagguggaccugaacgaugucguucucgcucugaccgaccugggccucaucuacacagccaaguauccuaauagcucugaccuggaucgccuuucccaaagccaucccauucugaacaugguggacaccaaaaaguccucucucaauaucagcggguacaacuuuucccugggagcggccgugaaagcuggcgccugcaugcuugaugggggaaauaugcuggagacaaucaaggucaccccucagacgauggacggcauucucaaaagcauccugaaggugaaaaagucucugggcauguucguuuccgauacacccggggaaagaaacccuuaugagaacauucucuacaagaucugucugagcggagacggcuggccguauauugcuucucggaccagcaucguggggcgcgccugggaaaauacaaccgucgaucuugaguccgacggaaaaccccagaaggugggcaccgcggggucuaacaaaagccugcaguccgccggauuuccuacaggccucacguacagccaacugaugacccugaaggauucuaugaugcagcuugaccccuccgcuaaaacauggauugauaucgagggcagaccugaagaccccguugagaucgcccucuaccagccggugagcgggugcuauauucacuucuuucgggaaccuaccgaccugaagcaguucaagcaagaugcuaaauacucucauggaaucgacgucgccgaucuguuucccgcccagccuggccucacauccgcugugauugaggcgcugcccagaaauaugguccuuaccugucaggggagcgacgauaucaagcgccugcucgacucccagggacggagagauauuaaacugaucgacaucgcccugucuaaggcugauagccgccgguucgaaaacgccgugugggaccaaugcaaagaucuuugucacaugcauacgggcguuguggucgagaagaagaaaagagggggcaaggaggaaauuacaccccacugcgcccucauggacuguaucauguaugaugcugccguguccggaggccugaauauuccuguucugcgcgcggugcucccgcgggacauggucuuuagaaccucuagccccaaaguggugcugugaggacuaguuauaagacugacuagcccgaugggccucccaacgggcccuccuccccuccuugcaccgagauuaaucaaaggcucuuuucagagccaccaaaaaaaaaaaaaaaaaaaaaaaaaaaaaaaaaaaaaaaaaaaaaaaaaaaaaaaaaaaaaaaaagaauu

SEQ ID NO: 20467 - RNA, 1943 nt, Artificial Sequence
  mRNA product Design i-3 (hSL-A64-N5) comprising derived and/or modified sequence from LASV(LASV221-NIG-2010;Clade II)__AIT17625__SP-HsALB_NP(2-569) (opt5)
aggagaaagcuuaccaugaagugggugaccuucaucagccugcucuuucuguucuccucugccuacagcagcgccuccaaggaggugaaaucuuuccuguggacccagagccucagacgggaacuguccggcuacugcucuagcaucaaacuucaagucguuaaggacgcucaggcccugcuccacgggcuggauuuuuccgaggugucuaacgugcagcgccuuaugagaaagcagcggcgcgacgauagcgaccugaaaagacuccgggaucugaaucaagcggucaacaaucugguggaacucaaguccacacagcaaaagagcauucugcgcguuggaacgcuuaccucugacgaucugcucacacuggcugccgaccuugagaaacugaaguccaaagugaucagaaccgaacggccccucagcucuggcgucuauauggggaaccuguccacacagcagcuggagcagcgcagagcccuccugaauaugauuggaauggugggcggggcucagggaacccagccuggccgggauggcguugugcgcgucugggacgugaagaacccggaucuucugaauaaccaauucgggacaaugcccagccucacccuggccugucuuacgaaacagggacagguggaccugaaugaugcuguccucgcccugaccgaccugggccucaucuacacagcgaaguauccuaacucuuccgaccuggauagacuuagccaaucccaucccauucugaauaugguugacaccaagaaaucuagccucaacaucuccggguacaauuuuagccugggagccgcugugaaggccggcgcuugcaugcuugaugggggaaacaugcuggagacaaucaaagugaccccucagacggucgacggcauucucaagucuauccugaaagugaagcggucccugggcauguucguuagcgauacacccggggaacgcaauccuuaugagaacauucucuacaaaaucugucugucuggagacggcuggccguauauugccagcagaaccuccaucguggggcgggcgugggaaaacacaaccgucgaucuugagucugacggaaagccccagaaggugggcaccgccgggagcaauaaaucccugcagagcgcuggauuuccuacaggccucacguacucucaacugaugacccugaaggauuccaugaugcagcuugaccccagcgccaaaacauggauugauaucgagggcagaccugaagaccccguugagaucgcucucuaccagccgaugucugggugcuauauucacuucuuucgcgaaccuaccgaccugaagcaguucaaacaagaugccaaguacucccauggaaucgacguggccgaucuguuucccgcucagccuggccucacaagcgcggucauugaggcccugccccggaacauggugcuuaccugucagggguccgacgauaucaagagacugcucgacucucagggacgccgggauauuaaacugaucgacaucgcucugagcaaggccgauuccagaaaauucgaaaaugccgucugggaccaaugcaaggaucuuugucacaugcauacgggcgugguuguggagaaaaagaagcgcgggggcaaagaggaaauuacaccccacugcgcucucauggacuguaucauguaugaugccgcggucucuggaggccugaacauuccugugcugcgggcuguucucccgagagacaugguguuucgcaccagcucccccaaggucgugcugugaggacuaguuauaagacugacuagcccgaugggccucccaacgggcccuccuccccuccuugcaccgagauuaaucaaaggcucuuuucagagccaccaaaaaaaaaaaaaaaaaaaaaaaaaaaaaaaaaaaaaaaaaaaaaaaaaaaaaaaaaaaaaaaaagaauu

SEQ ID NO: 20468 - RNA, 1943 nt, Artificial Sequence
  mRNA product Design i-3 (hSL-A64-N5) comprising derived and/or modified sequence from LASV(LASV237-NIG-2010;Clade II)__AIT17639__SP-HsALB_NP(2-569) (opt5)
aggagaaagcuuaccaugaagugggugaccuucaucagccugcucuuucuguucuccucugccuacagcagcgccuccaaggaggugaaaucuuuccuguggacccagagccucagacgggaacuguccggcuacugcucuaacaucaaacuucaagucguuaaggacgcucaggcccugcuccacgggcuggauuuuagcgagguguccaaugugcagcgccuuaugagaaagcagaaacgggacgauucugaccugaagcgccucagagaucugaaccaagcggucaauaaccugguggaacucaagagcacacagcagaaauccauucugcggguuggaacgcuuaccagcgacgaucugcucacacuggcugccgaccuugagaagcugaaaucuaaggugauccgcaccgaaagaccccucuccagcggcgucuauauggggaaucugucuacacagcaacuggagcagcggcgcgcccuccugaacaugauuggaauggugggcggggcucagggaacccagccuggcagagauggcguugugcgggucugggacgugaaaaauccggaucuucugaacaaucaauucgggacaaugcccucccucacccuggccugucuuacgaagcagggacagguggaccugaacgaugcuguccucgcccugaccgaccugggccucaucuacacagcgaaguauccuaauagcucugaccuggaucgccuuucccaaagccaucccauucugaacaugguugacaucaaaaaguccucucucaauaucagcggguacaacuuuucccugggagccgcugugaaagccggcgcuugcaugcuugaugggggaaauaugcuggagaccauuaaggugacaccucagaccauggacggcauccucaaaagcauucugaaggucaaaagaucucugggcauguucguguccgauacgcccggggaacggaacccuuaugagaacauccucuacaagauuugucugagcggagacggcuggccguauaucgccucucgcacaagcauuguugggagagcgugggaaaauaccacaguggaucuugaguccgacggaaagccccagaaagucggcucugccgggagcaacaagucccugcagagcgcuggauuuccuaccggccucaccuacucucaacugaugacacugaaagauuccaugaugcagcuugaccccagcgccaagacguggaucgauaucgagggccggccugaagaccccguggagauugcucucuaccagccgaugucugggugcuauauccacuucuuuagagaaccuaccgaccugaaacaguucaagcaagaugccaaguacucccauggaauugacguugccgaucuguuucccgcucagccuggccucacaagcgcggugaucgaggcccugccccgcaauaugguccuuaccugucagggguccgacgauauuaaacggcugcucgacucucagggaagacgcgauaucaagcugaucgacauugcucugagcaaagccgauucccggagauucgaaaacgccgugugggaccaaugcaaggaucuuugucacaugcauacaggcgucgugguugagaaaaagaagcgcgggggcaaagaggaaaucacgccccacugcgcucucauggacuguauuauguaugaugccgcggugucuggaggccugaauaucccuguccugcgggcugugcucccgagagacaugguuuuucgcaccagcucccccaaggugguccugugaggacuaguuauaagacugacuagcccgaugggccucccaacgggcccuccuccccuccuugcaccgagauuaaucaaaggcucuuuucagagccaccaaaaaaaaaaaaaaaaaaaaaaaaaaaaaaaaaaaaaaaaaaaaaaaaaaaaaaaaaaaaaaaaagaauu

SEQ ID NO: 20469 - RNA, 1943 nt, Artificial Sequence
  mRNA product Design i-3 (hSL-A64-N5) comprising derived and/or modified sequence from LASV(LASV253-NIG-2011;Clade II)__AIT17671__SP-HsALB_NP(2-569) (opt5)
aggagaaagcuuaccaugaagugggugaccuucaucagccugcucuuucuguucuccucugccuacagcagcgccuccaaggaggugaaaucuuuccuguggacccagagccucagacgggaacuguccggcuacugcucuagcaucaaacuucaagucguuaaggacgcucaggcccugcuccacgggcuggauuuuuccgaggugucuaacgugcagcgccuuaugagaaagcagaaacgggacgauagcgaccugaagcgccucagagaucugaaucaagcggucaacaaucugguggaacucaaguccacccagcagaaaagcguucugcgggugggaacgcuuaccucugacgaucugcucacacuggcugccgaccuugagaagcugaaauccaaggucauucgcaccgaaagaccccucagcucuggcguguauauggggaaccuguccacacagcaacuggagcagcggcgcgcccuccugaauaugaucggaaugguuggcggggcucagggaacccagccuggcagagauggcgugguccgggugugggacgugaaaaacccggaucuucugaauaaccaauucgggacaaugcccagccucacccuggccugucuuacgaagcagggacaggucgaccugaaugauguugugcucgcucugaccgaccugggccucauuuacacagccaaguauccuaacucuuccgaccuggaucgccuuagccaaucccaucccauccugaauaugguggacaccaaaaagucuagccucaacauuuccggguacaauuuuagccugggagcggccgucaaagcuggcgccugcaugcuugaugggggaaacaugcuggagacaaucaaggugaccccucagacgauggacggcauccucaaaucuauucugaagguuaaaaagucccugggcauguucgugagcgauacacccggggaaagaaauccuuaugagaacauccucuacaagauuugucugucuggagacggcuggccguauaucgcuagccggaccuccauugucgggcgcgccugggaaaacacaaccguggaucuugagucugacggaaaaccccagaagguuggcaccgcggggagcaauaaaucccugcagagcgccggauuuccuacaggccucacguacucucaacugaugacccugaaggauuccaugaugcagcuugaccccagcgcuaaaacauggaucgauauugagggcagaccugaagaccccguggagaucgcccucuaccagccgaugucugggugcuauauccacuucuuucgggaaccuaccgaccugaagcaguucaagcaagaugcuaaauacucccauggaauugacgucacagaucuguuucccgcccagccuggccucaccagcgccgugaucgaggcucugcccagaaacaugguccuuacgugucagggguccgacgauauuaagcgccugcucgacucucagggacggagagauaucaaacugauugacaucgcgcugagcaaggccgauucccgccgguucgaaaaugcugugugggaccaaugcaaagaucuuugucacaugcauacaggcguuguggucgagaagaagaaaagagggggcaaggaggaaaucacaccccacugcgcccucauggacuguauuauguaugaugccgcugugucuggaggccugaacaucccuguucugcgcgccgugcucccgcgggacauggucuuuagaaccagcucccccaaaguggugcugugaggacuaguuauaagacugacuagcccgaugggccucccaacgggcccuccuccccuccuugcaccgagauuaaucaaaggcucuuuucagagccaccaaaaaaaaaaaaaaaaaaaaaaaaaaaaaaaaaaaaaaaaaaaaaaaaaaaaaaaaaaaaaaaaagaauu

SEQ ID NO: 20470 - RNA, 1943 nt, Artificial Sequence
  mRNA product Design i-3 (hSL-A64-N5) comprising derived and/or modified sequence from LASV(LASV254-NIG-2011;Clade II)__AIT17675__SP-HsALB_NP(2-569) (opt5)
aggagaaagcuuaccaugaagugggugaccuucaucagccugcucuuucuguucuccucugccuacagcagcgccuccaaggaggugaaaucuuuccuguggacccagagccucagacgggaacuguccggcuacugcucuagcaucaaacuucaagucguuaaggacgcucaggcccugcuccacgggcuggauuuuuccgaggugucuaacgugcagcgccuuaugagaaagcagaaacgggacgauagcgaccugaagcgccucagagaucugaaucaagcggucaacaaucugguggaacucaaguccacacagcagaaaagcguucugcgggugggaacgcuuaccucugacgaucugcucacacuggcugccgaccuugagaagcugaaauccaaggucauucgcaccgaaagaccccucagcucuggcguguauauggggaaccuguccacacagcaacuggagcagcggcgcgcccuccugaauaugaucggaaugguuggcggggcucagggaacccagccuggcagagauggcgugguccgggugugggacgugaaaaacccggaucuucugaauaaccaauucgggacaaugcccagccucacccuggccugucuuacgaagcagggacaggucgaccugaaugaugcuguucucgcccugaccgaccugggccucauuuacacagcgaaguauccuaacucuuccgaccuggaucgccuuagccaaucccaucccauccugaauaugguggacaccaaaaagucuagccucaacauuuccggguacaauuuuagccugggagccgcugugaaagccggcgcuugcaugcuugaugggggaaacaugcuggagacaaucaaggucaccccucagacgauggacggcauccucaaaucuauucugaaggugaaaaagucccugggcauguucguuagcgauacacccggggaaagaaauccuuaugagaacauccucuacaagauuugucugucuggagacggcuggccguauaucgccagccggaccuccauuguggggcgcgcgugggaaaacacaaucgucgaucuugagucugacggaaaaccccagaaggugggcaccgccgggagcaauaaaucccugcagagcgcuggauuuccuaccggccucacauacucucaacugaugacgcugaaggauuccaugaugcagcuugaccccagcgccaaaaccuggauugauaucgagggcagaccugaagaccccguugagaucgcucucuaccagccgaugucugggugcuauauucacuucuuucgggaaccuacagaccugaagcaguucaagcaagaugccaaauacucccauggaaucgacguggccgaucuguuucccgcucagccuggccucaccagcgcggucauugaggcccugcccagaaacauggugcuuacaugucagggguccgacgauaucaagcgccugcucgacucucagggacggagagauauuaaacugaucgacaucgcucugagcaaggccgauucccgccgguucgaaaaugccgucugggaccaaugcaaagaucuuugucacaugcauaccggcgugguuguggagaagaagaaaagagggggcaaggaggaaauuacgccccacugcgcucucauggacuguaucauguaugaugccgcggucucuggaggccugaacauuccugugcugcgcgcuguucucccgcgggacaugguguuuagaacaagcucccccaaagucgugcugugaggacuaguuauaagacugacuagcccgaugggccucccaacgggcccuccuccccuccuugcaccgagauuaaucaaaggcucuuuucagagccaccaaaaaaaaaaaaaaaaaaaaaaaaaaaaaaaaaaaaaaaaaaaaaaaaaaaaaaaaaaaaaaaaagaauu

SEQ ID NO: 20471 - RNA, 1943 nt, Artificial Sequence
  mRNA product Design i-3 (hSL-A64-N5) comprising derived and/or modified sequence from LASV(Nig08-04;Clade II)__ADU56611__SP-HsALB_NP(2-569) (opt5)
aggagaaagcuuaccaugaagugggugaccuucaucagccugcucuuucuguucuccucugccuacagcagcgccuccaaggaggugaaaucuuuccuguggacccagagccucagacgggaacuguccggcuacugcucuaacaucaaacuucaagucguuaaggacgcucaggcccugcuccacgggcuggauuuuagcgagguguccaaugugcagcgccuuaugagaaagcagaaacgggacgauggagaccugaagcgccucagagaucugaaccaagcggucaauaaccugguggaacucaagucuacccagcagaaaagcguucugcgggugggcacgcuuaccuccgacgaucugcucacacuggcugccgaccuugagaagcugaaaagcaaggucauucgcaccgaaagaccccucucuuccgggguguauaugggaaaucugagcacacagcaacuggagcagcggaaagcccuccugucuaugaucggcaugguugggggagcucagggcacccagccuggccgcgaugggguggucagagugugggacgugaagaacccggaucuucugaauaaccaauucggaacaaugcccucccucacccuggccugucuuacgaagcagggccaggucgaccugaaugaugcuguucucgcccugaccgaccuggggcucauuuacacagcgaaauauccuaacagcucugaccuggaucggcuuucccaaagccaucccauccugaauaugguggacaccaagaaauccucucucaacauuagcggauacaauuuuucccugggcgccgcugugaaggccggggcuugcaugcuugauggaggcaacaugcuggagacaaucaaagucaccccucagacgauggacggcauccucaagagcauucugaaagugaagcgcucucuggggauguucguuuccgauacacccggagaaagaaauccuuaugagaacauccucuacaagauuugucugagcggcgacggguggccguauaucgccucucggaccagcauugugggacgcgcgugggaaaacacaaccgucgaucuugaguccgacggcaaaccccagaagguggggaccgccggaucuaauaaaagccugcaguccgcuggcuuuccuacaggccucacguacagccaacugaugacccugaaggauucuaugaugcagcuugaccccuccgccaaaacauggaucgauauugaggggagaccugaagaccccguugagaucgcucucuaccagccgaugagcggaugcuauauccacuucuuucgggaaccuaccgaccugaagcaguucaagcaagaugccaaauacucucauggcauugacgugacagaucuguuuuccgcccagcccgggcucaccagcgcugucaucgaggcgcugccuagaaacauggugcuuacgugucagggauccgacgauauuaagaaacugcucgacucucagggccgccgggauaucaagcugauugacaucagccugaauaaagccgauuccagacgcuucgaaaacgcugucugggaccaaugcaaggaucuuugucacaugcauacaggggugguuguggagaagaaaaagcggggcggaaaagaggaaaucacaccccacugcgcccucauggacuguauuauguuugaugccgcugucucuggcgggcugaauauccccauucugagagccgugcucccucgcgacaugguuuuccggaccagcuccccgaaggugguccugugaggacuaguuauaagacugacuagcccgaugggccucccaacgggcccuccuccccuccuugcaccgagauuaaucaaaggcucuuuucagagccaccaaaaaaaaaaaaaaaaaaaaaaaaaaaaaaaaaaaaaaaaaaaaaaaaaaaaaaaaaaaaaaaaagaauu

SEQ ID NO: 20472 - RNA, 1946 nt, Artificial Sequence
  mRNA product Design i-3 (hSL-A64-N5) comprising derived and/or modified sequence from LASV(GA391;Clade III)__AAA46284__SP-HsALB_NP(2-570) (opt5)
aggagaaagcuuaccaugaagugggugaccuucaucagccugcucuuucuguucuccucugccuacagcagcgccuccaaggaggugagaucuugccuguggacccagagccuccggcgcgaacuguccggcuacuguucuaacaucaaacuucaagucguuaaggacgcucaggcccugcuccacgggcuggauuucagcgagguguccaaugugcagagacuuaugcggaaacagaagcgcgacgauggagaccugaaaagacuccgggaucugaaccaagcggucaauaaccugguggaacucaagucuacacagcagaaaagcguucugcgcgugggcacgcuuuccagcgacgaucugcucauucuggcugccgaccuugagaaacugaagucuaaagucaccagaacagaacggccccucuccagcgggguguauaugggaaaucugucuucccagcaacuggaucagcgcagagcccuccugaacaugaucggcaugaccgggguuagcggaggcggcaagggggcuucuaauggaauugugcgggucugggacgugaaaaacgccgagcuucugaauaaccaguuuggcacaaugccuucccucacccuggcuugccuuacaaagcaggggcaaguggaucugaaugacgccguccaggcgcucaccgaucugggacugaucuacacggccaaguauccgaacagcuccgaccucgaccgccugucucagagccaucccauucuuaauaugaucgauaccaaaaaguccagccugaacaucucuggcuacaauuucucccucggggcugccguuaaagcuggagccuguaugcuggacggcggcaacaugcuugagacaauuaaggugagcccucaaaccauggaugggauccugaaaucuauucucaaggugaaaaagagccugggaauguuugucuccgacacacccggcgaaagaaacccuuaugagaauauccuguacaagauuugccucucuggggauggauggagcuauaucgcgucccggaccagcauugugggccgcgccugggaaaacacgguuguggaccuggagcaggauaauaaaccccagaagaucgggaacggaggcucuaauaaaucccuucagagcgcuggcuucgccgcugggcugaucuacucucaacucaugacacugaaggacuuuaaauguuucaaccugauuccuaaugccaagaccuggauggauaucgagggaagaccggaagaccccgucgagauugcccuuuaccagccuuccagcggcugcuaugugcacuuuuuccgggaacccacagaucucaagcaguuuaaacaggacgcuaaguacucccaugggagagacguuaccgaucuguucgcggcccaaccuggacugaccucugcugugaucgaggcccucccccgcaacauggucauuacaugucagggcagcgaagacauccggaaacugcuugagucccaggggagacgcgauaucaagcugauugacaucacgcucucuaaagccgauagccggaaguuugagaaugcugugugggaccaguucaaggaucugugccacaugcauaccggcgucgugguugaaaagaagaaaagaggaggcaaggaggaaauuacaccgcacugugcccugauggacugcaucauguuugaugcggcuguguccgggggacuugacgccaaaguccuccgcgugguucugccucgggauaugguguucagaaccagcacacccaaggucgugcugugaggacuaguuauaagacugacuagcccgaugggccucccaacgggcccuccuccccuccuugcaccgagauuaaucaaaggcucuuuucagagccaccaaaaaaaaaaaaaaaaaaaaaaaaaaaaaaaaaaaaaaaaaaaaaaaaaaaaaaaaaaaaaaaaagaauu

SEQ ID NO: 20473 - RNA, 1943 nt, Artificial Sequence
  mRNA product Design i-3 (hSL-A64-N5) comprising derived and/or modified sequence from LASV(Nig08-A19;Clade III)__ADU56619__SP-HsALB_NP(2-569) (opt5)
aggagaaagcuuaccaugaagugggugaccuucaucagccugcucuuucuguucuccucugccuacagcagcgccuccaaggaggugaaaucuuuccuguggacccagagccucagacgggaacuguccggcuacugcucuaacaucaaacuucaagucguuaaggacgcucaggcccugcuccacgggcuggauuuuagcgagguguccaaugugcagcgccuuaugagaaagcagaaacgggacgauggagaccugaagcgccucagagaucugaaccaagcggucaauaaccugguggaacucaagucuacacagcagaaaagcguucugcgggugggcacgcuuuccagcgacgaucugcucguccuggcugccgaccuugagaagcugaaaucuaaggugguucgcaccgaaagaccccucuccagcgggauuuauaugggaaaucugucuucccagcaacuggaucagcggaaagcccuccugaacaugaucggcaugacagggggaaauggcggccgcaacaccacaagcgacgggauugugagagucugggaugugaagaaugcugagcuucugaacaaucaguucggaaccaugccuucucucacacuggccugucuuaccaagcagggccaaguggaccugaacgaugcuguccaggcccucacggaccuggggcugaucuacaccgcgaaauaucccaauuccagcgaccucgaucggcuggcccagucccauccgauucuuaacaugaucgacacaaagaaaucuagccugaauaucuccggauacaacuuuagccucggcgcugccguuaaggcuggggccugcaugcuggauggaggcaacaugcuugagaccauuaaagugucuccucaaacaauggacggcauccugaaguccauucucaaagugaagcgcagccuggggauguucaucucugauacccccggagaaagaaauccuuaugagaacauucuguacaagaucugucucagcggcgacggguggcccuauauugcgucccggacgucuaucgucggacgcgccugggaaaauacagugguugaucuggagagcgacaacaaaccucagaagaccggcaaugggggauccaacaaaagccuucagucugcuggcuuugccgcuggccugacauacucccagcucaugacccugaaggauagcaugcugcaacuugacccgaaugccaaaaccuggauggauaucgaggggagacccgaagacccuguggagauugcccucuaccagcccucuuccggaugcuauauccacuucuuucgggaaccuacagaccugaagcaguucaagcaggaugcuaaauacagccauggcauugacgucacggaucuguuugcggcccaacccgggcucaccuccgcugugaucgaggcccugccgagaaacaugguuauuacaugucagggaucugaagacauccgcaaacuucuggagagccagggccggagagauaucaagcucauugacaucucccugucuaagguggauagccgcaaauucgagaaugccgucugggaccaguuuaaggaucugugccacaugcauaccgggauuguggucgaaaagaaaaagcggggcggaaaagaggaaaucacaccucacugugcucuuauggacugcauuauguucgaugccgcgguguccggcgggguugacgcuaaggugcucagagccguccugccccgcgauaugguguuucggaccagcacgccuaaaguugugcugugaggacuaguuauaagacugacuagcccgaugggccucccaacgggcccuccuccccuccuugcaccgagauuaaucaaaggcucuuuucagagccaccaaaaaaaaaaaaaaaaaaaaaaaaaaaaaaaaaaaaaaaaaaaaaaaaaaaaaaaaaaaaaaaaagaauu

SEQ ID NO: 20474 - RNA, 1943 nt, Artificial Sequence
  mRNA product Design i-3 (hSL-A64-N5) comprising derived and/or modified sequence from LASV(G1180-SLE-2010;Clade IV)__AIT17169__SP-HsALB_NP(2-569) (opt5)
aggagaaagcuuaccaugaagugggugaccuucaucagccugcucuuucuguucuccucugccuacagcagcgccuccaaggagaucaaaucuuuccuguggacccagagccucagacgggaacuguccggcuacugcucuaacauuaagcugcaaguggucaaagacgcucaggcccugcuccacgggcuggauuuuagcgagguuuccaaugugcagcgccuuaugagaaaggaacggcgcgacgauaacgaccugaaaagacuccgggaucugaaucaggcggugaacaaucuggucgagcucaagucuacacaacaaaagagcauccugcgcgugggaacgcuuaccuccgacgaucugcucauucuggcugccgaccuugaaaaacuuaagagcaaaguuaucagaacagagcggccccucucugccggcguguauauggggaaccuguccagccagcagcuggaucagcgcagagcucuccugucuaugauuggaauguccagcggcaaucagcgggcccaggcugggcgcgacggagucgugagaguuugggaugugaagaacgucgagcuucugaauaaccaguucggcaccaugccuucucucacacuggccugucuuaccaaacaaggccagguggaccugaaugaugcggugcaggcccucacagaccuggggcugaucuacaccgcuaaguauccgaacacguccgaccucgaucggcugacccaaagccaucccauccuuaauaugauugacacaaagaaauccucucugaacaucagcggauacaauuuuucccucggcgccgcugucaaggccggggcgugcaugcuggauggaggcaacaugcuugaaaccauuaaaguuagcccucagacaauggacgggauccugaagucuauucucaaagugaagaaagcccugggaauguucaucuccgauacccccggcgagcgcaacccuuaugaaaauauucuguacaagaucugucucagcggcgacggguggcccuauaucgcuucuagaacgagcauuacaggacgggccugggagaacaccguggucgaucuggaguccgacggcaagccucagaaagcugggucuaauaacagcaauaagucccuucagagcgugggauuuacagccggccugaccuacucucaacucaugacccugaaagaugccaugcugcagcuugacccgaacgcuaagacauggauggauaucgaagggagacccgaggacccuguugaaauugcgcucuaccagcccuccagcggaugcuauauccacuucuuucgcgagccuacggaccugaaacaguucaagcaagaugccaaguacucucauggcauugacgugaccgaucuguuugcugcccagcccggccucacauccgccgucaucgacgcucugccgcggaauauggugaucaccugucaggggagcgaugacauuagaaaacuucuggaaucccagggacgcaaggauaucaaacucauugacaucgcccugucuaagacagauagccggaaauaugagaacgcgguuugggaccaauacaaggaucugugccacaugcauaccggcguggucguggagaagaaaaagagagggggaaaagaagagauuacgccucacugugcucuuauggacugcaucauguucgaugccgccgucuccggcgggcucaauacaucugugcugcgcgcuguucugccccgggacaugguguuuagaaccagcaccccucgcgucgugcucugaggacuaguuauaagacugacuagcccgaugggccucccaacgggcccuccuccccuccuugcaccgagauuaaucaaaggcucuuuucagagccaccaaaaaaaaaaaaaaaaaaaaaaaaaaaaaaaaaaaaaaaaaaaaaaaaaaaaaaaaaaaaaaaaagaauu

SEQ ID NO: 20475 - RNA, 1943 nt, Artificial Sequence
  mRNA product Design i-3 (hSL-A64-N5) comprising derived and/or modified sequence from LASV(G1442-SLE-2011;Clade IV)__AIT17181__SP-HsALB_NP(2-569) (opt5)
aggagaaagcuuaccaugaagugggugaccuucaucagccugcucuuucuguucuccucugccuacagcagcgccuccaaggaggugaaaucuuuccuguggacccagagccucagacgggaacuguccggcuacugcucuaacaucaaacuucaagucguuaaggacgcucaggcccugcuccacgggcuggauuuuagcgagguguccaaugugcagcgccuuaugagaaagcagcggcgcgacgauaacgaccugaaaagacuccgggaucugaaucaagcggucaacaaucugguggaacucaagucuacacagcaaaagagcguucugcgcgugggaacgcuuaccuccgacgaucugcucguccuggcugccgaccuugagaaacuuaagagcaaagugauuagaacagaacggccccucucugccggcguuuauauggggaaccuguccagccagcagcuggaucagcgcagagcucuccugaauaugaucggaaugucuggcgggauucagggaacccggacaggccgcgacggcguggucagagugugggaugugaagaacgccgaccuucugaauaaccaguucgggaccaugccuucccucacacuggcuugucuuaccaaacaaggacaggucgaucugaaugacguugugcaggcccucacggaccugggccugaucuacaccgcgaaguauccgaacgccagcgaucucgaccggcugacacaaucucaucccauucuuaauaugaucgauaccaagaaauccagccugaacaucuccggguacaauuuuucucucggagcugccgugaaggcuggcgccugcaugcuggacgggggaaacaugcuugagacaauuaaagucagcccucagaccauggauggcauccugaaguccauucucaaagugaagaaaacgcugggcauguucaucagcgacacacccggggagcgcaacccuuaugaaaauauucuguacaagaucugucucucuggagauggcuggcccuauauugcguccagaaccagcaucacagggcgggccugggagaacaccguuguggaccuggaaucugauggaaagccucagaaagcuggcagcaauaacuccaauaagucucuucagagcgccggguuugcugccggacugaccuacucccaacucaugacacugaaagacgccaugcugcagcuugauccgaacgcuaagacguggauggacaucgagggcagacccgaggacccugucgaaauugcgcucuaccagcccagcucuggcugcuauauccacuucuuucgcgagccuaccgaucugaaacaguucaagcaagacgccaaguacucccaugggauugaugugacagaccuguuugcugcccagcccggacucaccagcgccguuaucgaagcucugccgcggaauauggugauuacaugucagggcucugaugacaucaaaaagcugcuggagucccaggggagaaaagauaucaagcucauugacaucgcccugagcaaaaccgauucccgcaaguaugaaaacgcggucugggaccaauacaaggaucugugccacaugcauacgggaguggucguggagaaaaagaaacggggcgggaaggaggaaauuacaccucacugugcucuuauggacugcaucauguucgaugccgccguuucuggcggacucaauacccuggugcugagagcuguccucccccgcgacaugguguuucggaccagcacaccuagaguugugcugugaggacuaguuauaagacugacuagcccgaugggccucccaacgggcccuccuccccuccuugcaccgagauuaaucaaaggcucuuuucagagccaccaaaaaaaaaaaaaaaaaaaaaaaaaaaaaaaaaaaaaaaaaaaaaaaaaaaaaaaaaaaaaaaaagaauu

SEQ ID NO: 20476 - RNA, 1943 nt, Artificial Sequence
  mRNA product Design i-3 (hSL-A64-N5) comprising derived and/or modified sequence from LASV(G3010-SLE-2013;Clade IV)__AIT17345__SP-HsALB_NP(2-569) (opt5)
aggagaaagcuuaccaugaagugggugaccuucaucagccugcucuuucuguucuccucugccuacagcagcgccuccaaggagaucaaaucuuuccuguggacccagagccucagacgggaacuguccggcuacugcucuaacauuaaacuucaaguggucaaagacgcucaggcccugcuccacgggcuggauuuuagcgagguuuccaaugugcagcgccuuaugagaaaggaacggcgcgacgauaacgaccugaaaagacuccgggaucugaaucaggcggugaacaaucuggucgagcucaagucuacacaacaaaagagcauccugcgcgugggaacgcuuaccuccgacgaucugcucauucuggcugccgaccuugaaaaacuuaagagcaaaguuacaagaaccgagcggccccucucugccggcguguauauggggaaccuguccagccagcagcuggaucagcgcagagcucuccugucuaugaucggaauguccagcggcguccagggggcccgggcuggacgcgacggcgugguuagagugugggaugucaagaaugccgagcuucugaacaaucaguucggcacaaugccuucucucacccuggcgugucuuacaaaacaggggcaaguggaccugaacgaugugguccaggcccucaccgaccugggacugauuuacacggcuaaguauccgaauaccuccgaccucgaucggcugacacagagccaucccauccuuaacaugaucgacaccaagaaauccucucugaauauuagcggcuacaacuuuucccucggggccgcuguuaaggccggagcgugcaugcuggauggcgggaauaugcuugaaacaaucaaagugagcccucaaaccauggacggcauucugaagucuauccucaaagugaagaaagcccugggaauguucauuuccgagacgcccggcgaacgcaacccuuaugagaacauccuguacaagauuugucucagcggggauggauggcccuauaucgcuucuagaacaagcaucaccggccgggccugggagaauacagucguggaccuggaauccgaugggaagccucagaaagcuggaucuaacaauagcaacaagucccuucagagcgccggcuuuaccgccgggcugaccuacucucagcucaugacacugaaagacgcuaugcugcaacuugauccgaaugcgaagacguggauggacauugagggaagacccgaagauccuguugagguggcccucuaccagcccuccagcggcugcuauauccacuucuuucgcgaaccuaccgaccugaaacaguucaagcaggacgcuaaguacucucauggcauugaugucacagaccuguuugccgcccaacccgggcucaccuccgcugugaucgaugcccugccgcggaacaugguuauuacaugucagggaagcgacgauaucaaaaagcugcuggagucccagggcagaaaagacaucaagcucauugauaucgcgcugucuaaaaccgacagccgcaaguaugagaaugcugugugggaucaguacaaggaccugugccacaugcauacgggggucguggucgaaaagaagaaacggggaggcaaggaggaaauuacaccucacugugcccuuauggauugcaucauguucgacgccgcuguguccgggggccucaacaccucuguucugagagccgugcugccccgcgauauggucuuucggaccagcacaccuagagugguucucugaggacuaguuauaagacugacuagcccgaugggccucccaacgggcccuccuccccuccuugcaccgagauuaaucaaaggcucuuuucagagccaccaaaaaaaaaaaaaaaaaaaaaaaaaaaaaaaaaaaaaaaaaaaaaaaaaaaaaaaaaaaaaaaaagaauu

SEQ ID NO: 20477 - RNA, 1943 nt, Artificial Sequence
  mRNA product Design i-3 (hSL-A64-N5) comprising derived and/or modified sequence from LASV(G502-SLE-2009;Clade IV)__AIT17127__SP-HsALB_NP(2-569) (opt5)
aggagaaagcuuaccaugaagugggugaccuucaucagccugcucuuucuguucuccucugccuacagcagcgccuccaaggagaucaaaucuuuccuguggacccagagccucagacgggaacuguccggcuacugcucuaacauuaagcugcaaguggucaaagacgcucaggcccugcuccacgggcuggauuuuagcgagguuuccaaugugcagcgccuuaugagaaaggaacggcgcgacgauaacgaccugaaaagacuccgggaucugaaucaggcggugaacaaucuggucgagcucaagucuacacaacaaaagagcauccugcgcgugggaacgcuuaccuccgacgaucugcucauucuggcugccgaccuugaaaaacuuaagagcaaaguuaucagaacagagcggccccucucugccggcguguauauggggaaccuguccagccagcagcuggaucagcgcagagcucuccugucuaugauuggaauguccggcgggaaucagggaguccgggccggcaaggacggcgugguucgcgugugggaugucaaaaacgcugagcuucugaauaaccaguucgggaccaugccuagccucacacuggccugucuuaccaagcagggacaaguggaccugaaugaugcggugcaggcccucacagaccugggccugaucuacaccgcuaaguauccgaacacgucugaccucgauagacugacccagucccaucccauccuuaauaugauugacaccaaaaagagcucccugaacaucucuggguacaauuuuagccucggagccgcugucaaagccggcgcgugcaugcuggaugggggaaacaugcuugaaacaauuaagguuuccccucaaacaauggacggcauccugaaaagcauucucaaggugaaaaaggcccugggcauguucaucucugauacccccggggagcggaacccuuaugaaaauauucuguacaagaucugucucuccggagacggcuggcccuauaucgcuagccgcacgucuauuacagggagagccugggagaacaccguggucgaucuggagagcgacggaaaaccucagaaggcuggcuccaauaacucuaauaaaagccuucaguccgccggguuuacagccggacugaccuacagccagcucaugacccugaaggaugcuaugcugcaacuugacccgaacacaaaaacguggauggauaucgaaggccggcccgaggacccuguggaaauugcgcucuaccagcccucuuccggcugcuauauccacuucuuuagagagccuaccgaccugaagcaguucaagcaggaugccaaauacagccaugggauugacguuacagaucuguuugcugcccaacccggacucaccucugccgugaucgacgcucugccgcgcaauauggucaucacaugucagggcuccgaugacauucggaaacuucuggaaagccaggggagaaaggauaucaagcucauugacaucgcccugaacaaaaccgauucccgcaaguaugagaaugcggugugggaccaguacaaggaucugugccacaugcauacgggaguuguggucgagaaaaagaaacggggcgggaaggaagagauuacaccucacugugcucuuauggacugcaucauguucgaugccgccgugucuggcggacucaacaccagcguccugagagcugugcugccccgcgacaugguuuuucggaccuccacaccuagagugguccucugaggacuaguuauaagacugacuagcccgaugggccucccaacgggcccuccuccccuccuugcaccgagauuaaucaaaggcucuuuucagagccaccaaaaaaaaaaaaaaaaaaaaaaaaaaaaaaaaaaaaaaaaaaaaaaaaaaaaaaaaaaaaaaaaagaauu

SEQ ID NO: 20478 - RNA, 1943 nt, Artificial Sequence
  mRNA product Design i-3 (hSL-A64-N5) comprising derived and/or modified sequence from LASV(G733-SLE-2010;Clade IV)__AIT17155__SP-HsALB_NP(2-569) (opt5)
aggagaaagcuuaccaugaagugggugaccuucaucagccugcucuuucuguucuccucugccuacagcagcgccuccaaggagaucaaaucuuuccuguggacccagagccucagacgggaacuguccggcuacugcucuaacauuaagcugcaaguggucaaagacgcucaggcccugcuccacgggcuggauuuuagcgagguuuccaaugugcagcgccuuaugagaaaggaacggcgcgacgauaacgaccugaaaagacuccgggaucugaaucaggcggugaacaaucuggucgagcucaagucuacacaacaaaagagcgugcugcgcguuggaacgcuuaccuccgacgaacugcucgugcuggcugccgaucuugagaaacuuaagagcaaagucaucagaacagagcggccccucucugccggcguguauauggggaaccuguccagccagcagcuggaccagcgcagagcucuccugucuaugauuggaauguccggcgggaaucagggagcccggaccggccgcgauggcguugugagagucugggacgugaagaacgcugaacuucugaauaaccaguucgggacaaugccuagccucacccuggccugucuuacaaaacagggacaaguggaucugaaugacgcgguccaggcccucaccgaucugggccugaucuacacggcuaaguauccgaacaccucugaccucgaccggcugacacagucccaucccauucuuaauaugaucgauaccaagaaaagcucccugaacaucucuggguacaauuuuagccucggagccgcuguuaaggccggcgcgugcaugcuggacgggggaaacaugcuugagacaauuaaaguguccccucaaaccauggauggcauccucaagagcauucugaaagugaagaaagcccugggcauguucaucucugacacgcccggggaacgcaacccuuaugagaauauucuguacaagaucugucucuccggagauggcuggcccuauauugcuagcagaacaucuaucaccgggcgggccugggagaacacagucguggaccuggaaagcgauggaaagccucagaaagcuggcuccaauaacucuaauaagagccuucaguccgccggguuuaccgccggacugaccuacagccagcucaugacacugaaagacgcuaugcugcaacuugauccgaacgcgaagacguggauggacaucgagggcagacccgaagauccuguugagauugcccucuaccagcccucuuccggcugcuauauccacuucuuucgcgaaccuaccgaccugaaacaguucaagcaggacgcuaaguacagccaugggauugaugugacagaccuguuugccgcccaacccggacucaccucugcugucaucgaugcccugccgcggaauauggugauuacaugucagggcuccgacgauaucagaaaacuucuggagagccaggggcgcaaggacaucaaacucauugauaucgcgcuguccaagauugacucucggaaauaugagaacgcuguuugggaucaguacaaggaccugugccacaugcauaccggaguggucguggaaaagaaaaagagaggcgggaaagaggaaaucacgccucacugugcccuuauggauugcauuauguucgacgccgcugucagcggcggacucaauucccuggugcugcgcgccguucucccccgggauaugguguuuagaacaucuaccccucgcgucgugcugugaggacuaguuauaagacugacuagcccgaugggccucccaacgggcccuccuccccuccuugcaccgagauuaaucaaaggcucuuuucagagccaccaaaaaaaaaaaaaaaaaaaaaaaaaaaaaaaaaaaaaaaaaaaaaaaaaaaaaaaaaaaaaaaaagaauu

SEQ ID NO: 20479 - RNA, 1943 nt, Artificial Sequence
  mRNA product Design i-3 (hSL-A64-N5) comprising derived and/or modified sequence from MOPV/LASV reassortant(IGS-1;Clade IV)__AFY05578__SP-HsALB_NP(2-569) (opt5)
aggagaaagcuuaccaugaagugggugaccuucaucagccugcucuuucuguucuccucugccuacagcagcgccuccaaggagaucaaaucuuuccuguggacccagagccucagacgggaacuguccggcuacugcucuaacauuaaacuucaaguggucaaggacgcucaggcccugcuccacgggcuggauuuuagcgagguuuccaaugugcagcgccuuaugagaaaggaacggcgcgacgauaacgaccugaaaagacuccgggaucugaaucaggcggugaacaaucuggucgagcucaagucuacacaacaaaagagcauccugcgcgugggaacgcuuaccuccgacgaucugcucauucuggcugccgaccuugaaaaacugagaagcaagguuauccggacagagcgcccccucucugccggcguguauauggggaaccuguccagccagcagcuggaucagagacgggcucuccugaauaugauuggaaugucuggcgggaaccagggagcccgcgcuggcagagacggcgucgugcggguuugggaugugaaaaaugccgagcuucuguccaaccaguucgggaccaugccuagccucacacuggcgugucuuaccaagcagggacaagucgaccugaaugaugccgugcaggcucucacagaccugggccugaucuacaccgccaaauauccgaacacgucugaccucgaucgccugacccagucccaucccauccuuaauaugauugacacaaagaaaagcucccugaacaucucuggguacaauuuuagccucggagcugccgugaaggcgggcgccugcaugcuggaugggggaaacaugcuugaaaccauuaaggucuccccucaaacaauggacggcauccugaaaagcauucucaagguuaaaaaggcucugggcauguucaucucugauacccccggggagagaaacccuuaugaaaauauucuguacaaaaucugucucuccggagacggcuggcccuauaucgccagccggacgucuauuacagggagagcuugggagaacaccgugguggaucuggagagcgacggaaagccucagaaggccgauuccaauaacucuagcaaaucccuucagagcgccggcuuuacagcugggcugaccuacucucagcucaugacccugaaggacgcgaugcugcaacuugauccgaaugccaaaacauggauggacaucgaaggacgccccgaggacccugucgaaauugcucucuaccagcccuccagcggcugcuauauccacuucuuucgggagccuacggaucugaagcaguucaaacaggacgccaaguacucucauggcauugaugugaccgaccuguuugccacacaacccgggcucaccuccgcuguuaucgaugcccugccgagaaacauggugaucacaugucagggaagcgacgauauucgcaaacuucuggaaucccagggccggaaggacaucaagcucauugauaucgaccugucuaaaaccgauagcagaaaguaugagaaugcggucugggaccaguacaaagaucugugccacaugcauacgggggugguuguggagaagaagaaacgcggaggcaaggaagagauuacaccucacugugcucuuauggacugcaucauguucgacgccgccgucuccgggggccucaacaccucugugcugcgggcuguccugcccagagauaugguguuucgcaccagcacaccucggguugugcucugaggacuaguuauaagacugacuagcccgaugggccucccaacgggcccuccuccccuccuugcaccgagauuaaucaaaggcucuuuucagagccaccaaaaaaaaaaaaaaaaaaaaaaaaaaaaaaaaaaaaaaaaaaaaaaaaaaaaaaaaaaaaaaaaagaauu

SEQ ID NO: 20480 - RNA, 1943 nt, Artificial Sequence
  mRNA product Design i-3 (hSL-A64-N5) comprising derived and/or modified sequence from LASV(LM765-SLE-2012;Clade IV)__AIT17815__SP-HsALB_NP(2-569) (opt5)
aggagaaagcuuaccaugaagugggugaccuucaucagccugcucuuucuguucuccucugccuacagcagcgccuccaaggagaucaaaucuuuccuguggacccagagccucagacgggaacuguccggcuacugcucuaacauuaagcugcaaguggucaaagacgcucaggcccugcuccacgggcuggauuuuagcgagguuuccaaugugcagcgccuuaugagaaaggaacggcgcgacgauaacgaccugaaaagacuccgggaucugaaucaggcggugaacaaucuggucgagcucaagucuacacaacaaaagagcauccugcgcgugggaacgcuuaccuccgacgaucugcucauucuggcugccgaccuugaaaaacuuaagagcaaaguuacaagaaccgagcggccccucucugccggcguguauauggggaaccuguccagccagcagcuggaucagcgcagagcucuccuggacaugaucggaaugucuggcuccaaucagggggcccgggcuggacgcgauggcgucgugagaguuugggacgugaagaacgccgagcuucugaauaaccaguucggcacaaugccuagccucacccuggcgugucuuacaaaacaggggcaagucgaucugaaugacgccgugcaggcucucaccgaccugggacugauuuacacggccaaguauccgaacaccucugaucucgaccggcugacacagucccaucccauccuuaauaugaucgauaccaagaaaagcucccugaacauuucuggcuacaauuuuagccucggggcugccgugaaggcgggagccugcaugcuggacggcgggaacaugcuugaaacaaucaaagucuccccucaaaccauggauggcauucucaagagcauccugaaaguuaagaaagcucugggaauguucauuucugacgcccccggcgagcgcaacccuuaugaaaauauccuguacaagauuugucucuccggggauggauggcccuauaucgcuagcagaacgucuaucacaggccgggccugggagaacaccgugguggaccuggagagcgaugggaagccucagaaagccggauccaauggcucuaacaagagccuucaguccgcuggguuuacagcgggacugaccuacagccagcucaugacccugaaagacgccaugcugcaacuugauccgaaugcuaagacauggauggacauugaaggcagacccgaggacccugucgaaaucgcccucuaccagcccucuuccggcugcuauauucacuucuuucgcgagccuacggaucugaaacaguucaagcaggacgccaaguacagccaugggaucgaugugaccgaccuguuugcugcccaacccggacucacaucugcgguuauugaugcucugccgcggaacauggugaucaccugucagggcuccgacgauaucagaaaacuuuucgaaagccaggggcgcaaggacauuaaacugaucgauauugcccucuccaagacagacucucggaaauaugagaaugccgucugggaucaguacaaggaccugugccacaugcauaccggaaucgugguugagaagaaaaagagaggcgggaaagaagagauuacgccucacugugcucugauggauugcaucauguuugacgccgcugugagcggcggacuuaacacauccguccuccgcgccgugcugccccgggacauggucuucagaaccucuaccccucgcgugguucugugaggacuaguuauaagacugacuagcccgaugggccucccaacgggcccuccuccccuccuugcaccgagauuaaucaaaggcucuuuucagagccaccaaaaaaaaaaaaaaaaaaaaaaaaaaaaaaaaaaaaaaaaaaaaaaaaaaaaaaaaaaaaaaaaagaauu

SEQ ID NO: 20481 - RNA, 1943 nt, Artificial Sequence
  mRNA product Design i-3 (hSL-A64-N5) comprising derived and/or modified sequence from LASV(LM776-SLE-2012;Clade IV)__AIT17825__SP-HsALB_NP(2-569) (opt5)
aggagaaagcuuaccaugaagugggugaccuucaucagccugcucuuucuguucuccucugccuacagcagcgccuccaaggagaucaaaucuuuccuguggacccagagccucagacgggaacuguccucuuacugcagcaacauuaaacuucaaguggucaaggacgcucaggcccugcuccacggccuggauuuuuccgagguuucuaaugugcagcgccuuaugagaaaggaacggcgcgacgauaacgaccugaaaagacuccgggaucugaaucaggcggugaacaaucuggucgagcucaagagcacacaacagaaguccauccugcgcguggggacgcuuaccagcgacgaucugcucauucuggcugccgaccuugaaaaacugaagucuaaaguuacaagaaccgagcggccccucuccgccggaguguauaugggcaaccugagcucucagcagcuggaucaacgcagagcucuccuguccaugaucgggaugagcggaucuaaucagggcgcccgggcugggcgcgacggagucgugagaguuugggaugugaagaacgccgagcuucugaauaaccaguucggcacaaugccuucccucacccuggcgugucuuacaaaacagggccaagucgaccugaaugaugccgugcaggcucucaccgaccuggggcugauuuacacggccaaguauccgaacaccagcgaccucgaucggcugacacagucccaucccauccuuaauaugaucgacaccaagaaaucuagccugaacauuuccggauacaauuuuagccucggcgcugccgugaaggcgggggccugcaugcuggauggaggcaacaugcuugaaacaaucaaagucucuccucaaaccauggacgggauucugaaguccauccucaaaguuaagaaagcucugggaauguucauuagcgauacgcccggcgagcgcaacccuuaugaaaauauccuguacaagauuugucucucuggcgacggguggcccuauaucgccagcagaacauccaucaccggacgggcuugggagaacacagugguggaucuggagucugacggcaagccucagaaagccgggagcaauaacuccaauaagagccuucagucugccggauuuaccgcuggccugaccuacucccagcucaugacacugaaagaugcgaugcugcaacuugacccgaacgccaagacguggauggauauugaagggagacccgaggacccugucgaaguggcucucuaccagcccagcucuggaugcuauauccacuucuuucgcgagccuaccgaccugaaacaguucaagcaggaugccaaguacucccauggcauugacguuacagaucuguuugccgcucaacccggccucaccagcgccgugaucgacgcgcugccgcggaauauggucauuacaugucagggguccgaugacaucagaaaacuucuggaaucucagggacgcaaggauaucaaacucauugacaucgcucugagcaagaccgauucccggaaauaugagaacgccgugugggaccaguacaaggaucugugccacaugcauacgggcguuguggucgagaagaaaaagagagggggaaaagaagagauuacaccucacugugcccuuauggacugcaucauguucgaugcugccgugucuggcgggcucaauaccagcguccugcgcgcugugcugccccgggacaugguuuuuagaaccuccacaccucgcgugguccucugaggacuaguuauaagacugacuagcccgaugggccucccaacgggcccuccuccccuccuugcaccgagauuaaucaaaggcucuuuucagagccaccaaaaaaaaaaaaaaaaaaaaaaaaaaaaaaaaaaaaaaaaaaaaaaaaaaaaaaaaaaaaaaaaagaauu

SEQ ID NO: 20482 - RNA, 1943 nt, Artificial Sequence
  mRNA product Design i-3 (hSL-A64-N5) comprising derived and/or modified sequence from LASV(Mad39;Clade IV)__ANH09723__SP-HsALB_NP(2-569) (opt5)
aggagaaagcuuaccaugaagugggugaccuucaucagccugcucuuucuguucuccucugccuacagcagcgccuccaaggagaucaaaucuuuccuguggacccagagccucagacgggaacuguccggcuacugcucuaacauuaagcugcaaguggucaaagacgcucaggcccugcuccacgggcuggauuuuagcgagguuuccaaugugcagcgccuuaugagaaagcagcggcgcgacgauaacgaccugaaaagacuccgggaucugaaucaagcggugaacaaucuggucgaacucaagucuacacagcaaaagagcgugcugcgcguuggaacgcuuaccuccgacgaucugcucacacuggcugccgaccuugagaaacuuaagagcaaagugaccagaacagaacggccccucaccgccggcgucuauauggggaaccugucuucccagcagcuggaucagcgcagagcucuccugaauaugaucggaaugagcggcgggaaccagggagcccggacaggccgcgacggcgugguuagagugugggaugucaagaaugcugagcuucugaacaaucaguucgggaccaugccuucucucacgcuggccugucuuaccaaacaaggacagguggaccugaacgaugugguccaggcgcucacagaccugggccugauuuacaccgccaaguauccgaauacauccgaccucgaucggcugacccaaagccaucccauccuuaacaugauugacacgaauaagucuucccugaacaucagcggguacaacuuuucccucggagcugccguuaaagcuggcgccugcaugcuggaugggggaaauaugcuugagacaaucaaggugucuccucagaccauggacggcauucugaaaagcauccucaaggugaaaaagucccugggcauguucauuagcgauacacccggggaacgcaacccuuaugagaauauccuguacaaaauuugucucucuggagacggcuggcccuauaucgcguccagaaccagcauuaccgggcgggccugggaaaacacagucguggaucuggagucuggaggcaagccucagaaggcugggagcaauaacuccaauaaaucucuucagagcgccggauuugcugccggccugacguacucccaacucaugacccugaaggacgccaugcugcagcuugauccgaacgcuaaaacauggauggacaucgagggcagacccgaagauccuguugagaucgcgcucuaccagcccauuagcgggugcuauauccacuucuuucgcgaaccuaccgaccugaagcaguucaaacaagacgccaaguacucucauggaauugaugugacagaccuguuugcugcccagcccggccucaccuccgccgucaucgaggcucugccgcggaauauggugauuacgugucaggggagcgaugacaucagaaaacuuuucgaaucucagggacgcaaggauaucaagcugauugacaucgcccucuccaaaacagauagccggaaguaugagaacgcgguuugggaccaauacaaagaucugugccacaugcauaccggcguggucguggagaagaagaaaaagggcgggaaagaagagauuaccccucacugugcucugauggacugcaucauguuugaugccgccgucuccggaggccuuaauacacucgugcugagagcuguucugccccgcgacaugguguuccggaccucuacaccuaaggucgugcucugaggacuaguuauaagacugacuagcccgaugggccucccaacgggcccuccuccccuccuugcaccgagauuaaucaaaggcucuuuucagagccaccaaaaaaaaaaaaaaaaaaaaaaaaaaaaaaaaaaaaaaaaaaaaaaaaaaaaaaaaaaaaaaaaagaauu

SEQ ID NO: 20483 - RNA, 1943 nt, Artificial Sequence
  mRNA product Design i-3 (hSL-A64-N5) comprising derived and/or modified sequence from LASV(Z0947-SLE-2011;Clade IV)__AIT17841__SP-HsALB_NP(2-569) (opt5)
aggagaaagcuuaccaugaagugggugaccuucaucagccugcucuuucuguucuccucugccuacagcagcgccuccaaggagaucaaaucuuuccuguggacccagagccucagacgggaacuguccggcuacugcucuaacauuaagcugcaaguggucaaagacgcucaggcccugcuccacgggcuggauuuuagcgagguuuccaaugugcagcgccuuaugagaaaggaacggcgcgacgauaacgaccugaaaagacuccgggaucugaaucaggcggugaacaaucuggucgagcucaagucuacacaacaaaagagcauccugcgcgugggaacgcuuaccuccgacgaucugcucauucuggcugccgaccuugaaaaacuuaagagcaaaguuacaagaaccgagcggccccucucugccggcguguauauggggaaccuguccagccagcagcuggaucagcgcagagcucuccugaauaugaucggaaugucuggcuccaaccagggggcccggacaggacgcgacggcgucgugagaguuugggaugugaagaaugcugagcuucugaacaaucaguucggcaccaugccuagccucacacuggccugucuuaccaaacaggggcaagucgaccugaacgaugcggugcaggcccucacggaccugggacugauuuacaccgcuaaguauccgaauacaucugaccucgaucggcugacccagucccaucccauccuuaacaugaucgacacaaagaaaagcucccugaauauuucuggcuacaacuuuagccucggggccgcugugaaggccggagcgugcaugcuggauggcgggaacaugcuugaaaccaucaaagucuccccucaaacgauggacggcauucucaagagcauccugaaaguuaagaaagcccugggaauguucauuucugaugcucccggcgagcgcaauccuuaugaaaacauccuguacaagauuugucucuccggggacggauggcccuauaucgccagcagaacaucuaucaccggccgggcuugggagaauacagugguggaucuggagagcgacgggaagccucagaaagccggauccaacggcucuaauaagagccuucaguccgccggguuuaccgcuggacugaccuacagccagcucaugacacugaaagaugcgaugcugcaacuugacccgaacgccaagacguggauggauauugaaggcagacccgaggacccugucgaaaucgcucucuaccagcccucuuccggcugcuauauucacuucuuucgcgagccuaccgaccugaaacaguucaagcaggaugccaaguacagccaugggaucgacgugacagaucuguuugccgcucaacccggacucaccucugccguuauugacgcgcugccgcggaauauggugaucacaugucagggcuccgaugacaucagaaaacuuuucgaaagccaggggcgcaaggauauuaaacugaucgacauugcucucuccaagaccgauucucggaaauaugagaacgccgucugggaccaguacaaggaucugugccacaugcauacgggaaucgugguugagaagaaaaagagaggcgggaaagaagagauuacaccucacugugcccugauggacugcaucauguuugaugcugccgugagcggcggacuuaauaccuccguccuccgcgcugugcugccccgggacauggucuucagaaccucuacaccucgcgugguucugugaggacuaguuauaagacugacuagcccgaugggccucccaacgggcccuccuccccuccuugcaccgagauuaaucaaaggcucuuuucagagccaccaaaaaaaaaaaaaaaaaaaaaaaaaaaaaaaaaaaaaaaaaaaaaaaaaaaaaaaaaaaaaaaaagaauu

SEQ ID NO: 20484 - RNA, 1974 nt, Artificial Sequence
  mRNA product Design i-3 (hSL-A100) comprising derived and/or modified sequence from LASV(Josiah;Clade IV)__NP_694869__SP-HsALB_NP(2-569) (opt1)
aggagaaagcuuaccaugaagugggugaccuucaucagccugcucuuccuguucuccagcgccuacuccagcgccuccaaggagaucaagagcuuccuguggacccagucccuccgccgggagcugagcggcuacugcuccaacaucaagcuccagguggucaaggacgcccaggcgcugcugcacgggcuggacuucagcgagguguccaacgugcagcgccucaugcggaaggagcgccgggacgacaacgaccugaagcgccugcgggaccucaaccaggccgucaacaaccugguggagcucaagagcacccagcagaaguccauccugcgcgugggcacccugaccagcgacgaccugcucauccuggccgccgaccuggagaagcucaaguccaaggucauccggaccgagcgcccccugagcgccgggguguacaugggcaaccuguccagccagcagcucgaccagcggcgcgcgcugcugaacaugaucgggauguccggcggcaaccagggggcccgggccggccgcgacggggugguccgggugugggacgugaagaacgccgagcuccugaacaaccaguucggcaccaugccgagccugacgcucgcgugccugaccaagcaggggcaggucgaccugaacgacgccgugcaggcccucaccgaccugggccugaucuacaccgccaaguaccccaacacguccgaccucgaccgccugacccagagccaccccauccugaacaugaucgacaccaagaaguccagccucaacaucagcggcuacaacuucucccugggggccgcggugaaggccggcgccugcaugcuggacgggggcaacaugcucgagaccaucaaggucagcccccagacgauggacggcauccugaaguccauccugaaggugaagaaggcccucgggauguucaucagcgacaccccgggcgagcggaaccccuacgagaacauccuguacaagaucugccuguccggggacggcuggcccuacaucgccagccgcaccuccaucaccgggcgggcgugggagaacacgguggucgaccucgagagcgacggcaagccccagaaggccgacuccaacaacagcuccaagagccugcaguccgccggcuucaccgccgggcugaccuacagccagcucaugacccugaaggacgccaugcugcagcuggacccgaacgcgaagacguggauggacaucgagggccgccccgaggaccccguggagaucgcccucuaccagcccuccagcgggugcuacauccacuucuuccgggagccgaccgaccugaagcaguucaagcaggacgccaaguacucccacggcaucgacgugaccgaccuguucgccacccagcccgggcucacgagcgccgucaucgacgcgcugccccgcaacauggugaucacgugccagggcuccgacgacauccgcaagcugcucgagagccagggccggaaggacaucaagcugaucgacaucgcccugagcaagaccgacucccgcaaguacgagaacgccgugugggaccaguacaaggaccucugccacaugcacaccggggucguggucgagaagaagaagcggggcgggaaggaggagaucaccccgcacugcgcccugauggacugcaucauguucgacgcggccgugagcggcgggcugaacaccuccgugcuccgcgccguccugccccgggacaugguguuccgcaccagcacgccccgggugguccugugaggacuaguuauaagacugacuagcccgaugggccucccaacgggcccuccuccccuccuugcaccgagauuaaucaaaggcucuuuucagagccaccaaaaaaaaaaaaaaaaaaaaaaaaaaaaaaaaaaaaaaaaaaaaaaaaaaaaaaaaaaaaaaaaaaaaaaaaaaaaaaaaaaaaaaaaaaaaaaaaaaaaa

SEQ ID NO: 20485 - RNA, 1974 nt, Artificial Sequence
  mRNA product Design i-3 (hSL-A100) comprising derived and/or modified sequence from LASV(LP;Clade I)__AAF86702__SP-HsALB_NP(2-569) (opt1)
aggagaaagcuuaccaugaagugggugaccuucaucagccugcucuuccuguucuccagcgccuacuccagcaacuccaaggagaucaagagcuuccuguggacccagucccuccgccgggagcugagcggcuacugcuccaacaucaagcuccagguggucaaggacgcccaggcccugcugcacgggcuggacuucagcgagguguccaacgugcagcgccucaugcggaagcagaagcgcgacgacgcggaccugaagcggcugcgcgaccucaaccaggccgucaacaaccugguggagcucaagagcacccagcagaagaacgugcugcgggucggcacgcuguccagcgacgaccugaucacccucgccgccgaccuggagaagcugaaguccaaggugauccgcaccgagcggccccucagcuccgggguguacaugggcaaccugagcucccagcagcuggaccagcgccgggcccuccugagcaugaucgggauguccggcggcccgcaggggaaccgcaccggcggggacggcgucgugcgggugugggacgucaagaacgcggagcugcucaacaaccaguucgggacgaugcccagccugacccuggccugccucaccaagcagggccagguggaccugaacgacgccgugcaggcccugaccgaccucggccugaucuacacggcgaaguaccccaacuccagcgaccuggacaugcucacccagagccaccccauccuggggauggucgacaccaagaaguccagccugaacaucuccggcuacaacuucagccucggggccgccgugaaggccggcgccugcaugcuggacggcgggaacaugcuggagaccaucaagguguccccgcagacgauggacggcauccucaagagcauccugaaggucaagcgcucccuggggauguucaucagcgacacccccggcgagcggaaccccuacgagaacauccucuacaagaucugccuguccggggagggcuggcccuacaucgcgagccgcaccuccaucaccggccgggccugggagaacacgcugguggaccucgagagcgacaacaagccgcccaagcugaacuccgccgggagcaacaagucccugcaggccgccggccucaacgcggggcugaccuacagccagcugaugacccugaaggacugcaugcuccagcuggaccccuccagcaagaccuggaucgacaucgagggccgccccgaggacccgguggagaucgcccuguuccagcccuccagcgggugcuacauccacuucuuccgggagcccacggaccucaagcaguucaagcaggacgccaaguacagccacggcaucgacgucaccgaccuguucuccacccagcccggccugaccagcgccgugaucgaggcccucccgcgcaacauggugcugacgugccagggguccgacgacaucaagaagcugcucgagagccagggccggcgcgacaucaagcugaucgacaucucccugagcaaggcggacucccgcaaguucgagaacgccgucugggaccaguacaaggaccucugccacaugcacaccgggguggucguggagaagaagaagcggggcgggaaggaggagaucacgccccacugcgcccugcuggacugcaucauguucgacgccgccaccaccggcagccucaacaucaccacccugcgcgcggugcugccccgggacauggucuuccgcaccuccacgcccaagguggugcucugaggacuaguuauaagacugacuagcccgaugggccucccaacgggcccuccuccccuccuugcaccgagauuaaucaaaggcucuuuucagagccaccaaaaaaaaaaaaaaaaaaaaaaaaaaaaaaaaaaaaaaaaaaaaaaaaaaaaaaaaaaaaaaaaaaaaaaaaaaaaaaaaaaaaaaaaaaaaaaaaaaaaa

SEQ ID NO: 20486 - RNA, 1974 nt, Artificial Sequence
  mRNA product Design i-3 (hSL-A100) comprising derived and/or modified sequence from LASV(803213;Clade II)__AAF86704__SP-HsALB_NP(2-569) (opt1)
aggagaaagcuuaccaugaagugggugaccuucaucagccugcucuuccuguucuccagcgccuacuccagcgccuccaaggaggugaaguccuuccuguggacccagagccuccgccgggagcugagcggcuacugcuccaacaucaagcugcaggucgugaaggacgcccaggcgcuccugcacgggcuggacuucagcgaggugaacaacguccagcgccucaugcggaagcagaagcgcgacgacggcgaccugaagcggcugcgcgaccucaaccaggccgugaacaaccugguggagcugaaguccacccagcagaaguccauccuccgggucgggacgcugaccagcgacgaccugcucacccuggccgccgaccuggagaagcucaagagcaaggugauccgcaccgagcggccccuguccagcggcguguacauggggaaccuguccacgcagcagcucgagcagcgccgggcccugcugaacaugaucggcauggucggcggggcgcagggcacccagccggggcgcgacggcguggugcgggucugggacgugaagaaccccgaccuccugaacaaccaguucgggaccaugcccagccugacccucgccugccugacgaagcagggccagguggaccugaacgacgccguccucgcccugaccgaccugggccucaucuacaccgcgaaguaccccaacuccagcgaccuggaccgccugucccagagccacccgauccucaacaugguggacaccaagaaguccagccugaacaucagcggguacaacuucucccugggcgccgccgugaaggccggggccugcaugcucgacggcggcaacaugcuggagacgaucaaggucacgccccagaccauggacgggauccucaagagcauccugaaggugaagcggucccugggcauguucgugagcgacacccccggggagcgcaaccccuacgagaacauccuguacaagaucugccucuccggcgacggguggccguacaucgcgagccggaccuccaucgucggccgcgccugggagaacaccaccguggaccuggagagcgacggcaagccccagaagguggggaccgccggcuccaacaagagccugcaguccgccggguuccccacgggccucaccuacagccagcugaugacccugaaggacuccaugaugcagcuggaccccagcgccaagaccuggaucgacaucgaggggcggccggaggaccccgucgagaucgcgcucuaccagcccauguccggcugcuacauccacuucuuccgcgagcccacggaccugaagcaguucaagcaggacgccaaguacagccacggcaucgacguggccgaccuguucccggcccagcccgggcucaccuccgccgucaucgaggcgcugccccggaacauggugcugaccugccagggcagcgacgacaucaagaagcuccuggacucccaggggcgccgcgacaucaagcugaucgacaucagccucagcaagguggacucccggaaguucgagaacgccgucugggaccagugcaaggaccugugccacaugcacaccggcgugguggucgagaagaagaagcgcgggggcaaggaggagaucacgccccacugcgcccugauggacugcaucauguucgacgccgccgugagcggcgggcucaacaucccggugcugcgggcgguccugccccgcgacaugguguuccggaccuccagccccaaggugguccucugaggacuaguuauaagacugacuagcccgaugggccucccaacgggcccuccuccccuccuugcaccgagauuaaucaaaggcucuuuucagagccaccaaaaaaaaaaaaaaaaaaaaaaaaaaaaaaaaaaaaaaaaaaaaaaaaaaaaaaaaaaaaaaaaaaaaaaaaaaaaaaaaaaaaaaaaaaaaaaaaaaaaa

SEQ ID NO: 20487 - RNA, 1977 nt, Artificial Sequence
  mRNA product Design i-3 (hSL-A100) comprising derived and/or modified sequence from LASV(GA391;Clade III)__CAA36646__SP-HsALB_NP(2-570) (opt1)
aggagaaagcuuaccaugaagugggugaccuucaucagccugcucuuccuguucuccagcgccuacuccagcgccuccaaggaggugcgcagcuuccuguggacccagucccuccggcgcgagcugagcggcuacugcuccaacaucaagcugcaggucgugaaggacgcccaggcgcuccugcacgggcuggacuucagcgagguguccaacguccagcggcucaugcgcaagcagaagcgggacgacggcgaccugaagcgccugcgggaccucaaccaggccgugaacaaccugguggagcucaagagcacccagcagaaguccguccugcgcguggggacccugagcuccgacgaccugcucauccuggccgccgaccuggagaagcucaagagcaaggugacccggaccgagcgcccccuguccagcggcgucuacauggggaaccuguccagccagcagcucgaccagcggcgcgcccugcugaacaugaucggcaugaccggcguguccgggggcgggaagggcgcgagcgacgggaucgugcgggucugggacgugaagaacgccgagcuccugaacaaccaguucggcacgaugccgucccugacccucgccugccugaccaagcagggccagguggaccugaacgacgccguccaggcgcucaccgaccuggggcugaucuacacggccaaguaccccaacagcagcgaccucgaccgccugucccagagccaccccauccugaacaugaucgacaccaagaaguccagccucaacaucuccggcuacaacuucagccugggggccgccgugaaggccggcgcgugcaugcuggacggcgggaacaugcucgagaccaucaaggugagcccccagaccauggacggcauccucaaguccauccugaaggucaagaagucccuggggauguucgugagcgacacgccgggcgagcggaaccccuacgagaacauccuguacaagaucugccuguccggggacggcuggcccuacaucgccagccgcaccuccaucgugggccgggccugggagaacaccgucguggaccucgagcaggacaacaagccccagaagaucgggaacggcgggagcaacaagucccugcagagcgccggcuucgccgcggggcugaccuacucccagcucaugacgcugaaggacuucaagugcuucaaccugaucccgaacgccaagaccuggauggacaucgagggccgccccgaggaccccguggagaucgcccuguaccagcccagcuccggcugcuacguccacuucuuccgggagccgaccgaccucaagcaguucaagcaggacgccaaguacagccacgggaucgacgugaccgaccuguucgccgcgcagcccggccugacgagcgccgucaucgaggcccucccccgcaacauggugaucacgugccagggguccgaggacauccggaagcugcuggagagccagggccgccgcgacaucaagcucaucgacaucacccuguccaaggccgacagccggaaguucgagaacgccgugugggaccaguucaaggaccugugccacaugcacaccggggucgugguggagaagaagaagcgcggcggcaaggaggagaucacgccccacugcgcgcucauggacugcaucauguucgacgccgccgucuccgggggccuggacgccaaggugcugcgggugguccucccgcgcgacaugguguuccggaccagcacccccaaggugguccugugaggacuaguuauaagacugacuagcccgaugggccucccaacgggcccuccuccccuccuugcaccgagauuaaucaaaggcucuuuucagagccaccaaaaaaaaaaaaaaaaaaaaaaaaaaaaaaaaaaaaaaaaaaaaaaaaaaaaaaaaaaaaaaaaaaaaaaaaaaaaaaaaaaaaaaaaaaaaaaaaaaaaa

SEQ ID NO: 20488 - RNA, 1974 nt, Artificial Sequence
  mRNA product Design i-3 (hSL-A100) comprising derived and/or modified sequence from LASV(AV;Clade V)__CCA30315__SP-HsALB_NP(2-569) (opt1)
aggagaaagcuuaccaugaagugggugaccuucaucagccugcucuuccuguucuccagcgccuacuccagcgccuccaaggaggugaaguccuuccuguggacccagagccuccgccgggagcugagcggcuacugcuccaacaucaagcugcaggucgugaaggacgcccaggcgcuccugcacgggcuggacuucagcgagguguccaacguccagcgccucaugcggaagcagcgccgggacgacagcgaccugaagcgccugcgggaccucaaccaggccgugaacaaccugguggagcugaaguccacccagcagaaguccguccuccgcgugggcacgcugagcagcgacgaccugcucacccuggccgccgaccuggagaagcucaaguccaaggugacccggaccgagcgcccccugagcuccggggucuacaugggcaaccugagcucccagcagcucgaccagcggcgcgcccugcugaaccucaucgggaugacgaacggcagccagggcucccaggcggggcgggacggcguggugcgcgucugggacgugaagaacgccgagcugcugaacaaccaguucgggaccaugccgagccucacccuggccugccugaccaagcagggccagguggaccucaacgacgucgugcaggcccugacggaccuggggcucaucuacaccgcgaaguaccccaacaccagcgaccuggaccggcugacccagucccaccccauccucaacaugaucgacacgaagaaguccagccugaacaucagcggcuacaacuucucccugggcgccgccgugaaggccggggccugcaugcucgacggcgggaacaugcuggagaccaucaaggucagcccccaguccauggacggcauccucaagagcauccugaaggugaagcgcgcgcugggcauguucguguccgacaccccgggggagcggaaccccuacgagaacauccuguacaagaucugccucagcggcgacggguggcccuacaucgccucccgcaccagcaucgucggccgggccugggagaacacggugguggaccuggagaccgacgggaagccccagaagaucggcuccggcaacagcaacaagucccugcagagcgccggguucuccgccggccucaccuacagccagcugaugacccugaaggacgcgaugcugcagcucgacccgaacgccaagacguggauggacaucgaggggcgccccgaggaccccgucgagguggcccuguaccagcccaucuccggcugcuacauccacuucuuccgggagccgaccgaccugaagcaguucaagcaggacgccaaguacagccacgggaucgacaucgccgaccucuucgcggcccagcccggccugaccagcgccgucaucgaggcccugccccgcaacauggugaucacgugccagggcuccgaggacaucaagaagcuccuggagagccaggggcgcaaggacaucaagcugaucgacaucgcccucuccaagaucgacagccggaaguucgagaacgcggugugggaccaguacaaggaccugugccacaugcacaccggcgucgugguggagaagaagaagcgcgggggcaaggaggagaucaccccgcacugcgcccugauggacugcaucauguucgacgccgccgucuccgggggccucaacacccuggugcugcgggcggugcucccccgcgacauggucuuccggaccagcacgccccgcguggugcugugaggacuaguuauaagacugacuagcccgaugggccucccaacgggcccuccuccccuccuugcaccgagauuaaucaaaggcucuuuucagagccaccaaaaaaaaaaaaaaaaaaaaaaaaaaaaaaaaaaaaaaaaaaaaaaaaaaaaaaaaaaaaaaaaaaaaaaaaaaaaaaaaaaaaaaaaaaaaaaaaaaaaa

SEQ ID NO: 20489 - RNA, 1974 nt, Artificial Sequence
  mRNA product Design i-3 (hSL-A100) comprising derived and/or modified sequence from LASV(Togo/2016/7082;Clade VI)__AMR44578__SP-HsALB_NP(2-569) (opt1)
aggagaaagcuuaccaugaagugggugaccuucaucagccugcucuuccuguucuccagcgccuacuccagcaacuccaaggaggugaaguccuuccuguggacccagagccuccgccgggagcugagcggcuacugcuccaacaucaagcugcaggucgugaaggacgcccaggcccuccugcacgggcuggacuucagcgagguguccaacguccagcgccucaugcggaagcagaagcgcgacgacggcgaccugaagcggcugcgcgaccucaaccaggcggugaacaaccugguggagcucaagagcguccagcagaaguccauccugcggguggggacccugaccagcgacgaccugcucacccuggccgccgaccuggagaagcucaaguccaaggugacccgcaccgagcggccccugagcuccggcgucuacauggggaaccugagcucccagcagcucgaccagcgccgggcccugcugagcaugaucggcauguccggcgggaaccagaacagccagccgaagggcgacgggguggugcgcgucugggacgugaagaacgccgaccuccugaacaaccaguucggcacgaugcccucccugacccucgcgugccugaccaagcagggccagguggaccugaacgacgccguccaggcccucaccgaccuggggcugaucuacacggccaaguaccccaacagcagcgaccucgaccggcugucccagagccaccccauccugaacaugaucgacaccaagaaguccagccucaacaucuccggcuacaacuucagccugggggcggccaucaagaccggcgccugcaugcuggacgggggcaacaugcucgagaccaucaaggugacgccgcagaccauggacggcauccugaaguccauccugaaggugaagcgcagccucgggauguucaucuccgacacccccggcgagcggaaccccuacgagaacauccuguacaagaucugccugagcggggacggcuggcccuacaucgccucccgcaccgccaucaucgggcgggcgugggagaacacggucguggaccucgagagcgacuccaagccgcagaagaucggcagcaacggcuccaacaagagccugcaguccgccggguucgcccccggccugaccuacagccagcucaugacccugaaggacuccaugcugcagcuggaccccaacgccaagaccuggaucgacaucgaggggcgccccgaggacccgguggaggucgcccucuuccagcccaucagcggcugcuacauccacuucuuccgggagcccacggaccugaagcaguucaagcaggacgcgaaguacagccacgggaucgacgugaccgaccuguucgccgcccagcccggccucaccuccgccgugaucgaggcccugccgcgcaacaugguccugaccugccagggcagcgacgacaucaagaagcuccuggacucccaggggcggcgcgacaucaagcugaucgacgugagccucaacaagaucgacucccgcaaguucgagaacgcggucugggaccaguacaaggaccugugccacaugcacacgggcgugguggucgagaagaagaagaagggcgggaaggaggagaucacgccccacugcgcccugcucgacugcaucauguucgacgccgccgugagcgggggccugaacgccaccgugcugcgggcgguccucccccgcgacaugguguuccggaccuccagccccaaggugguccugugaggacuaguuauaagacugacuagcccgaugggccucccaacgggcccuccuccccuccuugcaccgagauuaaucaaaggcucuuuucagagccaccaaaaaaaaaaaaaaaaaaaaaaaaaaaaaaaaaaaaaaaaaaaaaaaaaaaaaaaaaaaaaaaaaaaaaaaaaaaaaaaaaaaaaaaaaaaaaaaaaaaaa

SEQ ID NO: 20490 - RNA, 1974 nt, Artificial Sequence
  mRNA product Design i-3 (hSL-A100) comprising derived and/or modified sequence from LASV(KAK-428;Clade n.d. (VII))__ANH09741__SP-HsALB_NP(2-569) (opt1)
aggagaaagcuuaccaugaagugggugaccuucaucagccugcucuuccuguucuccagcgccuacuccagcaacuccaaggaggugaaguccuuccuguggacccagagccuccgccgggagcugagcggcuacugcaccaacaucaagcugcaggucgugaaggacgcccaggcccuccugcacgggcuggacuucuccgaggugagcaacguccagcgccucaugcggaagcagaagcgcgacgacaacgaccugaagcggcugcgcgaccucaaccaggcggugaacaaccugguggagcugaaguccguccagcagaaguccgugcucaaggugggcacgcugaacagcgacgaccugcucacccuggccgccgaccuggagaagcucaagagcaaggucgugcggaccgagcgcccccuguccagcgggguguacaugggcaaccuguccagccagcagcucgaccagcggcgcgcccugcugaacaugaucgggauggccggcggcucccaggggaaccagccgagccgggacggcgucgugcgcgugugggacgucaagaacgcggaccuccugaacaaccaguucgggaccaugcccucccugacgcucgccugccugaccaagcagggccagguggaccugaacgacgugguccucgcccugaccgaccuggggcucaucuacaccgccaaguaccccaacagcuccgaccuggaccggcugagccagaaccaccccgugcucaacaugaucgacgugaacaagagcucccugaacaucagcggcuacaacuucucccugggcgcggccgucaaggccggggccugcaugcucgacggcgggaacaugcuggagacgaucaagaucagcccgcagaccguggacggcauccugaaguccauccucaaggugaagcgcgcccugggcauguucgucagcgacacccccggggagcggaaccccuacgagaacauccuguacaaggugugccucuccggcaacggguggcccuacaucgcgagccgcaccuccaucgucggccgggccugggagaacacggugguggaccuggagagcaacaagaaccagccgaaggucgggaacaacggcuccaacaagaugcugcagagcuccggcuucgccaccgggcucaccuacagccagcugaugacccugcgcgacuccaugcugcagcucgaccccacggccaagaccuggaucgacaucgagggccggcccgaggaccccguggagcuggcccuguuccagccgagcuccgggugcuacauccacuucuuccgcgagcccaccgaccucaagcaguucaagcaggacgcgaaguacagccacggcaucgacgugaacgaccuguucuccgcccagcccgggcugaccagcgccguccucgaggcccugccccggaacauggugcugacgugccagggcagcgacgacauccgcaagcuccuggacucccaggaccgcaaggacaucaagcugaucgacaucagccucuccaaggccgacgcgcggaaguucgagaacgacgugugggaccaguucaaggaccugugccacaugcacaccggcaucgucguggagaagaagaagaagggcgggaagcaggagaugaccccgcacugcgcccugcucgacugcaucauguucgacgccgccgugagcgggggccugaacguccccacccugcgcgccgugcuccccacggacaugguguuccggaccaucaccaccaaggucgugcugugaggacuaguuauaagacugacuagcccgaugggccucccaacgggcccuccuccccuccuugcaccgagauuaaucaaaggcucuuuucagagccaccaaaaaaaaaaaaaaaaaaaaaaaaaaaaaaaaaaaaaaaaaaaaaaaaaaaaaaaaaaaaaaaaaaaaaaaaaaaaaaaaaaaaaaaaaaaaaaaaaaaaa

SEQ ID NO: 20491 - RNA, 1974 nt, Artificial Sequence; identical to SEQ ID NO: 20485
  mRNA product Design i-3 (hSL-A100) comprising derived and/or modified sequence from LASV(Pinneo-NIG-1969;Clade I)__AIT17837__SP-HsALB_NP(2-569) (opt1)

SEQ ID NO: 20492 - RNA, 1974 nt, Artificial Sequence
  mRNA product Design i-3 (hSL-A100) comprising derived and/or modified sequence from LASV(ISTH0009-NIG-2011;Clade II)__AIT17405__SP-HsALB_NP(2-569) (opt1)
aggagaaagcuuaccaugaagugggugaccuucaucagccugcucuuccuguucuccagcgccuacuccagcguguccaaggaggucaagagcuuccuguggacccagucccuccgccgggagcugagcggcuacugcuccaacaucaagcuccagguggugaaggacgcccaggcccugcugcacgggcuggacuucagcgaggucuccaacgugcagcgccucaugcggaagcagaagcgcgacgacagcgaccugaagcggcugcgcgaccucaaccaggcggugaacaaccuggucgagcugaaguccacccagcagaaguccauccuccgggugggcacccugaccagcgacgaccugcucacccuggccgccgaccuggagaagcucaagagcaaggugauccgcaccgagcggccccuguccagcggggucuacaugggcaaccuguccacgcagcagcucgagcagcgccgggcccugcugaacaugaucgggauggugggcggcgcccaggggacccagccgggccgcgacggggugguccgggugugggacgugaagaaccccgaccuccugaacaaccaguucggcaccaugcccagccugacccucgcgugccugacgaagcaggggcaggucgaccugaacgacgccgugcucgcccugaccgaccugggccucaucuacaccgccaaguaccccaacuccagcgaccuggaccgccugucccagagccacccgauccucaacaugguggacaucaagaaguccagccugaacaucagcggcuacaacuucucccugggggcggccgucaaggccggcgccugcaugcucgacgggggcaacaugcuggagaccaucaaggugacgccccagaccauggacggcauccucaagagcauccugaaggugaagcggucccuggggauguucgucagcgacacccccggcgagcgcaaccccuacgagaacauccuguacaagaucugccucuccggggacggcuggccguacaucgccagccggaccuccaucguggggcgcgcgugggagaacacgaccguggaccuggagagcgacggcaagccccagaaggucggcuccgccgggagcaacaagucccugcagagcgccggcuuccccaccgggcucaccuacucccagcugaugacgcugaaggacagcaugaugcagcuggaccccuccgccaagaccuggaucgacaucgagggccggccggaggaccccguggagaucgcccucuaccagcccaugagcgggugcuacauccacuucuuccgcgagcccaccgaccugaagcaguucaagcaggacgcgaaguacucccacggcaucgacgucgccgaccuguucccggcccagcccggccucaccagcgccgugaucgaggcccugccccggaacauggugcugacgugccaggggagcgacgacaucaagcgccuccuggacucccagggccgccgggacaucaagcugaucgacaucgcgcucagcaaggccgacucccgccgguucgagaacgccgucugggaccagugcaaggaccugugccacaugcacaccggggugguggucgagaagaagaagcgcggcgggaaggaggagaucacgccccacugcgcccugauggacugcaucauguacgacgccgcggugagcggcggccucaacaucccggugcugcgggccguccugccccgcgacaugguguuccggaccuccagccccaaggugguccucugaggacuaguuauaagacugacuagcccgaugggccucccaacgggcccuccuccccuccuugcaccgagauuaaucaaaggcucuuuucagagccaccaaaaaaaaaaaaaaaaaaaaaaaaaaaaaaaaaaaaaaaaaaaaaaaaaaaaaaaaaaaaaaaaaaaaaaaaaaaaaaaaaaaaaaaaaaaaaaaaaaaaa

SEQ ID NO: 20493 - RNA, 1974 nt, Artificial Sequence
  mRNA product Design i-3 (hSL-A100) comprising derived and/or modified sequence from LASV(ISTH2010-NIG-2012;Clade II)__AIT17483__SP-HsALB_NP(2-569) (opt1)
aggagaaagcuuaccaugaagugggugaccuucaucagccugcucuuccuguucuccagcgccuacuccagcgccuccaaggaggugaaguccuuccuguggacccagagccuccgccgggagcugagcggcuacugcuccaacaucaagcugcaggucgugaaggacgcccaggcgcuccugcacgggcuggacuucagcgagguguccaacguccagcgccucaugcggaagcagaagcgcgacgacagcgaccugaagcggcugcgcgaccucaaccaggccgugaacaaccugguggagcugaaguccacccagcagaaguccauccuccgggucggcacgcugaccagcgacgaccugcucacccuggccgccgaccuggagaagcucaagagcaaggugauccgcaccgagcggccccuguccagcgggguguacaugggcaaccuguccacgcagcagcucgagcagcgccgggcccugcugaaccucaucgggauggucggcggcgcgcaggggacccagccgggccgcgacgggguggugcgggucugggacgugaagaaccccgaccugcugaacaaccaguucggcaccaugcccagccucacccuggccugccugacgaagcagggccagguggaccucaacgacgccguccuggcccugaccgaccucgggcugaucuacaccgcgaaguaccccaacuccagcgaccuggaccgccucucccagagccacccgauccugaacaugguggacaccaagaaguccagccugaacaucagcggcuucaacuucucccucggggccgccgugaaggccggcgccugcaugcuggacgggggcaacaugcuggagacgaucaaggucacgccccagaccauggacggcauccucaagagcauccugaaggugaagaagucccuggggauguucgugagcgacacccccggcgagcggaaccccuacgagaacauccucuacaagaucugccuguccggggacggcuggccguacaucgcgagccgcaccuccaucgucgggcgggccugggagaacaccaccguggaccuggagagcgacggcaagccccacaaggugggcaccgccggguccaacaagagccuccaguccgccggcuuccccacggggcugaccuacagccagcugaugacccugaaggacuccaugaugcagcucgaccccagcgccaagaccuggaucgacaucgagggccgcccggaggaccccgucgagaucgcgcuguaccagcccauguccgggugcuacauccacuucuuccgggagcccacggaccugaagcaguucaagcaggacgccaaguacagccacggcaucgacguggccgaccucuucccggcccagcccggccugaccuccgccgucaucgaggcgcugccccgcaacauggugcugaccugccaggggagcgacgacaucaagcggcuccuggacagccagggccgccgcgacaucaagcucaucgacaucgcccuguccaaggccgacagccggcgcuucgagaacgccgugugggaccagugcaaggaccugugccacaugcacaccggggucgugguggagaagaagaagcggggcgggaaggaggagaucacgccccacugcgcccucauggacugcaucauguacgacgcggccgucuccggcggccugaacaucccggugcugcgcgccgugcucccccgggacauggucuuccgcaccagcucccccaagguggugcugugaggacuaguuauaagacugacuagcccgaugggccucccaacgggcccuccuccccuccuugcaccgagauuaaucaaaggcucuuuucagagccaccaaaaaaaaaaaaaaaaaaaaaaaaaaaaaaaaaaaaaaaaaaaaaaaaaaaaaaaaaaaaaaaaaaaaaaaaaaaaaaaaaaaaaaaaaaaaaaaaaaaaa

SEQ ID NO: 20494 - RNA, 1974 nt, Artificial Sequence
  mRNA product Design i-3 (hSL-A100) comprising derived and/or modified sequence from LASV(Lassa virus/H.sapiens-wt/NGA/2015/ISTH_0543;Clade II)__AVO03640__SP-HsALB_NP(2-569) (opt1)
aggagaaagcuuaccaugaagugggugaccuucaucagccugcucuuccuguucuccagcgccuacuccagcgccuccaaggaggugaaguccuuccuguggacccagagccuccgccgggagcugagcggcuacugcuccaacaucaagcugcaggucgugaaggacgcccaggcgcuccugcacgggcuggacuucagcgagguguccaacguccagcgccucaugcggaagcagaagcgcgacgacagcgaccugaagcggcugcgcgaccucaaccaggccgugaacaaccugguggagcugaaguccacccagcagaaguccauccuccgggucggcacgcugaccagcgacgaccugcucacccuggccgccgaccuggagaagcucaagagcaaggugauccgcaccgagcggccccuguccagcgggguguacaugggcaaccuguccacgcagcagcucgagcagcgccgggcccugcugaacaugaucgggauggucggcggcgcgcaggggacccagccgggccgcgacgggguggugcgggucugggacgugaagaaccccgaccuccugaacaaccaguucggcaccaugcccagccugacccucgccugccugacgaagcagggccagguggaccugaacgacgccguccucgcccugaccgaccuggggcucaucuacaccgcgaaguaccccaacuccagcgaccuggaccgccugucccagagccacccgauccucaacaugguggacaccaagaaguccagccugaacaucagcggcuacaacuucucccugggggccgccgugaaggccggcgccugcaugcucgacgggggcaacaugcuggagacgaucaaggucacgccccagaccauggacggcauccucaagagcauccugaaggugaagaagucccuggggauguucgugagcgacacccccggcgagcggaaccccuacgagaacauccuguacaagaucugccucuccggggacggcuggccguacaucgcgagccgcaccuccaucgucgggcgggccugggagaacaccaccguggaccuggagagcgacggcaagccccagaaggugggcuccgccgggagcaacaagucccugcagagcgccggcuuccccaccgggcucacguacucccagcugaugacccugaaggacagcaugaugcagcuggaccccuccgccaagaccuggaucgacaucgagggccgcccggaggaccccgucgagaucgcgcucuaccagcccaugagcgggugcuacauccacuucuuccgggagcccaccgaccugaagcaguucaagcaggacgccaaguacucccacggcaucgacguggccgaccuguucccggcccagcccggccucacgagcgccgucaucgaggcgcugccccgcaacauggugcugaccugccaggggagcgacgacaucaagcggcuccuggacucccagggccgcaaggacaucaagcugaucgacaucgcccucagcaaggccgacucccgccgguucgagaacgccgugugggaccagugcaaggaccugugccacaugcacaccggggucgugguggagaagaagaagcgcggcgggaaggaggagaucacgccccacugcgcccugauggacugcaucauguacgacgcggccgucagcggcggccucaacaucccggugcugcgggccgugcugccccgcgacauggucuuccggaccuccagccccaagguggugcucugaggacuaguuauaagacugacuagcccgaugggccucccaacgggcccuccuccccuccuugcaccgagauuaaucaaaggcucuuuucagagccaccaaaaaaaaaaaaaaaaaaaaaaaaaaaaaaaaaaaaaaaaaaaaaaaaaaaaaaaaaaaaaaaaaaaaaaaaaaaaaaaaaaaaaaaaaaaaaaaaaaaaa

SEQ ID NO: 20495 - RNA, 1974 nt, Artificial Sequence
  mRNA product Design i-3 (hSL-A100) comprising derived and/or modified sequence from LASV(Lassa virus/H.sapiens-wt/NGA/2016/ISTH_0009;Clade II)__AVO03572__SP-HsALB_NP(2-569) (opt1)
aggagaaagcuuaccaugaagugggugaccuucaucagccugcucuuccuguucuccagcgccuacuccagcgccuccaaggaggugaaguccuuccuguggacccagagccuccgccgggagcugagcggcuacugcuccaacaucaagcugcaggucgugaaggacgcccaggcgcuccugcacgggcuggacuucagcgagguguccaacguccagcgccucaugcggaagcagaagcgcgacgacagcgaccugaagcggcugcgcgaccucaaccaggccgugaacaaccugguggagcugaaguccacccagcagaaguccauccuccgggucggcacgcugaccagcgacgaccugcucacccuggccgccgaccuggagaagcucaagagcaaggugauccgcaccgagcggccccuguccagcgggguguacaugggcaaccuguccacgcagcagcucgagcagcgccgggcccugcugaacaugaucgggauggucggcggcgcgcaggggacccagccgggccgcgacgggguggugcgggucugggacgugaagaaccccgaccuccugaacaaccaguucggcaccaugcccagccugacccucgccugccugacgaagcagggccagguggaccugaacgacgccguccucgcccugaccgaccuggggcucaucuacaccgcgaaguaccccaacuccagcgaccuggaccgccugucccagagccacccgauccucaacaugguggacaccaagaaguccagccugaacaucagcggcuacaacuucucccugggggccgccgugaaggccggcgccugcaugcucgacgggggcaacaugcuggagacgaucaaggucacgccccagaccauggacggcauccucaagagcauccugaaggugaagaagucccuggggauguucgugagcgacacccccggcgagcggaaccccuacgagaacauccuguacaagaucugccucuccggggacggcuggccguacaucgcgagccgcaccuccaucgucgggcgggccugggagaacaccaccguggaccuggagagcgacggcaagccccagaaggugggcuccgccgggagcaacaagucccugcagagcgccggcuuccccaccgggcucacguacucccagcugaugacccugaaggacagcaugaugcagcuggaccccuccgccaagaccuggaucgacaucgagggccgcccggaggaccccgucgagaucgcgcucuaccagcccaugagcgggugcuacauccacuucuuccgggagcccaccgaccugaagcaguucaagcaggacgccaaguacucccacggcaucgacguggccgaccuguucccggcccagcccggccucacgagcgccgucaucgaggcgcugccccgcaacauggugcugaccugccaggggagcgacgacaucaagcggcuccuggacucccagggccgccgcgacaucaagcugaucgacaucgcccucagcaaggccgacucccggcgcuucgagaacgccgugugggaccagugcaaggaccugugccacaugcacaccggggucgugguggagaagaagaagcggggcgggaaggaggagaucacgccccacugcgcccugauggacugcaucauguacgacgcggccgucagcggcggccucaacaucccggugcugcgcgccgugcugccccgggacauggucuuccgcaccuccagccccaagguggugcucugaggacuaguuauaagacugacuagcccgaugggccucccaacgggcccuccuccccuccuugcaccgagauuaaucaaaggcucuuuucagagccaccaaaaaaaaaaaaaaaaaaaaaaaaaaaaaaaaaaaaaaaaaaaaaaaaaaaaaaaaaaaaaaaaaaaaaaaaaaaaaaaaaaaaaaaaaaaaaaaaaaaaa

SEQ ID NO: 20496 - RNA, 1974 nt, Artificial Sequence
  mRNA product Design i-3 (hSL-A100) comprising derived and/or modified sequence from LASV(Lassa virus/H.sapiens-wt/NGA/2016/ISTH_0017;Clade II)__AVO03568__SP-HsALB_NP(2-569) (opt1)
aggagaaagcuuaccaugaagugggugaccuucaucagccugcucuuccuguucuccagcgccuacuccagcgccuccaaggaggugaaguccuuccuguggacccagagccuccgccgggagcugagcggcuacugcuccagcaucaagcugcaggucgugaaggacgcccaggcgcuccugcacgggcuggacuucuccgaggugagcaacguccagcgccucaugcggaagcagaagcgcgacgacuccgaccugaagcggcugcgcgaccucaaccaggccgugaacaaccugguggagcucaagagcacccagcagaaguccauccugcgggucggcacgcugaccagcgacgaccugcucacccuggccgccgaccuggagaagcucaaguccaaggugauccgcaccgagcggccccugagcuccgggguguacaugggcaaccugagcacgcagcagcucgagcagcgccgggcccugcugaacaugaucgggauggcgggcggcgcccaggggacccagccgggccgcgacggggucgugcgggugugggacgucaagaaccccgaccuccugaacaaccaguucggcaccaugcccucccugacccucgccugccugacgaagcagggccagguggaccugaacgacgccgugcucgcgcugaccgaccuggggcucaucuacaccgccaaguaccccaacagcuccgaccuggaccgccugagccagagccacccgauccucaacauggucgacaccaagaaguccagccugaacaucuccggcuacaacuucagccugggggccgccgugaaggccggcgcgugcaugcucgacgggggcaacaugcuggagacgaucaaggugacgccccagaccauggacggcauccugaaguccauccucaaggucaagcggagccuggggauguucguguccgacgcccccggcgagcgcaaccccuacgagaacauccuguacaagaucugccucagcggggacggcuggccguacaucgccucccggaccagcaucguggggcgcgccugggagaacaccaccgucgaccuggaguccgacggcaagccccagaaggugggcgccaccgggagcaacaagucccugcagagcgcgggcuuccccaccgggcucacguacucccagcugaugacccugaaggacagcaugaugcagcuggaccccuccgccaagaccuggaucgacaucgagggccggccggaggaccccguggaggucgcccucuaccagcccgugagcgggugcuacauccacuucuuccgcgagcccaccgaccugaagcaguucaagcaggacgccaaguacucccacggcaucgacgucgccgaccuguucccggcgcagcccggccucacgagcgccgugaucgaggcccugccccggaacauggugcugaccugccaggggagcgacgacaucaagaagcuccuggacucccagggccgcaaggacaucaagcugaucgacaucgcccucagcaaggccgacucccgccgguucgagaacgcggucugggaccagugcaaggaccugugccacaugcacaccggggugguggucgagaagaagaagcgcggcgggaaggaggagaucacgccccacugcgcccugauggacugcaucauguacgacgccgccgugagcggcggccucaacaucccggugcugcgggcgguccugccccgcgacaugguguuccggaccuccagccccaaggugguccucugaggacuaguuauaagacugacuagcccgaugggccucccaacgggcccuccuccccuccuugcaccgagauuaaucaaaggcucuuuucagagccaccaaaaaaaaaaaaaaaaaaaaaaaaaaaaaaaaaaaaaaaaaaaaaaaaaaaaaaaaaaaaaaaaaaaaaaaaaaaaaaaaaaaaaaaaaaaaaaaaaaaaa

SEQ ID NO: 20497 - RNA, 1974 nt, Artificial Sequence
  mRNA product Design i-3 (hSL-A100) comprising derived and/or modified sequence from LASV(Lassa virus/H.sapiens-wt/NGA/2018/ISTH_0959;Clade II)__AVV65100__SP-HsALB_NP(2-569) (opt1)
aggagaaagcuuaccaugaagugggugaccuucaucagccugcucuuccuguucuccagcgccuacuccagcgccuccaaggaggugaaguccuuccuguggacccagagccuccgccgggagcugagcggcuacugcuccaacaucaagcugcaggucgugaaggacgcccaggcgcuccugcacgggcuggacuucagcgagguguccaacguccagcgccucaugcggaagcagaagcgcgacgacagcgaccugaagcggcugcgcgaccucaaccaggccgugaacaaccugguggagcugaaguccacccagcagaaguccauccuccgggucggcacccugaccagcgacgaccugcucacccuggccgccgaccuggagaagcucaagagcaaggugauccgcaccgagcggccccuguccagcgggguguacaugggcaaccuguccacgcagcagcucgagcagcgccgggcccugcugaaccucaucgggauggucggcggcgcgcaggggacccagccgggccgcgacgggguggugcgggucugggacgugaagaaccccgaccugcugaacaaccaguucggcaccaugcccagccucacccuggccugccugacgaagcagggccagguggaccucaacgacgucgugcuggcccugaccgaccucgggcugaucuacaccgccaaguaccccaacuccagcgaccuggaccgccucucccagagccacccgauccugaacaugguggacaccaagaaguccagccugaacaucagcggcuucaacuucucccucggggcggccgucaaggccggcgccugcaugcuggacgggggcaacaugcuggagacgaucaaggugacgccccagaccauggacggcauccucaagagcauccugaaggugaagaagucccuggggauguucgucagcgacacccccggcgagcggaaccccuacgagaacauccucuacaagaucugccuguccggggacggcuggccguacaucgccagccgcaccuccaucguggggcgggcgugggagaacaccaccguggaccuggagagcgacggcaagccccacaaggucggcaccgccggguccaacaagagccuccaguccgccggcuuccccacggggcugaccuacagccagcugaugacccugaaggacuccaugaugcagcucgaccccagcgccaagaccuggaucgacaucgagggccgcccggaggaccccguggagaucgcccuguaccagcccauguccgggugcuacauccacuucuuccgggagcccacggaccugaagcaguucaagcaggacgcgaaguacagccacggcaucgacgucgccgaccucuucccggcccagcccggccugaccuccgccgugaucgaggcccugccccgcaacauggugcugaccugccaggggagcgacgacaucaagcggcuccuggacagccagggccgcaaggacaucaagcucaucgacaucgcgcuguccaagaccgacagccgccgguucgagaacgccgucugggaccagugcaaggaccugugccacaugcacacgggggugguggucgagaagaagaagcgcggcgggaaggaggagaucacgccccacugcgcccucauggacugcaucauguacgacgccgccguguccggcggccugaacaucccggugcugcgggcgguccucccccgcgacaugguguuccggaccagcucccccaaggugguccugugaggacuaguuauaagacugacuagcccgaugggccucccaacgggcccuccuccccuccuugcaccgagauuaaucaaaggcucuuuucagagccaccaaaaaaaaaaaaaaaaaaaaaaaaaaaaaaaaaaaaaaaaaaaaaaaaaaaaaaaaaaaaaaaaaaaaaaaaaaaaaaaaaaaaaaaaaaaaaaaaaaaaa

SEQ ID NO: 20498 - RNA, 1974 nt, Artificial Sequence
  mRNA product Design i-3 (hSL-A100) comprising derived and/or modified sequence from LASV(LASV003-NIG-2008;Clade II)__AIT17581__SP-HsALB_NP(2-569) (opt1)
aggagaaagcuuaccaugaagugggugaccuucaucagccugcucuuccuguucuccagcgccuacuccagcgccuccaaggaggugaaguccuuccuguggacccagagccuccgccgggagcugagcggcuacugcuccagcaucaagcugcaggucgugaaggacgcccaggcgcuccugcacgggcuggacuucuccgaggugagcaacguccagcgccucaugcggaagcagaagcgcgacgacuccgaccugaagcggcugcgcgaccucaaccaggccgugaacaaccugguggagcucaagagcacccagcagaaguccguccugcgggugggcacccugaccagcgacgaccugcucacccuggccgccgaccuggagaagcucaaguccaaggugauccgcaccgagcggccccugagcuccggggucuacaugggcaaccugagcgcccagcagcucgagcagcgccggacgcugcugaacaugaucgggauggugggcggcgcgcaggggacccagccgggccgcgacggggugguccgggugugggacgugaagaaccccgaccuccugaacaaccaguucggcaccaugcccucccugacccucgccugccugacgaagcaggggcaggucgaccugaacgacguggugcucgcccugaccgaccugggccucaucuacaccgccaaguaccccaacagcuccgaccuggaccgccugagccagagccacccgauccucuccauggucgacaccaagaaguccagccugaacaucagcggcuacaacuucucccugggggcggccgugaaggccggcgccugcaugcucgacgggggcaacaugcuggagacgaucaaggugacgccccagaccauggacggcauccucaagagcauccugaaggucaagaagucccuggggauguucgugagcgacacccccggcgagcggaaccccuacgagaacauccuguacaagaucugccucuccggggacggcuggccguacaucgccagccgcaccuccaucguggggcgggcgugggagaacaccaccgucgaccuggagagcgacggcaagccccagaaggugggcaccgccggguccaacaagagccugcaguccgccggcuuccccacggggcucaccuacagccagcugaugacccugaaggacuccaugaugcagcuggaccccagcgccaagaccuggaucgacaucgagggccgcccggaggaccccgucgagaucgcccucuaccagcccauguccgggugcuacauccacuucuuccgggagcccacggaccugaagcaguucaagcaggacgcgaaguacagccacggcaucgacgugaccgaccuguucccggcccagcccggccucaccagcgccgugaucgaggcccugccccgcaacaugguccugaccugccagggguccgacgacaucaagcggcuccuggacagccagggccgccgcgacaucaagcugaucgacaucgcccucuccaaggcggacagccggcgcuucgagaacgccgugugggaccagugcaaggaccugugccacaugcacacggggguggucguggagaagaagaagcggggcgggaaggaggagaucacgccccacugcgcccugauggacugcaucauguacgacgccgccguguccggcggccucaacaucccgguccugcgcgcggugcugccccgggacaugguguuccgcaccagcucccccaaggucgugcucugaggacuaguuauaagacugacuagcccgaugggccucccaacgggcccuccuccccuccuugcaccgagauuaaucaaaggcucuuuucagagccaccaaaaaaaaaaaaaaaaaaaaaaaaaaaaaaaaaaaaaaaaaaaaaaaaaaaaaaaaaaaaaaaaaaaaaaaaaaaaaaaaaaaaaaaaaaaaaaaaaaaaa

SEQ ID NO: 20499 - RNA, 1974 nt, Artificial Sequence
  mRNA product Design i-3 (hSL-A100) comprising derived and/or modified sequence from LASV(LASV035-NIG-2009;Clade II)__AIT17589__SP-HsALB_NP(2-569) (opt1)
aggagaaagcuuaccaugaagugggugaccuucaucagccugcucuuccuguucuccagcgccuacuccagcgccuccaaggaggugaaguccuuccuguggacccagagccuccgccgggagcugagcggcuacugcuccagcaucaagcugcaggucgugaaggacgcccaggcgcuccugcacgggcuggacuucuccgaggugagcaacguccagcgccucaugcggaagcagaagcgcgacgacuccgaccugaagcggcugcgcgaccucaaccaggccgugaacaaccugguggagcucaagagcacccagcagaaguccauccugcgggucggcacgcugaccagcgacgaccugcucacccuggccgccgaccuggagaagcucaaguccaaggugauccgcaccgagcggccccugagcuccgggguguacaugggcaaccugagcgcccagcagcucgagcagcgccgggcgcugcugaacaugaucgggauggucggcggcgcccaggggacgcagccgggccgcgacgggguggugcgggucugggacgugaagaaccccgaccuccugaacaaccaguucggcaccaugcccucccugacccucgccugccugaccaagcagggccagguggaccugaacgacgccguccucgcgcugacggaccuggggcucaucuacaccgccaaguaccccaacagcuccgaccuggaccgccugagccagagccacccgauccucaacaugguggacaccaagaaguccagccugaacaucuccggcuacaacuucagccugggggccgccgugaaggccggcgcgugcaugcucgacgggggcaacaugcuggagaccaucaaggucacgccccagaccauggacggcauccugaaguccauccucaaggugaagcggagccuggggauguucguguccgacacccccggcgagcgcaaccccuacgagaacauccuguacaagaucugccucagcggggacggcuggccguacaucgccucccggaccagcaucgucgggcgcgccugggagaacacgaccguggaccuggaguccgacggcaagccccagaaggugggcaccaccgggagcaacaagucccugcagagcgccggcuuccccacggggcucaccuacucccagcugaugacccugaaggacagcaugaugcagcuggaccccuccgccaagaccuggaucgacaucgagggccggccggaggaccccgucgagaucgcgcucuaccagcccaugagcgggugcuacauccacuucuuccgcgagcccacggaccugaagcaguucaagcaggacgccaaguacucccacggcaucgacguggccgaccuguucccggcccagcccggccucaccagcgccgucaucgaggcgcugccccggaacauggugcugaccugccaggggagcgacgacaucaagaagcuccuggacucccagggccgccgcgacaucaagcugaucgacaucgcccucagcaaggccgacucccggaaguucgagaacgccgugugggaccagugcaaggaccugugccacaugcacaccggggucgugguggagaagaagaagcgcggcgggaaggaggagaucacgccccacugcgcccugauggacugcaucauguacgacgcggccgucagcggcggccucaacaucccggugcugcgggccgugcugccccgcgacauggucuuccggaccuccagccccaagguggugcucugaggacuaguuauaagacugacuagcccgaugggccucccaacgggcccuccuccccuccuugcaccgagauuaaucaaaggcucuuuucagagccaccaaaaaaaaaaaaaaaaaaaaaaaaaaaaaaaaaaaaaaaaaaaaaaaaaaaaaaaaaaaaaaaaaaaaaaaaaaaaaaaaaaaaaaaaaaaaaaaaaaaaa

SEQ ID NO: 20500 - RNA, 1974 nt, Artificial Sequence
  mRNA product Design i-3 (hSL-A100) comprising derived and/or modified sequence from LASV(LASV1000-NIG-2009;Clade II)__AIT17783__SP-HsALB_NP(2-569) (opt1)
aggagaaagcuuaccaugaagugggugaccuucaucagccugcucuuccuguucuccagcgccuacuccagcgccuccaaggaggugaaguccuuccuguggacccagagccuccgccgggagcugagcggcuacugcuccaacaucaagcugcaggucgugaaggacgcccaggcgcuccugcacgggcuggacuucagcgagguguccaacguccagcgccucaugcggaagcagaagcgcgacgacagcgaccugaagcggcugcgcgaccucaaccaggccgugaacaaccugguggagcugaaguccacccagcagaaguccauccuccgggucggcacgcugaccagcgacgaccugcucacccuggccgccgaccuggagaagcucaagagcaaggugauccgcaccgagcggccccuguccagcgggguguacaugggcaaccuguccacgcagcagcucgagcagcgccgggcccugcugaacaugaucgggauggucggcggcgcgcaggggacccagccgggccgcgacgggguggugcgggucugggacgugaagaaccccgaccuccugaacaaccaguucggcaccaugcccagccugacccucgccugccugacgaagcagggccagguggaccugaacgacgucgugcucgcccugaccgaccuggggcucaucuacaccgccaaguaccccaacuccagcgaccuggaccgccugucccagagccacccgauccucaacaugguggacaccaagaaguccagccugaacaucagcggcuacaacuucucccugggggcggccgucaaggccggcgccugcaugcucgacgggggcaacaugcuggagacgaucaaggugacgccccagaccauggacggcauccucaagagcauccugaaggugaagaagucccuggggauguucgucagcgacacccccggcgagcggaaccccuacgagaacauccuguacaagaucugccucuccggggacggcuggccguacaucgccagccgcaccuccaucguggggcgggcgugggagaacaccaccguggaccuggagagcgacggcaagccccagaaggucggcaccgccggguccaacaagagccugcaguccgccggcuuccccacggggcucaccuacagccagcugaugacccugaaggacuccaugaugcagcuggaccccagcgccaagaccuggaucgacaucgagggccgcccggaggaccccguggagaucgcccucuaccagcccgucuccgggugcuacauccacuucuuccgggagcccacggaccugaagcaguucaagcaggacgcgaaguacagccacggcaucgacguggccgaccuguucccggcccagcccggccucaccuccgccgugaucgaggcccugccccgcaacaugguccugaccugccaggggagcgacgacaucaagcggcuccuggacagccagggccgccgcgacaucaagcugaucgacaucgcgcucuccaaggccgacagccggcgcuucgagaacgccgugugggaccagugcaaggaccugugccacaugcacaccgggguggucguggagaagaagaagcggggcgggaaggaggagaucacgccccacugcgcccugauggacugcaucauguacgacgccgcgguguccggcggccucaacaucccgguccugcgcgccgugcugccccgggacaugguguuccgcaccagcucccccaaggucgugcucugaggacuaguuauaagacugacuagcccgaugggccucccaacgggcccuccuccccuccuugcaccgagauuaaucaaaggcucuuuucagagccaccaaaaaaaaaaaaaaaaaaaaaaaaaaaaaaaaaaaaaaaaaaaaaaaaaaaaaaaaaaaaaaaaaaaaaaaaaaaaaaaaaaaaaaaaaaaaaaaaaaaaa

SEQ ID NO: 20501 - RNA, 1974 nt, Artificial Sequence
  mRNA product Design i-3 (hSL-A100) comprising derived and/or modified sequence from LASV(LASV221-NIG-2010;Clade II)__AIT17625__SP-HsALB_NP(2-569) (opt1)
aggagaaagcuuaccaugaagugggugaccuucaucagccugcucuuccuguucuccagcgccuacuccagcgccuccaaggaggugaaguccuuccuguggacccagagccuccgccgggagcugagcggcuacugcuccagcaucaagcugcaggucgugaaggacgcccaggcgcuccugcacgggcuggacuucuccgaggugagcaacguccagcgccucaugcggaagcagcgccgggacgacuccgaccugaagcgccugcgggaccucaaccaggccgugaacaaccugguggagcucaagagcacccagcagaaguccauccugcgcgucggcacgcugaccagcgacgaccugcucacccuggccgccgaccuggagaagcucaaguccaaggugauccggaccgagcgcccccugagcuccgggguguacaugggcaaccugagcacgcagcagcucgagcagcggcgcgcccugcugaacaugaucgggauggucggcggcgcgcaggggacccagccgggccgggacgggguggugcgcgucugggacgugaagaaccccgaccuccugaacaaccaguucggcaccaugcccucccugacccucgccugccugacgaagcagggccagguggaccugaacgacgccguccucgcccugaccgaccuggggcucaucuacaccgcgaaguaccccaacagcuccgaccuggaccggcugagccagagccacccgauccucaacaugguggacaccaagaaguccagccugaacaucuccggcuacaacuucagccugggggccgccgugaaggccggcgccugcaugcucgacgggggcaacaugcuggagacgaucaaggucacgccccagaccguggacggcauccugaaguccauccucaaggugaagcgcagccuggggauguucgucuccgacacccccggcgagcggaaccccuacgagaacauccuguacaagaucugccucagcggggacggcuggccguacaucgcgucccgcaccagcaucguggggcgggccugggagaacaccaccguggaccuggaguccgacggcaagccccagaaggucggcaccgccgggagcaacaagucccugcagagcgccggcuuccccacggggcucaccuacucccagcugaugacccugaaggacagcaugaugcagcuggaccccuccgccaagaccuggaucgacaucgagggccgcccggaggaccccguggagaucgcgcucuaccagcccaugagcgggugcuacauccacuucuuccgggagcccacggaccugaagcaguucaagcaggacgccaaguacucccacggcaucgacgucgccgaccuguucccggcccagcccggccucaccagcgccgugaucgaggcgcugccccgcaacauggugcugaccugccaggggagcgacgacaucaagcgccuccuggacucccagggccggcgcgacaucaagcugaucgacaucgcccucagcaaggccgacucccggaaguucgagaacgccgucugggaccagugcaaggaccugugccacaugcacaccggggugguggucgagaagaagaagcgcggcgggaaggaggagaucacgccccacugcgcccugauggacugcaucauguacgacgcggccgugagcggcggccucaacaucccggugcugcgggccguccugccccgcgacaugguguuccggaccuccagccccaaggugguccucugaggacuaguuauaagacugacuagcccgaugggccucccaacgggcccuccuccccuccuugcaccgagauuaaucaaaggcucuuuucagagccaccaaaaaaaaaaaaaaaaaaaaaaaaaaaaaaaaaaaaaaaaaaaaaaaaaaaaaaaaaaaaaaaaaaaaaaaaaaaaaaaaaaaaaaaaaaaaaaaaaaaaa

SEQ ID NO: 20502 - RNA, 1974 nt, Artificial Sequence
  mRNA product Design i-3 (hSL-A100) comprising derived and/or modified sequence from LASV(LASV237-NIG-2010;Clade II)__AIT17639__SP-HsALB_NP(2-569) (opt1)
aggagaaagcuuaccaugaagugggugaccuucaucagccugcucuuccuguucuccagcgccuacuccagcgccuccaaggaggugaaguccuuccuguggacccagagccuccgccgggagcugagcggcuacugcuccaacaucaagcugcaggucgugaaggacgcccaggcgcuccugcacgggcuggacuucagcgagguguccaacguccagcgccucaugcggaagcagaagcgcgacgacagcgaccugaagcggcugcgcgaccucaaccaggccgugaacaaccugguggagcugaaguccacccagcagaaguccauccuccgggucggcacccugaccagcgacgaccugcucacccuggccgccgaccuggagaagcucaagagcaaggugauccgcaccgagcggccccuguccagcgggguguacaugggcaaccuguccacgcagcagcucgagcagcgccgggcccugcugaacaugaucgggauggucggcggcgcgcaggggacccagccgggccgcgacgggguggugcgggucugggacgugaagaaccccgaccuccugaacaaccaguucggcaccaugcccagccugacccucgccugccugacgaagcagggccagguggaccugaacgacgccguccucgcccugaccgaccuggggcucaucuacaccgcgaaguaccccaacuccagcgaccuggaccgccugucccagagccacccgauccucaacaugguggacaucaagaaguccagccugaacaucagcggcuacaacuucucccugggggccgccgugaaggccggcgccugcaugcucgacgggggcaacaugcuggagaccaucaaggucacgccccagaccauggacggcauccucaagagcauccugaaggugaagcggucccuggggauguucgugagcgacacccccggcgagcgcaaccccuacgagaacauccuguacaagaucugccucuccggggacggcuggccguacaucgcgagccggaccuccaucgucgggcgcgccugggagaacacgaccguggaccuggagagcgacggcaagccccagaaggugggcuccgccgggagcaacaagucccugcagagcgccggcuuccccaccgggcucaccuacucccagcugaugacgcugaaggacagcaugaugcagcuggaccccuccgccaagaccuggaucgacaucgagggccggccggaggaccccgucgagaucgcgcucuaccagcccaugagcgggugcuacauccacuucuuccgcgagcccaccgaccugaagcaguucaagcaggacgccaaguacucccacggcaucgacguggccgaccuguucccggcccagcccggccucaccagcgccgucaucgaggcgcugccccggaacauggugcugacgugccaggggagcgacgacaucaagcgccuccuggacucccagggccgccgggacaucaagcugaucgacaucgcccucagcaaggccgacucccgccgguucgagaacgccgugugggaccagugcaaggaccugugccacaugcacaccggggucgugguggagaagaagaagcgcggcgggaaggaggagaucacgccccacugcgcccugauggacugcaucauguacgacgcggccgucagcggcggccucaacaucccggugcugcgggccgugcugccccgcgacauggucuuccggaccuccagccccaagguggugcucugaggacuaguuauaagacugacuagcccgaugggccucccaacgggcccuccuccccuccuugcaccgagauuaaucaaaggcucuuuucagagccaccaaaaaaaaaaaaaaaaaaaaaaaaaaaaaaaaaaaaaaaaaaaaaaaaaaaaaaaaaaaaaaaaaaaaaaaaaaaaaaaaaaaaaaaaaaaaaaaaaaaaa

SEQ ID NO: 20503 - RNA, 1974 nt, Artificial Sequence
  mRNA product Design i-3 (hSL-A100) comprising derived and/or modified sequence from LASV(LASV253-NIG-2011;Clade II)__AIT17671__SP-HsALB_NP(2-569) (opt1)
aggagaaagcuuaccaugaagugggugaccuucaucagccugcucuuccuguucuccagcgccuacuccagcgccuccaaggaggugaaguccuuccuguggacccagagccuccgccgggagcugagcggcuacugcuccagcaucaagcugcaggucgugaaggacgcccaggcgcuccugcacgggcuggacuucuccgaggugagcaacguccagcgccucaugcggaagcagaagcgcgacgacuccgaccugaagcggcugcgcgaccucaaccaggccgugaacaaccugguggagcucaagagcacccagcagaaguccguccugcgggugggcacccugaccagcgacgaccugcucacccuggccgccgaccuggagaagcucaaguccaaggugauccgcaccgagcggccccugagcuccggggucuacaugggcaaccugagcacgcagcagcucgagcagcgccgggcccugcugaacaugaucgggauggugggcggcgcgcaggggacccagccgggccgcgacggggugguccgggugugggacgugaagaaccccgaccuccugaacaaccaguucggcaccaugcccucccugacccucgccugccugacgaagcaggggcaggucgaccugaacgacguggugcucgcccugaccgaccugggccucaucuacaccgccaaguaccccaacagcuccgaccuggaccgccugagccagagccacccgauccucaacauggucgacaccaagaaguccagccugaacaucuccggcuacaacuucagccugggggcggccgugaaggccggcgccugcaugcucgacgggggcaacaugcuggagacgaucaaggugacgccccagaccauggacggcauccugaaguccauccucaaggucaagaagucccuggggauguucgugagcgacacccccggcgagcggaaccccuacgagaacauccuguacaagaucugccucagcggggacggcuggccguacaucgccucccgcaccagcaucguggggcgggcgugggagaacaccaccgucgaccuggaguccgacggcaagccccagaaggugggcaccgccgggagcaacaagucccugcagagcgccggcuuccccacggggcucaccuacucccagcugaugacccugaaggacagcaugaugcagcuggaccccuccgccaagaccuggaucgacaucgagggccgcccggaggaccccgucgagaucgcccucuaccagcccaugagcgggugcuacauccacuucuuccgggagcccacggaccugaagcaguucaagcaggacgcgaaguacucccacggcaucgacgugaccgaccuguucccggcccagcccggccucaccagcgccgugaucgaggcccugccccgcaacaugguccugaccugccaggggagcgacgacaucaagcggcuccuggacucccagggccgccgcgacaucaagcugaucgacaucgcccucagcaaggcggacucccggcgcuucgagaacgccgugugggaccagugcaaggaccugugccacaugcacacggggguggucguggagaagaagaagcggggcgggaaggaggagaucacgccccacugcgcccugauggacugcaucauguacgacgccgccgugagcggcggccucaacaucccgguccugcgcgcggugcugccccgggacaugguguuccgcaccuccagccccaaggucgugcucugaggacuaguuauaagacugacuagcccgaugggccucccaacgggcccuccuccccuccuugcaccgagauuaaucaaaggcucuuuucagagccaccaaaaaaaaaaaaaaaaaaaaaaaaaaaaaaaaaaaaaaaaaaaaaaaaaaaaaaaaaaaaaaaaaaaaaaaaaaaaaaaaaaaaaaaaaaaaaaaaaaaaa

SEQ ID NO: 20504 - RNA, 1974 nt, Artificial Sequence
  mRNA product Design i-3 (hSL-A100) comprising derived and/or modified sequence from LASV(LASV254-NIG-2011;Clade II)__AIT17675__SP-HsALB_NP(2-569) (opt1)
aggagaaagcuuaccaugaagugggugaccuucaucagccugcucuuccuguucuccagcgccuacuccagcgccuccaaggaggugaaguccuuccuguggacccagagccuccgccgggagcugagcggcuacugcuccagcaucaagcugcaggucgugaaggacgcccaggcgcuccugcacgggcuggacuucuccgaggugagcaacguccagcgccucaugcggaagcagaagcgcgacgacuccgaccugaagcggcugcgcgaccucaaccaggccgugaacaaccugguggagcucaagagcacccagcagaaguccguccugcgggugggcacgcugaccagcgacgaccugcucacccuggccgccgaccuggagaagcucaaguccaaggugauccgcaccgagcggccccugagcuccggggucuacaugggcaaccugagcacgcagcagcucgagcagcgccgggcccugcugaacaugaucgggauggugggcggcgcgcaggggacccagccgggccgcgacggggugguccgggugugggacgugaagaaccccgaccuccugaacaaccaguucggcaccaugcccucccugacccucgccugccugacgaagcaggggcaggucgaccugaacgacgccgugcucgcccugaccgaccugggccucaucuacaccgcgaaguaccccaacagcuccgaccuggaccgccugagccagagccacccgauccucaacaugguggacaccaagaaguccagccugaacaucuccggcuacaacuucagccugggggccgccgucaaggccggcgccugcaugcucgacgggggcaacaugcuggagacgaucaaggugacgccccagaccauggacggcauccugaaguccauccucaaggugaagaagucccuggggauguucgucagcgacacccccggcgagcggaaccccuacgagaacauccuguacaagaucugccucagcggggacggcuggccguacaucgcgucccgcaccagcaucguggggcgggccugggagaacaccaucguggaccuggaguccgacggcaagccccagaaggucggcaccgccgggagcaacaagucccugcagagcgccggcuuccccaccgggcucacguacucccagcugaugacccugaaggacagcaugaugcagcuggaccccuccgccaagaccuggaucgacaucgagggccgcccggaggaccccguggagaucgcgcucuaccagcccaugagcgggugcuacauccacuucuuccgggagcccaccgaccugaagcaguucaagcaggacgccaaguacucccacggcaucgacgucgccgaccuguucccggcccagcccggccucacgagcgccgugaucgaggcgcugccccgcaacauggugcugaccugccaggggagcgacgacaucaagcggcuccuggacucccagggccgccgcgacaucaagcugaucgacaucgcccucagcaaggccgacucccggcgcuucgagaacgccgucugggaccagugcaaggaccugugccacaugcacaccggggugguggucgagaagaagaagcggggcgggaaggaggagaucacgccccacugcgcccugauggacugcaucauguacgacgcggccgugagcggcggccucaacaucccggugcugcgcgccguccugccccgggacaugguguuccgcaccuccagccccaaggugguccucugaggacuaguuauaagacugacuagcccgaugggccucccaacgggcccuccuccccuccuugcaccgagauuaaucaaaggcucuuuucagagccaccaaaaaaaaaaaaaaaaaaaaaaaaaaaaaaaaaaaaaaaaaaaaaaaaaaaaaaaaaaaaaaaaaaaaaaaaaaaaaaaaaaaaaaaaaaaaaaaaaaaaa

SEQ ID NO: 20505 - RNA, 1974 nt, Artificial Sequence
  mRNA product Design i-3 (hSL-A100) comprising derived and/or modified sequence from LASV(Nig08-04;Clade II)__ADU56611__SP-HsALB_NP(2-569) (opt1)
aggagaaagcuuaccaugaagugggugaccuucaucagccugcucuuccuguucuccagcgccuacuccagcgccuccaaggaggugaaguccuuccuguggacccagagccuccgccgggagcugagcggcuacugcuccaacaucaagcugcaggucgugaaggacgcccaggcgcuccugcacgggcuggacuucagcgagguguccaacguccagcgccucaugcggaagcagaagcgcgacgacggcgaccugaagcggcugcgcgaccucaaccaggccgugaacaaccugguggagcucaagagcacccagcagaaguccguccugcggguggggacccugaccagcgacgaccugcucacccuggccgccgaccuggagaagcucaaguccaaggugauccgcaccgagcggccccugagcuccggcgucuacauggggaaccugagcacgcagcagcucgagcagcgcaaggcccugcuguccaugaucggcauggugggcggggcgcagggcacccagccggggcgggacggcgugguccgcgugugggacgugaagaaccccgaccuccugaacaaccaguucgggaccaugcccagccugacccucgccugccugacgaagcagggccaggucgaccugaacgacgccgugcucgcccugaccgaccugggccucaucuacaccgcgaaguaccccaacuccagcgaccuggaccggcugucccagagccacccgauccucaacaugguggacaccaagaaguccagccugaacaucagcggguacaacuucucccugggcgccgccgucaaggccggggccugcaugcucgacggcggcaacaugcuggagacgaucaaggugacgccccagaccauggacgggauccucaagagcauccugaaggugaagcgcucccugggcauguucgucagcgacacccccggggagcggaaccccuacgagaacauccuguacaagaucugccucuccggcgacggguggccguacaucgcgagccgcaccuccaucgugggccgggccugggagaacaccaccguggaccuggagagcgacggcaagccccagaaggucgggaccgccggcuccaacaagagccugcaguccgccggguuccccacgggccucaccuacagccagcugaugacccugaaggacuccaugaugcagcuggaccccagcgccaagaccuggaucgacaucgaggggcgcccggaggaccccguggagaucgcgcucuaccagcccauguccggcugcuacauccacuucuuccgggagcccacggaccugaagcaguucaagcaggacgccaaguacagccacggcaucgacgucaccgaccuguucuccgcccagccggggcucaccagcgccgugaucgaggcccugccccgcaacauggugcugaccugccagggcagcgacgacaucaagaagcuccuggacucccaggggcggcgcgacaucaagcugaucgacaucagccucaacaaggcggacucccgccgguucgagaacgccgucugggaccagugcaaggaccugugccacaugcacacgggcgugguggucgagaagaagaagcgcgggggcaaggaggagaucacgccccacugcgcccugauggacugcaucauguucgacgccgccgugagcggcgggcucaacauccccauccugcgggcggugcugccgcgcgacauggucuuccggaccuccagccccaagguggugcucugaggacuaguuauaagacugacuagcccgaugggccucccaacgggcccuccuccccuccuugcaccgagauuaaucaaaggcucuuuucagagccaccaaaaaaaaaaaaaaaaaaaaaaaaaaaaaaaaaaaaaaaaaaaaaaaaaaaaaaaaaaaaaaaaaaaaaaaaaaaaaaaaaaaaaaaaaaaaaaaaaaaaa

SEQ ID NO: 20506 - RNA, 1977 nt, Artificial Sequence
  mRNA product Design i-3 (hSL-A100) comprising derived and/or modified sequence from LASV(GA391;Clade III)__AAA46284__SP-HsALB_NP(2-570) (opt1)
aggagaaagcuuaccaugaagugggugaccuucaucagccugcucuuccuguucuccagcgccuacuccagcgccuccaaggaggugcgcagcugccuguggacccagucccuccggcgcgagcugagcggcuacugcuccaacaucaagcugcaggucgugaaggacgcccaggcgcuccugcacgggcuggacuucagcgagguguccaacguccagcggcucaugcgcaagcagaagcgggacgacggcgaccugaagcgccugcgggaccucaaccaggccgugaacaaccugguggagcugaaguccacccagcagaaguccguccuccgcguggggacgcugagcuccgacgaccugcucauccuggccgccgaccuggagaagcucaagagcaaggugacccggaccgagcgcccccuguccagcggcgucuacauggggaaccuguccagccagcagcucgaccagcggcgcgcccugcugaacaugaucggcaugaccggcguguccgggggcgggaagggcgcgagcaacgggaucgugcgggucugggacgugaagaacgccgagcuccugaacaaccaguucggcacgaugccgucccugacccucgccugccugaccaagcagggccagguggaccugaacgacgccguccaggcgcucaccgaccuggggcugaucuacacggccaaguaccccaacagcagcgaccucgaccgccugucccagagccaccccauccugaacaugaucgacaccaagaaguccagccucaacaucuccggcuacaacuucagccugggggccgccgugaaggccggcgcgugcaugcuggacggcgggaacaugcucgagaccaucaaggugagcccccagaccauggacggcauccucaagagcauccugaaggucaagaagucccuggggauguucgugagcgacacgccgggcgagcggaaccccuacgagaacauccuguacaagaucugccuguccggggacggcuggagcuacaucgccucccgcaccagcaucgugggccgggccugggagaacaccgucguggaccucgagcaggacaacaagccccagaagaucgggaacggcggguccaacaagagccugcaguccgccggcuucgccgcggggcugaucuacagccagcucaugacccugaaggacuucaagugcuucaaccugauccccaacgccaagacguggauggacaucgagggccgcccggaggaccccguggagaucgcccuguaccagcccuccagcggcugcuacguccacuucuuccgggagcccaccgaccucaagcaguucaagcaggacgccaaguacagccacgggcgcgacgugaccgaccuguucgccgcgcagccgggccugaccuccgccgucaucgaggcccucccccggaacauggugaucacgugccaggggagcgaggacauccgcaagcugcuggagucccagggccgccgggacaucaagcucaucgacaucacccugagcaaggccgacucccgcaaguucgagaacgccgugugggaccaguucaaggaccugugccacaugcacaccggggucgugguggagaagaagaagcggggcggcaaggaggagaucacgccccacugcgcgcucauggacugcaucauguucgacgccgccgucagcgggggccuggacgccaaggugcugcgcgugguccucccccgggacaugguguuccgcaccuccaccccgaaggugguccugugaggacuaguuauaagacugacuagcccgaugggccucccaacgggcccuccuccccuccuugcaccgagauuaaucaaaggcucuuuucagagccaccaaaaaaaaaaaaaaaaaaaaaaaaaaaaaaaaaaaaaaaaaaaaaaaaaaaaaaaaaaaaaaaaaaaaaaaaaaaaaaaaaaaaaaaaaaaaaaaaaaaaa

SEQ ID NO: 20507 - RNA, 1974 nt, Artificial Sequence
  mRNA product Design i-3 (hSL-A100) comprising derived and/or modified sequence from LASV(Nig08-A19;Clade III)__ADU56619__SP-HsALB_NP(2-569) (opt1)
aggagaaagcuuaccaugaagugggugaccuucaucagccugcucuuccuguucuccagcgccuacuccagcgccuccaaggaggugaaguccuuccuguggacccagucccuccgccgggagcugagcggcuacugcuccaacaucaagcugcaggucgugaaggacgcccaggcgcuccugcacgggcuggacuucagcgagguguccaacguccagcgccucaugcggaagcagaagcgcgacgacggcgaccugaagcggcugcgcgaccucaaccaggccgugaacaaccugguggagcucaagagcacccagcagaaguccguccugcggguggggacccugagcuccgacgaccugcucgugcuggccgccgaccuggagaagcucaagagcaaggucgugcgcaccgagcggccccuguccagcggcaucuacauggggaaccuguccagccagcagcucgaccagcgcaaggcccugcugaacaugaucggcaugaccggcgggaacggcgggcggaacaccacguccgacggcaucgugcgcgucugggacgugaagaacgcggagcuccugaacaaccaguucgggaccaugccgagccugacccucgccugccugaccaagcagggccagguggaccugaacgacgccguccaggcccucacggaccugggccugaucuacaccgcgaaguaccccaacuccagcgaccucgaccggcuggcccagagccaccccauccugaacaugaucgacaccaagaaguccagccucaacaucuccggguacaacuucagccugggcgccgccgugaaggccggggcgugcaugcuggacggcggcaacaugcucgagaccaucaaggugagcccccagacgauggacgggauccucaagagcauccugaaggucaagcgcucccugggcauguucaucagcgacaccccgggggagcggaaccccuacgagaacauccuguacaagaucugccuguccggcgacggguggcccuacaucgccagccgcaccuccaucgugggccgggccugggagaacaccguggucgaccucgagagcgacaacaagccccagaagacgggcaacgggggcuccaacaagagccugcaguccgccggguucgccgcgggccugaccuacagccagcucaugacccugaaggacuccaugcugcagcuggacccgaacgccaagaccuggauggacaucgaggggcgccccgaggaccccguggagaucgcccucuaccagcccagcuccggcugcuacauccacuucuuccgggagccgacggaccugaagcaguucaagcaggacgccaaguacagccacggcaucgacgugaccgaccuguucgccgcgcagcccgggcucaccagcgccgucaucgaggcccugccccgcaacauggugaucacgugccagggcuccgaggacauccggaagcugcucgagagccaggggcgccgcgacaucaagcugaucgacaucucccugagcaaggucgacucccggaaguucgagaacgccgugugggaccaguucaaggaccucugccacaugcacaccggcaucguggucgagaagaagaagcgcgggggcaaggaggagaucacgccccacugcgcccugauggacugcaucauguucgacgcggccgugagcggcgggguggacgccaagguccugcgggccgugcucccgcgcgacaugguguuccggaccuccacccccaaggucgugcugugaggacuaguuauaagacugacuagcccgaugggccucccaacgggcccuccuccccuccuugcaccgagauuaaucaaaggcucuuuucagagccaccaaaaaaaaaaaaaaaaaaaaaaaaaaaaaaaaaaaaaaaaaaaaaaaaaaaaaaaaaaaaaaaaaaaaaaaaaaaaaaaaaaaaaaaaaaaaaaaaaaaaa

SEQ ID NO: 20508 - RNA, 1974 nt, Artificial Sequence
  mRNA product Design i-3 (hSL-A100) comprising derived and/or modified sequence from LASV(G1180-SLE-2010;Clade IV)__AIT17169__SP-HsALB_NP(2-569) (opt1)
aggagaaagcuuaccaugaagugggugaccuucaucagccugcucuuccuguucuccagcgccuacuccagcgccuccaaggagaucaagagcuuccuguggacccagucccuccgccgggagcugagcggcuacugcuccaacaucaagcuccagguggucaaggacgcccaggcgcugcugcacgggcuggacuucagcgagguguccaacgugcagcgccucaugcggaaggagcgccgggacgacaacgaccugaagcgccugcgggaccucaaccaggccgucaacaaccugguggagcucaagagcacccagcagaaguccauccugcgcgugggcacccugaccagcgacgaccugcucauccuggccgccgaccuggagaagcucaaguccaaggucauccggaccgagcgcccccugagcgccgggguguacaugggcaaccuguccagccagcagcucgaccagcggcgcgcgcugcuguccaugaucgggaugagcuccggcaaccagcgggcccaggccggccgcgacggggugguccgggugugggacgugaagaacgucgagcuccugaacaaccaguucggcaccaugccgagccugacgcucgccugccugaccaagcagggccagguggaccugaacgacgcggugcaggcccucaccgaccuggggcugaucuacaccgccaaguaccccaacacguccgaccucgaccgccugacccagagccaccccauccugaacaugaucgacaccaagaaguccagccucaacaucagcggguacaacuucucccugggcgccgccgucaaggcgggcgccugcaugcuggacgggggcaacaugcucgagaccaucaaggugagcccccagacgauggacgggauccugaaguccauccugaaggugaagaaggcccucggcauguucaucagcgacaccccgggcgagcggaaccccuacgagaacauccuguacaagaucugccuguccggggacggcuggcccuacaucgccagccgcaccuccaucaccgggcgggccugggagaacacggucguggaccucgagagcgacggcaagccccagaaggcgggguccaacaacagcaacaagucccugcagagcgugggcuucaccgccggccugaccuacucccagcucaugacccugaaggacgccaugcugcagcuggacccgaacgccaagacguggauggacaucgaggggcgccccgaggaccccgucgagaucgcccucuaccagcccagcuccggcugcuacauccacuucuuccgggagccgaccgaccugaagcaguucaagcaggacgcgaaguacagccacgggaucgacgugaccgaccuguucgccgcccagcccggccucaccuccgccgugaucgacgcccugccccgcaacauggucaucacgugccaggggagcgacgacauccgcaagcugcucgagagccagggccggaaggacaucaagcugaucgacaucgcgcuguccaagaccgacagccgcaaguacgagaacgccgugugggaccaguacaaggaccucugccacaugcacaccggcgucgugguggagaagaagaagcgcgggggcaaggaggagaucacgccccacugcgcccugauggacugcaucauguucgacgccgcggucuccgggggccugaacaccagcgugcuccgggccgugcugccgcgggacauggucuuccgcaccuccacgccccggguggugcugugaggacuaguuauaagacugacuagcccgaugggccucccaacgggcccuccuccccuccuugcaccgagauuaaucaaaggcucuuuucagagccaccaaaaaaaaaaaaaaaaaaaaaaaaaaaaaaaaaaaaaaaaaaaaaaaaaaaaaaaaaaaaaaaaaaaaaaaaaaaaaaaaaaaaaaaaaaaaaaaaaaaaa

SEQ ID NO: 20509 - RNA, 1974 nt, Artificial Sequence
  mRNA product Design i-3 (hSL-A100) comprising derived and/or modified sequence from LASV(G1442-SLE-2011;Clade IV)__AIT17181__SP-HsALB_NP(2-569) (opt1)
aggagaaagcuuaccaugaagugggugaccuucaucagccugcucuuccuguucuccagcgccuacuccagcgccuccaaggaggugaaguccuuccuguggacccagagccuccgccgggagcugagcggcuacugcuccaacaucaagcugcaggucgugaaggacgcccaggcgcuccugcacgggcuggacuucagcgagguguccaacguccagcgccucaugcggaagcagcgccgggacgacaacgaccugaagcgccugcgggaccucaaccaggccgugaacaaccugguggagcucaagagcacccagcagaaguccguccugcgcgugggcacccugaccagcgacgaccugcucgugcuggccgccgaccuggagaagcucaaguccaaggucauccggaccgagcgcccccugagcgccgggguguacaugggcaaccuguccagccagcagcucgaccagcggcgcgcgcugcugaacaugaucgggauguccggcggcauccaggggacccggacgggccgcgacggggugguccgggugugggacgugaagaacgccgaccuccugaacaaccaguucggcaccaugccgagccugacccucgccugccugaccaagcaggggcaggucgaccugaacgacguggugcaggcccucacggaccugggccugaucuacaccgcgaaguaccccaacgccuccgaccucgaccgccugacccagagccaccccauccugaacaugaucgacaccaagaaguccagccucaacaucagcggcuacaacuucucccugggggccgccgucaaggccggcgcgugcaugcuggacgggggcaacaugcucgagacgaucaaggugagcccccagaccauggacggcauccugaaguccauccugaaggugaagaagacccucgggauguucaucagcgacaccccgggcgagcggaaccccuacgagaacauccuguacaagaucugccuguccggggacggcuggcccuacaucgccagccgcacguccaucaccgggcgggccugggagaacaccgucguggaccucgagagcgacggcaagccccagaaggccggcuccaacaacagcaacaagucccugcagagcgccggguucgcggccggccugaccuacucccagcucaugacgcugaaggacgccaugcugcagcuggacccgaacgccaagaccuggauggacaucgaggggcgccccgaggaccccguggagaucgcccucuaccagcccagcuccggcugcuacauccacuucuuccgggagccgaccgaccugaagcaguucaagcaggacgcgaaguacagccacgggaucgacgucaccgaccuguucgccgcccagcccggccucacguccgccgugaucgaggcccugccccgcaacauggucaucacgugccagggcagcgacgacaucaagaagcugcucgagucccaggggcgcaaggacaucaagcugaucgacaucgcgcugagcaagaccgacagccggaaguacgagaacgccgugugggaccaguacaaggaccucugccacaugcacaccggcguggucguggagaagaagaagcgcgggggcaaggaggagaucaccccgcacugcgcccugauggacugcaucauguucgacgccgcgguguccgggggccugaacacccucguccugcgggccgugcugccccgcgacaugguguuccggaccagcacgccccgcgucgugcucugaggacuaguuauaagacugacuagcccgaugggccucccaacgggcccuccuccccuccuugcaccgagauuaaucaaaggcucuuuucagagccaccaaaaaaaaaaaaaaaaaaaaaaaaaaaaaaaaaaaaaaaaaaaaaaaaaaaaaaaaaaaaaaaaaaaaaaaaaaaaaaaaaaaaaaaaaaaaaaaaaaaaa

SEQ ID NO: 20510 - RNA, 1974 nt, Artificial Sequence
  mRNA product Design i-3 (hSL-A100) comprising derived and/or modified sequence from LASV(G3010-SLE-2013;Clade IV)__AIT17345__SP-HsALB_NP(2-569) (opt1)
aggagaaagcuuaccaugaagugggugaccuucaucagccugcucuuccuguucuccagcgccuacuccagcgccuccaaggagaucaagagcuuccuguggacccagucccuccgccgggagcugagcggcuacugcuccaacaucaagcuccagguggucaaggacgcccaggcgcugcugcacgggcuggacuucagcgagguguccaacgugcagcgccucaugcggaaggagcgccgggacgacaacgaccugaagcgccugcgggaccucaaccaggccgucaacaaccugguggagcucaagagcacccagcagaaguccauccugcgcgugggcacccugaccagcgacgaccugcucauccuggccgccgaccuggagaagcucaaguccaaggucacccggaccgagcgcccccugagcgccgggguguacaugggcaaccuguccagccagcagcucgaccagcggcgcgcgcugcuguccaugaucgggaugagcuccggcgugcagggcgcccgggccgggcgcgacggcgucgugcgggugugggacgucaagaacgccgagcuccugaacaaccaguucgggacgaugccgagccugacccucgcgugccugaccaagcagggccagguggaccugaacgacgugguccaggcccucaccgaccuggggcugaucuacacggccaaguaccccaacaccuccgaccucgaccgccugacccagagccaccccauccugaacaugaucgacaccaagaaguccagccucaacaucagcggcuacaacuucucccugggcgccgccgugaaggcgggggccugcaugcuggacggcgggaacaugcucgagacgaucaaggugagcccccagaccauggacggcauccugaaguccauccugaaggucaagaaggcccucggcauguucaucagcgagaccccgggggagcggaaccccuacgagaacauccuguacaagaucugccuguccggcgacggguggcccuacaucgccagccgcaccuccaucacgggccgggccugggagaacaccgugguggaccucgagagcgacgggaagccccagaaggcgggcuccaacaacagcaacaagucccugcagagcgccggcuucaccgccgggcugaccuacucccagcucaugacgcugaaggacgccaugcugcagcuggacccgaacgccaagaccuggauggacaucgagggccgccccgaggaccccgucgagguggcgcucuaccagcccagcuccgggugcuacauccacuucuuccgggagccgaccgaccugaagcaguucaagcaggacgccaaguacagccacggcaucgacgugaccgaccuguucgccgcccagcccgggcucacguccgccgucaucgacgcgcugccccgcaacauggugaucacgugccagggcagcgacgacaucaagaagcugcucgagagccagggccgcaaggacaucaagcugaucgacaucgcccuguccaagaccgacagccggaaguacgagaacgccgucugggaccaguacaaggaccucugccacaugcacaccggggugguggucgagaagaagaagcgcggcgggaaggaggagaucaccccgcacugcgcccugauggacugcaucauguucgacgcggccguguccggcgggcugaacaccagcgugcuccgggccguccugccccgcgacaugguguuccggaccuccacgccccgcgugguccugugaggacuaguuauaagacugacuagcccgaugggccucccaacgggcccuccuccccuccuugcaccgagauuaaucaaaggcucuuuucagagccaccaaaaaaaaaaaaaaaaaaaaaaaaaaaaaaaaaaaaaaaaaaaaaaaaaaaaaaaaaaaaaaaaaaaaaaaaaaaaaaaaaaaaaaaaaaaaaaaaaaaaa

SEQ ID NO: 20511 - RNA, 1974 nt, Artificial Sequence
  mRNA product Design i-3 (hSL-A100) comprising derived and/or modified sequence from LASV(G502-SLE-2009;Clade IV)__AIT17127__SP-HsALB_NP(2-569) (opt1)
aggagaaagcuuaccaugaagugggugaccuucaucagccugcucuuccuguucuccagcgccuacuccagcgccuccaaggagaucaagagcuuccuguggacccagucccuccgccgggagcugagcggcuacugcuccaacaucaagcuccagguggucaaggacgcccaggcgcugcugcacgggcuggacuucagcgagguguccaacgugcagcgccucaugcggaaggagcgccgggacgacaacgaccugaagcgccugcgggaccucaaccaggccgucaacaaccugguggagcucaagagcacccagcagaaguccauccugcgcgugggcacccugaccagcgacgaccugcucauccuggccgccgaccuggagaagcucaaguccaaggucauccggaccgagcgcccccugagcgccgggguguacaugggcaaccuguccagccagcagcucgaccagcggcgcgcgcugcuguccaugaucgggaugagcggcggcaaccagggggugcgggccggcaaggacggggucgugcgcgugugggacgucaagaacgccgagcuccugaacaaccaguucggcaccaugccgucccugacgcucgccugccugaccaagcagggccagguggaccugaacgacgcggugcaggcccucaccgaccuggggcugaucuacaccgccaaguaccccaacacgagcgaccucgaccggcugacccagucccaccccauccugaacaugaucgacaccaagaaguccagccucaacaucuccggcuacaacuucagccugggggccgccgucaaggcgggcgccugcaugcuggacgggggcaacaugcucgagaccaucaaggugagcccccagacgauggacggcauccucaagagcauccugaaggugaagaaggcccuggggauguucaucuccgacaccccgggcgagcgcaaccccuacgagaacauccuguacaagaucugccugagcggggacggcuggcccuacaucgccucccggaccagcaucaccgggcgcgccugggagaacacggucguggaccucgaguccgacggcaagccccagaaggcgggcagcaacaacuccaacaagagccugcaguccgccggguucaccgccggccugaccuacagccagcucaugacccugaaggacgccaugcugcagcuggacccgaacacgaagaccuggauggacaucgaggggcggcccgaggaccccguggagaucgcccucuaccagcccuccagcggcugcuacauccacuucuuccgcgagccgaccgaccugaagcaguucaagcaggacgcgaaguacucccacgggaucgacgucaccgaccuguucgccgcccagcccggccucacgagcgccgugaucgacgcccugccccggaacauggugaucacgugccagggcuccgacgacauccgcaagcugcucgagagccaggggcgcaaggacaucaagcugaucgacaucgcgcugaacaagaccgacagccggaaguacgagaacgccgucugggaccaguacaaggaccucugccacaugcacaccggcguggucguggagaagaagaagcgcgggggcaaggaggagaucaccccgcacugcgcccugauggacugcaucauguucgacgccgcgguguccgggggccugaacaccagcguccuccgggccgugcugccccgcgacaugguguuccggaccuccacgccccgcgucgugcugugaggacuaguuauaagacugacuagcccgaugggccucccaacgggcccuccuccccuccuugcaccgagauuaaucaaaggcucuuuucagagccaccaaaaaaaaaaaaaaaaaaaaaaaaaaaaaaaaaaaaaaaaaaaaaaaaaaaaaaaaaaaaaaaaaaaaaaaaaaaaaaaaaaaaaaaaaaaaaaaaaaaaa

SEQ ID NO: 20512 - RNA, 1974 nt, Artificial Sequence
  mRNA product Design i-3 (hSL-A100) comprising derived and/or modified sequence from LASV(G733-SLE-2010;Clade IV)__AIT17155__SP-HsALB_NP(2-569) (opt1)
aggagaaagcuuaccaugaagugggugaccuucaucagccugcucuuccuguucuccagcgccuacuccagcgccuccaaggagaucaagagcuuccuguggacccagucccuccgccgggagcugagcggcuacugcuccaacaucaagcuccagguggucaaggacgcccaggcgcugcugcacgggcuggacuucagcgagguguccaacgugcagcgccucaugcggaaggagcgccgggacgacaacgaccugaagcgccugcgggaccucaaccaggccgucaacaaccugguggagcucaagagcacccagcagaaguccgugcugcgcgucggcacccugaccagcgacgagcugcucgugcuggccgccgaccuggagaagcucaaguccaaggugauccggaccgagcgcccccugagcgccggggucuacaugggcaaccuguccagccagcagcucgaccagcggcgcgcgcugcuguccaugaucgggaugagcggcggcaaccagggggcccggaccggccgcgacgggguggugcgggucugggacgugaagaacgccgagcuccugaacaaccaguucggcaccaugccgucccugacccucgccugccugaccaagcagggccagguggaccugaacgacgcgguccaggcccucaccgaccuggggcugaucuacacggccaaguaccccaacaccagcgaccucgaccgccugacccagucccaccccauccugaacaugaucgacaccaagaaguccagccucaacaucuccggcuacaacuucagccugggggccgccgugaaggcgggcgccugcaugcuggacgggggcaacaugcucgagacgaucaaggugagcccccagaccauggacggcauccucaagagcauccugaaggucaagaaggcccuggggauguucaucuccgacaccccgggcgagcggaaccccuacgagaacauccuguacaagaucugccugagcggggacggcuggcccuacaucgccucccgcaccagcaucacggggcgggccugggagaacaccgugguggaccucgaguccgacggcaagccccagaaggcgggcagcaacaacuccaacaagagccugcaguccgccggguucaccgccggccugaccuacagccagcucaugacgcugaaggacgccaugcugcagcuggacccgaacgccaagaccuggauggacaucgaggggcgccccgaggaccccgucgagaucgcgcucuaccagcccuccagcggcugcuacauccacuucuuccgggagccgaccgaccugaagcaguucaagcaggacgccaaguacucccacgggaucgacgugaccgaccuguucgccgcccagcccggccucacgagcgccgugaucgacgcgcugccccgcaacauggucaucacgugccagggcuccgacgacauccgcaagcugcucgagagccaggggcggaaggacaucaagcugaucgacaucgcccugagcaagaucgacucccgcaaguacgagaacgccgugugggaccaguacaaggaccucugccacaugcacaccggcgucgugguggagaagaagaagcgcgggggcaaggaggagaucacgccccacugcgcccugauggacugcaucauguucgacgcggccgucagcgggggccugaacucccucgugcugcgggccgugcugccgcgggacauggucuuccgcaccagcacgccccggguggugcucugaggacuaguuauaagacugacuagcccgaugggccucccaacgggcccuccuccccuccuugcaccgagauuaaucaaaggcucuuuucagagccaccaaaaaaaaaaaaaaaaaaaaaaaaaaaaaaaaaaaaaaaaaaaaaaaaaaaaaaaaaaaaaaaaaaaaaaaaaaaaaaaaaaaaaaaaaaaaaaaaaaaaa

SEQ ID NO: 20513 - RNA, 1974 nt, Artificial Sequence
  mRNA product Design i-3 (hSL-A100) comprising derived and/or modified sequence from MOPV/LASV reassortant(IGS-1;Clade IV)__AFY05578__SP-HsALB_NP(2-569) (opt1)
aggagaaagcuuaccaugaagugggugaccuucaucagccugcucuuccuguucuccagcgccuacuccagcgccuccaaggagaucaagagcuuccuguggacccagucccuccgccgggagcugagcggcuacugcuccaacaucaagcuccagguggucaaggacgcccaggcgcugcugcacgggcuggacuucagcgagguguccaacgugcagcgccucaugcggaaggagcgccgggacgacaacgaccugaagcgccugcgggaccucaaccaggccgucaacaaccugguggagcucaagagcacccagcagaaguccauccugcgcgugggcacccugaccagcgacgaccugcucauccuggccgccgaccuggagaagcuccgguccaaggucauccgcaccgagcggccccugagcgccgggguguacaugggcaaccuguccagccagcagcucgaccagcgccgggcgcugcugaacaugaucgggauguccggcggcaaccagggggcccgcgccggccgggacggggugguccgcgugugggacgugaagaacgccgagcuccugagcaaccaguucggcaccaugccgucccugacgcucgcgugccugaccaagcaggggcaggucgaccugaacgacgccgugcaggcccucaccgaccugggccugaucuacaccgccaaguaccccaacacgagcgaccucgaccggcugacccagucccaccccauccugaacaugaucgacaccaagaaguccagccucaacaucuccggcuacaacuucagccugggggccgcggugaaggccggcgccugcaugcuggacgggggcaacaugcucgagaccaucaaggucagcccccagacgauggacggcauccucaagagcauccugaaggugaagaaggcccuggggauguucaucuccgacaccccgggcgagcgcaaccccuacgagaacauccuguacaagaucugccugagcggggacggcuggcccuacaucgccucccggaccagcaucaccgggcgcgcgugggagaacacgguggucgaccucgaguccgacggcaagccccagaaggccgacagcaacaacuccagcaagucccugcagagcgccggcuucaccgccgggcugaccuacucccagcucaugacccugaaggacgccaugcugcagcuggacccgaacgcgaagacguggauggacaucgagggccggcccgaggaccccguggagaucgcccucuaccagcccagcuccgggugcuacauccacuucuuccgcgagccgaccgaccugaagcaguucaagcaggacgccaaguacagccacggcaucgacgugaccgaccuguucgccacccagcccgggcucacguccgccgucaucgacgcgcugccccgcaacauggugaucacgugccagggcagcgacgacauccggaagcugcucgagagccagggccgcaaggacaucaagcugaucgacaucgaccuguccaagaccgacagccggaaguacgagaacgccgugugggaccaguacaaggaccucugccacaugcacaccggggucguggucgagaagaagaagcgcggcgggaaggaggagaucaccccgcacugcgcccugauggacugcaucauguucgacgccgcgguguccggcgggcugaacaccagcgugcuccgggccguccugccccgcgacaugguguuccggaccuccacgccccgcgugguccugugaggacuaguuauaagacugacuagcccgaugggccucccaacgggcccuccuccccuccuugcaccgagauuaaucaaaggcucuuuucagagccaccaaaaaaaaaaaaaaaaaaaaaaaaaaaaaaaaaaaaaaaaaaaaaaaaaaaaaaaaaaaaaaaaaaaaaaaaaaaaaaaaaaaaaaaaaaaaaaaaaaaaa

SEQ ID NO: 20514 - RNA, 1974 nt, Artificial Sequence
  mRNA product Design i-3 (hSL-A100) comprising derived and/or modified sequence from LASV(LM765-SLE-2012;Clade IV)__AIT17815__SP-HsALB_NP(2-569) (opt1)
aggagaaagcuuaccaugaagugggugaccuucaucagccugcucuuccuguucuccagcgccuacuccagcgccuccaaggagaucaagagcuuccuguggacccagucccuccgccgggagcugagcggcuacugcuccaacaucaagcuccagguggucaaggacgcccaggcgcugcugcacgggcuggacuucagcgagguguccaacgugcagcgccucaugcggaaggagcgccgggacgacaacgaccugaagcgccugcgggaccucaaccaggccgucaacaaccugguggagcucaagagcacccagcagaaguccauccugcgcgugggcacccugaccagcgacgaccugcucauccuggccgccgaccuggagaagcucaaguccaaggucacccggaccgagcgcccccugagcgccgggguguacaugggcaaccuguccagccagcagcucgaccagcggcgcgcgcugcuggacaugaucgggauguccggcagcaaccagggcgcccgggccgggcgcgacggcgugguccgggugugggacgugaagaacgccgagcuccugaacaaccaguucgggacgaugccgucccugacccucgcgugccugaccaagcagggccaggucgaccugaacgacgccgugcaggcccucaccgaccuggggcugaucuacacggccaaguaccccaacaccagcgaccucgaccgccugacccagucccaccccauccugaacaugaucgacaccaagaaguccagccucaacaucuccggcuacaacuucagccugggcgccgcggugaaggccggggccugcaugcuggacggcgggaacaugcucgagacgaucaaggucagcccccagaccauggacggcauccucaagagcauccugaaggugaagaaggcccugggcauguucaucuccgacgccccgggggagcggaaccccuacgagaacauccuguacaagaucugccugagcggcgacggguggcccuacaucgcgucccgcaccagcaucaccggccgggccugggagaacacgguggucgaccucgaguccgacgggaagccccagaaggccggcagcaacggcuccaacaagagccugcaguccgccggguucaccgccggccugaccuacagccagcucaugacccugaaggacgcgaugcugcagcuggacccgaacgccaagacguggauggacaucgaggggcgccccgaggaccccguggagaucgcccucuaccagcccuccagcggcugcuacauccacuucuuccgggagccgaccgaccugaagcaguucaagcaggacgccaaguacucccacgggaucgacgugaccgaccuguucgccgcgcagcccggccucaccagcgccgucaucgacgcccugccccgcaacauggugaucacgugccagggcuccgacgacauccgcaagcuguucgagagccaggggcggaaggacaucaagcucaucgacaucgcccugagcaagaccgacucccgcaaguacgagaacgcggugugggaccaguacaaggaccugugccacaugcacaccggcaucgucguggagaagaagaagcgcgggggcaaggaggagaucacgccccacugcgcccucauggacugcaucauguucgacgccgccgucagcgggggccugaacaccuccgugcugcgggccgugcucccgcgggacauggucuuccgcaccagcacgccccggguggugcugugaggacuaguuauaagacugacuagcccgaugggccucccaacgggcccuccuccccuccuugcaccgagauuaaucaaaggcucuuuucagagccaccaaaaaaaaaaaaaaaaaaaaaaaaaaaaaaaaaaaaaaaaaaaaaaaaaaaaaaaaaaaaaaaaaaaaaaaaaaaaaaaaaaaaaaaaaaaaaaaaaaaaa

SEQ ID NO: 20515 - RNA, 1974 nt, Artificial Sequence
  mRNA product Design i-3 (hSL-A100) comprising derived and/or modified sequence from LASV(LM776-SLE-2012;Clade IV)__AIT17825__SP-HsALB_NP(2-569) (opt1)
aggagaaagcuuaccaugaagugggugaccuucaucagccugcucuuccuguucuccagcgccuacuccagcgccuccaaggagaucaagagcuuccuguggacccagucccuccgccgggagcugagcuccuacugcagcaacaucaagcuccagguggucaaggacgcccaggcgcugcugcacggccuggacuucuccgaggugagcaacgugcagcgccucaugcggaaggagcgccgggacgacaacgaccugaagcgccugcgggaccucaaccaggccgucaacaaccugguggagcugaaguccacccagcagaaguccauccuccgcguggggacccugaccuccgacgaccugcucauccuggccgccgaccuggagaagcucaagagcaaggucacccggaccgagcgcccccuguccgccggcguguacauggggaaccugagcucccagcagcucgaccagcggcgcgcgcugcugagcaugaucggcauguccgggagcaaccagggcgcccgggccggccgcgacggggugguccgggugugggacgugaagaacgccgagcuccugaacaaccaguucggcacgaugccgucccugacccucgcgugccugaccaagcaggggcaggucgaccugaacgacgccgugcaggcccucaccgaccugggccugaucuacacggccaaguaccccaacaccagcgaccucgaccgccugacccagagccaccccauccugaacaugaucgacaccaagaaguccagccucaacaucuccggguacaacuucagccugggcgccgcggugaaggccggcgccugcaugcuggacgggggcaacaugcucgagacgaucaaggucagcccccagaccauggacgggauccucaagagcauccugaaggugaagaaggcccugggcauguucaucuccgacaccccgggcgagcggaaccccuacgagaacauccuguacaagaucugccugagcggggacggcuggcccuacaucgccucccgcaccagcaucacggggcgggcgugggagaacaccguggucgaccucgaguccgacggcaagccccagaaggccgggagcaacaacuccaacaagagccugcaguccgccggcuucaccgccggccugaccuacagccagcucaugacgcugaaggacgccaugcugcagcuggacccgaacgcgaagaccuggauggacaucgaggggcgccccgaggaccccguggagguggcccucuaccagcccuccagcggcugcuacauccacuucuuccgggagccgaccgaccugaagcaguucaagcaggacgccaaguacucccacgggaucgacgucaccgaccuguucgccgcccagcccggccucacgagcgcggugaucgacgcccugccccgcaacauggugaucacgugccaggggagcgacgacauccgcaagcugcucgagucccagggccggaaggacaucaagcugaucgacaucgcccugagcaagaccgacucccgcaaguacgagaacgccgucugggaccaguacaaggaccucugccacaugcacaccggcguggucguggagaagaagaagcgcgggggcaaggaggagaucaccccgcacugcgcgcugauggacugcaucauguucgacgccgccgugagcgggggccugaacaccuccguccuccgggccgugcugccccgggacaugguguuccgcaccagcacgccccgggucgugcugugaggacuaguuauaagacugacuagcccgaugggccucccaacgggcccuccuccccuccuugcaccgagauuaaucaaaggcucuuuucagagccaccaaaaaaaaaaaaaaaaaaaaaaaaaaaaaaaaaaaaaaaaaaaaaaaaaaaaaaaaaaaaaaaaaaaaaaaaaaaaaaaaaaaaaaaaaaaaaaaaaaaaa

SEQ ID NO: 20516 - RNA, 1974 nt, Artificial Sequence
  mRNA product Design i-3 (hSL-A100) comprising derived and/or modified sequence from LASV(Mad39;Clade IV)__ANH09723__SP-HsALB_NP(2-569) (opt1)
aggagaaagcuuaccaugaagugggugaccuucaucagccugcucuuccuguucuccagcgccuacuccagcgccuccaaggagaucaagagcuuccuguggacccagucccuccgccgggagcugagcggcuacugcuccaacaucaagcuccagguggucaaggacgcccaggcgcugcugcacgggcuggacuucagcgagguguccaacgugcagcgccucaugcggaagcagcgccgggacgacaacgaccugaagcgccugcgggaccucaaccaggccgucaacaaccugguggagcugaaguccacccagcagaaguccgugcuccgcgucggcacgcugaccagcgacgaccugcucacccuggccgccgaccuggagaagcucaaguccaaggugacccggacggagcgcccccugaccgccgggguguacaugggcaaccugagcucccagcagcucgaccagcggcgcgcgcugcugaacaugaucgggaugagcggcggcaaccagggggcccggaccggccgcgacggggucgugcgggugugggacgucaagaacgccgagcuccugaacaaccaguucggcaccaugccgucccugacgcucgccugccugaccaagcagggccagguggaccugaacgacgugguccaggcgcucaccgaccuggggcugaucuacaccgccaaguaccccaacacgagcgaccucgaccgccugacccagucccaccccauccugaacaugaucgacaccaacaagagcucccucaacaucagcggcuacaacuucagccugggggccgccgugaaggccggcgcgugcaugcuggacgggggcaacaugcucgagaccaucaaggugagcccccagacgauggacggcauccucaagagcauccugaaggucaagaagucccuggggauguucaucagcgacaccccgggcgagcggaaccccuacgagaacauccuguacaagaucugccuguccggggacggcuggcccuacaucgccagccgcaccuccaucaccgggcgggccugggagaacacggugguggaccucgagagcggcggcaagccccagaaggccggguccaacaacagcaacaagucccugcagagcgccggcuucgcggccgggcugaccuacucccagcucaugacccugaaggacgccaugcugcagcuggacccgaacgccaagaccuggauggacaucgagggccgccccgaggaccccgucgagaucgcccucuaccagcccaucagcgggugcuacauccacuucuuccgggagccgacggaccugaagcaguucaagcaggacgcgaaguacucccacggcaucgacgugaccgaccuguucgccgcccagcccggccucaccagcgccgugaucgaggcccugccccgcaacauggucaucacgugccagggguccgacgacauccgcaagcuguucgagagccagggccggaaggacaucaagcucaucgacaucgcgcuguccaagaccgacagccgcaaguacgagaacgccgugugggaccaguacaaggaccugugccacaugcacaccggggucgugguggagaagaagaagaagggcgggaaggaggagaucacgccccacugcgcccucauggacugcaucauguucgacgccgcggucagcggcggccugaacacccuggugcuccgggccgugcugccgcgcgacauggucuuccggaccuccacccccaagguggugcugugaggacuaguuauaagacugacuagcccgaugggccucccaacgggcccuccuccccuccuugcaccgagauuaaucaaaggcucuuuucagagccaccaaaaaaaaaaaaaaaaaaaaaaaaaaaaaaaaaaaaaaaaaaaaaaaaaaaaaaaaaaaaaaaaaaaaaaaaaaaaaaaaaaaaaaaaaaaaaaaaaaaaa

SEQ ID NO: 20517 - RNA, 1974 nt, Artificial Sequence
  mRNA product Design i-3 (hSL-A100) comprising derived and/or modified sequence from LASV(Z0947-SLE-2011;Clade IV)__AIT17841__SP-HsALB_NP(2-569) (opt1)
aggagaaagcuuaccaugaagugggugaccuucaucagccugcucuuccuguucuccagcgccuacuccagcgccuccaaggagaucaagagcuuccuguggacccagucccuccgccgggagcugagcggcuacugcuccaacaucaagcuccagguggucaaggacgcccaggcgcugcugcacgggcuggacuucagcgagguguccaacgugcagcgccucaugcggaaggagcgccgggacgacaacgaccugaagcgccugcgggaccucaaccaggccgucaacaaccugguggagcucaagagcacccagcagaaguccauccugcgcgugggcacccugaccagcgacgaccugcucauccuggccgccgaccuggagaagcucaaguccaaggucacccggaccgagcgcccccugagcgccgggguguacaugggcaaccuguccagccagcagcucgaccagcggcgcgcgcugcugaacaugaucgggauguccggcagcaaccagggcgcccggacggggcgcgacggcgugguccgggugugggacgugaagaacgccgagcuccugaacaaccaguucgggaccaugccgucccugacccucgccugccugaccaagcagggccaggucgaccugaacgacgcggugcaggcccucacggaccuggggcugaucuacaccgccaaguaccccaacaccagcgaccucgaccgccugacccagucccaccccauccugaacaugaucgacacgaagaaguccagccucaacaucuccggcuacaacuucagccugggcgccgccgugaaggcgggggccugcaugcuggacggcgggaacaugcucgagaccaucaaggucagcccccagaccauggacggcauccucaagagcauccugaaggugaagaaggcccugggcauguucaucuccgacgccccgggggagcggaaccccuacgagaacauccuguacaagaucugccugagcggcgacggguggcccuacaucgccucccgcaccagcaucacgggccgggcgugggagaacaccguggucgaccucgaguccgacgggaagccccagaaggccggcagcaacggcuccaacaagagccugcaguccgccggguucaccgccggccugaccuacagccagcucaugacgcugaaggacgccaugcugcagcuggacccgaacgcgaagaccuggauggacaucgaggggcgccccgaggaccccguggagaucgcccucuaccagcccuccagcggcugcuacauccacuucuuccgggagccgaccgaccugaagcaguucaagcaggacgccaaguacucccacgggaucgacgugaccgaccuguucgccgcccagcccggccucacgagcgcggucaucgacgcccugccccgcaacauggugaucacgugccagggcuccgacgacauccgcaagcuguucgagagccaggggcggaaggacaucaagcucaucgacaucgcccugagcaagaccgacucccgcaaguacgagaacgccgugugggaccaguacaaggaccugugccacaugcacaccggcaucgucguggagaagaagaagcgcgggggcaaggaggagaucaccccgcacugcgcgcucauggacugcaucauguucgacgccgccgucagcgggggccugaacaccuccgugcugcgggccgugcucccccgggacauggucuuccgcaccagcacgccccggguggugcugugaggacuaguuauaagacugacuagcccgaugggccucccaacgggcccuccuccccuccuugcaccgagauuaaucaaaggcucuuuucagagccaccaaaaaaaaaaaaaaaaaaaaaaaaaaaaaaaaaaaaaaaaaaaaaaaaaaaaaaaaaaaaaaaaaaaaaaaaaaaaaaaaaaaaaaaaaaaaaaaaaaaaa

SEQ ID NO: 20518 - RNA, 1974 nt, Artificial Sequence
  mRNA product Design i-3 (hSL-A100) comprising derived and/or modified sequence from LASV(Josiah;Clade IV)__NP_694869__SP-HsALB_NP(2-569) (opt4)
aggagaaagcuuaccaugaagugggugaccuucaucagccugcuguuccuguucagcagcgccuacagcagcgccagcaaggagaucaagagcuuccuguggacccagagccugagaagagagcugagcggcuacugcagcaacaucaagcugcagguggugaaggacgcccaggcccugcugcacggccuggacuucagcgaggugagcaacgugcagagacugaugagaaaggagagaagagacgacaacgaccugaagagacugagagaccugaaccaggccgugaacaaccugguggagcugaagagcacccagcagaagagcauccugagagugggcacccugaccagcgacgaccugcugauccuggccgccgaccuggagaagcugaagagcaaggugaucagaaccgagagaccccugagcgccggcguguacaugggcaaccugagcagccagcagcuggaccagagaagagcccugcugaacaugaucggcaugagcggcggcaaccagggcgccagagccggcagagacggcguggugagagugugggacgugaagaacgccgagcugcugaacaaccaguucggcaccaugcccagccugacccuggccugccugaccaagcagggccagguggaccugaacgacgccgugcaggcccugaccgaccugggccugaucuacaccgccaaguaccccaacaccagcgaccuggacagacugacccagagccaccccauccugaacaugaucgacaccaagaagagcagccugaacaucagcggcuacaacuucagccugggcgccgccgugaaggccggcgccugcaugcuggacggcggcaacaugcuggagaccaucaaggugagcccccagaccauggacggcauccugaagagcauccugaaggugaagaaggcccugggcauguucaucagcgacacccccggcgagagaaaccccuacgagaacauccuguacaagaucugccugagcggcgacggcuggcccuacaucgccagcagaaccagcaucaccggcagagccugggagaacaccgugguggaccuggagagcgacggcaagccccagaaggccgacagcaacaacagcagcaagagccugcagagcgccggcuucaccgccggccugaccuacagccagcugaugacccugaaggacgccaugcugcagcuggaccccaacgccaagaccuggauggacaucgagggcagacccgaggaccccguggagaucgcccuguaccagcccagcagcggcugcuacauccacuucuucagagagcccaccgaccugaagcaguucaagcaggacgccaaguacagccacggcaucgacgugaccgaccuguucgccacccagcccggccugaccagcgccgugaucgacgcccugcccagaaacauggugaucaccugccagggcagcgacgacaucagaaagcugcuggagagccagggcagaaaggacaucaagcugaucgacaucgcccugagcaagaccgacagcagaaaguacgagaacgccgugugggaccaguacaaggaccugugccacaugcacaccggcguggugguggagaagaagaagagaggcggcaaggaggagaucaccccccacugcgcccugauggacugcaucauguucgacgccgccgugagcggcggccugaacaccagcgugcugagagccgugcugcccagagacaugguguucagaaccagcacccccagaguggugcugugaggacuaguuauaagacugacuagcccgaugggccucccaacgggcccuccuccccuccuugcaccgagauuaaucaaaggcucuuuucagagccaccaaaaaaaaaaaaaaaaaaaaaaaaaaaaaaaaaaaaaaaaaaaaaaaaaaaaaaaaaaaaaaaaaaaaaaaaaaaaaaaaaaaaaaaaaaaaaaaaaaaaa

SEQ ID NO: 20519 - RNA, 1974 nt, Artificial Sequence
  mRNA product Design i-3 (hSL-A100) comprising derived and/or modified sequence from LASV(LP;Clade I)__AAF86702__SP-HsALB_NP(2-569) (opt4)
aggagaaagcuuaccaugaagugggugaccuucaucagccugcuguuccuguucagcagcgccuacagcagcaacagcaaggagaucaagagcuuccuguggacccagagccugagaagagagcugagcggcuacugcagcaacaucaagcugcagguggugaaggacgcccaggcccugcugcacggccuggacuucagcgaggugagcaacgugcagagacugaugagaaagcagaagagagacgacgccgaccugaagagacugagagaccugaaccaggccgugaacaaccugguggagcugaagagcacccagcagaagaacgugcugagagugggcacccugagcagcgacgaccugaucacccuggccgccgaccuggagaagcugaagagcaaggugaucagaaccgagagaccccugagcagcggcguguacaugggcaaccugagcagccagcagcuggaccagagaagagcccugcugagcaugaucggcaugagcggcggcccccagggcaacagaaccggcggcgacggcguggugagagugugggacgugaagaacgccgagcugcugaacaaccaguucggcaccaugcccagccugacccuggccugccugaccaagcagggccagguggaccugaacgacgccgugcaggcccugaccgaccugggccugaucuacaccgccaaguaccccaacagcagcgaccuggacaugcugacccagagccaccccauccugggcaugguggacaccaagaagagcagccugaacaucagcggcuacaacuucagccugggcgccgccgugaaggccggcgccugcaugcuggacggcggcaacaugcuggagaccaucaaggugagcccccagaccauggacggcauccugaagagcauccugaaggugaagagaagccugggcauguucaucagcgacacccccggcgagagaaaccccuacgagaacauccuguacaagaucugccugagcggcgagggcuggcccuacaucgccagcagaaccagcaucaccggcagagccugggagaacacccugguggaccuggagagcgacaacaagccccccaagcugaacagcgccggcagcaacaagagccugcaggccgccggccugaacgccggccugaccuacagccagcugaugacccugaaggacugcaugcugcagcuggaccccagcagcaagaccuggaucgacaucgagggcagacccgaggaccccguggagaucgcccuguuccagcccagcagcggcugcuacauccacuucuucagagagcccaccgaccugaagcaguucaagcaggacgccaaguacagccacggcaucgacgugaccgaccuguucagcacccagcccggccugaccagcgccgugaucgaggcccugcccagaaacauggugcugaccugccagggcagcgacgacaucaagaagcugcuggagagccagggcagaagagacaucaagcugaucgacaucagccugagcaaggccgacagcagaaaguucgagaacgccgugugggaccaguacaaggaccugugccacaugcacaccggcguggugguggagaagaagaagagaggcggcaaggaggagaucaccccccacugcgcccugcuggacugcaucauguucgacgccgccaccaccggcagccugaacaucaccacccugagagccgugcugcccagagacaugguguucagaaccagcacccccaagguggugcugugaggacuaguuauaagacugacuagcccgaugggccucccaacgggcccuccuccccuccuugcaccgagauuaaucaaaggcucuuuucagagccaccaaaaaaaaaaaaaaaaaaaaaaaaaaaaaaaaaaaaaaaaaaaaaaaaaaaaaaaaaaaaaaaaaaaaaaaaaaaaaaaaaaaaaaaaaaaaaaaaaaaaa

SEQ ID NO: 20520 - RNA, 1974 nt, Artificial Sequence
  mRNA product Design i-3 (hSL-A100) comprising derived and/or modified sequence from LASV(803213;Clade II)__AAF86704__SP-HsALB_NP(2-569) (opt4)
aggagaaagcuuaccaugaagugggugaccuucaucagccugcuguuccuguucagcagcgccuacagcagcgccagcaaggaggugaagagcuuccuguggacccagagccugagaagagagcugagcggcuacugcagcaacaucaagcugcagguggugaaggacgcccaggcccugcugcacggccuggacuucagcgaggugaacaacgugcagagacugaugagaaagcagaagagagacgacggcgaccugaagagacugagagaccugaaccaggccgugaacaaccugguggagcugaagagcacccagcagaagagcauccugagagugggcacccugaccagcgacgaccugcugacccuggccgccgaccuggagaagcugaagagcaaggugaucagaaccgagagaccccugagcagcggcguguacaugggcaaccugagcacccagcagcuggagcagagaagagcccugcugaacaugaucggcauggugggcggcgcccagggcacccagcccggcagagacggcguggugagagugugggacgugaagaaccccgaccugcugaacaaccaguucggcaccaugcccagccugacccuggccugccugaccaagcagggccagguggaccugaacgacgccgugcuggcccugaccgaccugggccugaucuacaccgccaaguaccccaacagcagcgaccuggacagacugagccagagccaccccauccugaacaugguggacaccaagaagagcagccugaacaucagcggcuacaacuucagccugggcgccgccgugaaggccggcgccugcaugcuggacggcggcaacaugcuggagaccaucaaggugaccccccagaccauggacggcauccugaagagcauccugaaggugaagagaagccugggcauguucgugagcgacacccccggcgagagaaaccccuacgagaacauccuguacaagaucugccugagcggcgacggcuggcccuacaucgccagcagaaccagcaucgugggcagagccugggagaacaccaccguggaccuggagagcgacggcaagccccagaaggugggcaccgccggcagcaacaagagccugcagagcgccggcuuccccaccggccugaccuacagccagcugaugacccugaaggacagcaugaugcagcuggaccccagcgccaagaccuggaucgacaucgagggcagacccgaggaccccguggagaucgcccuguaccagcccaugagcggcugcuacauccacuucuucagagagcccaccgaccugaagcaguucaagcaggacgccaaguacagccacggcaucgacguggccgaccuguuccccgcccagcccggccugaccagcgccgugaucgaggcccugcccagaaacauggugcugaccugccagggcagcgacgacaucaagaagcugcuggacagccagggcagaagagacaucaagcugaucgacaucagccugagcaagguggacagcagaaaguucgagaacgccgugugggaccagugcaaggaccugugccacaugcacaccggcguggugguggagaagaagaagagaggcggcaaggaggagaucaccccccacugcgcccugauggacugcaucauguucgacgccgccgugagcggcggccugaacauccccgugcugagagccgugcugcccagagacaugguguucagaaccagcagccccaagguggugcugugaggacuaguuauaagacugacuagcccgaugggccucccaacgggcccuccuccccuccuugcaccgagauuaaucaaaggcucuuuucagagccaccaaaaaaaaaaaaaaaaaaaaaaaaaaaaaaaaaaaaaaaaaaaaaaaaaaaaaaaaaaaaaaaaaaaaaaaaaaaaaaaaaaaaaaaaaaaaaaaaaaaaa

SEQ ID NO: 20521 - RNA, 1977 nt, Artificial Sequence
  mRNA product Design i-3 (hSL-A100) comprising derived and/or modified sequence from LASV(GA391;Clade III)__CAA36646__SP-HsALB_NP(2-570) (opt4)
aggagaaagcuuaccaugaagugggugaccuucaucagccugcuguuccuguucagcagcgccuacagcagcgccagcaaggaggugagaagcuuccuguggacccagagccugagaagagagcugagcggcuacugcagcaacaucaagcugcagguggugaaggacgcccaggcccugcugcacggccuggacuucagcgaggugagcaacgugcagagacugaugagaaagcagaagagagacgacggcgaccugaagagacugagagaccugaaccaggccgugaacaaccugguggagcugaagagcacccagcagaagagcgugcugagagugggcacccugagcagcgacgaccugcugauccuggccgccgaccuggagaagcugaagagcaaggugaccagaaccgagagaccccugagcagcggcguguacaugggcaaccugagcagccagcagcuggaccagagaagagcccugcugaacaugaucggcaugaccggcgugagcggcggcggcaagggcgccagcgacggcaucgugagagugugggacgugaagaacgccgagcugcugaacaaccaguucggcaccaugcccagccugacccuggccugccugaccaagcagggccagguggaccugaacgacgccgugcaggcccugaccgaccugggccugaucuacaccgccaaguaccccaacagcagcgaccuggacagacugagccagagccaccccauccugaacaugaucgacaccaagaagagcagccugaacaucagcggcuacaacuucagccugggcgccgccgugaaggccggcgccugcaugcuggacggcggcaacaugcuggagaccaucaaggugagcccccagaccauggacggcauccugaagagcauccugaaggugaagaagagccugggcauguucgugagcgacacccccggcgagagaaaccccuacgagaacauccuguacaagaucugccugagcggcgacggcuggcccuacaucgccagcagaaccagcaucgugggcagagccugggagaacaccgugguggaccuggagcaggacaacaagccccagaagaucggcaacggcggcagcaacaagagccugcagagcgccggcuucgccgccggccugaccuacagccagcugaugacccugaaggacuucaagugcuucaaccugauccccaacgccaagaccuggauggacaucgagggcagacccgaggaccccguggagaucgcccuguaccagcccagcagcggcugcuacgugcacuucuucagagagcccaccgaccugaagcaguucaagcaggacgccaaguacagccacggcaucgacgugaccgaccuguucgccgcccagcccggccugaccagcgccgugaucgaggcccugcccagaaacauggugaucaccugccagggcagcgaggacaucagaaagcugcuggagagccagggcagaagagacaucaagcugaucgacaucacccugagcaaggccgacagcagaaaguucgagaacgccgugugggaccaguucaaggaccugugccacaugcacaccggcguggugguggagaagaagaagagaggcggcaaggaggagaucaccccccacugcgcccugauggacugcaucauguucgacgccgccgugagcggcggccuggacgccaaggugcugagaguggugcugcccagagacaugguguucagaaccagcacccccaagguggugcugugaggacuaguuauaagacugacuagcccgaugggccucccaacgggcccuccuccccuccuugcaccgagauuaaucaaaggcucuuuucagagccaccaaaaaaaaaaaaaaaaaaaaaaaaaaaaaaaaaaaaaaaaaaaaaaaaaaaaaaaaaaaaaaaaaaaaaaaaaaaaaaaaaaaaaaaaaaaaaaaaaaaaa

SEQ ID NO: 20522 - RNA, 1974 nt, Artificial Sequence
  mRNA product Design i-3 (hSL-A100) comprising derived and/or modified sequence from LASV(AV;Clade V)__CCA30315__SP-HsALB_NP(2-569) (opt4)
aggagaaagcuuaccaugaagugggugaccuucaucagccugcuguuccuguucagcagcgccuacagcagcgccagcaaggaggugaagagcuuccuguggacccagagccugagaagagagcugagcggcuacugcagcaacaucaagcugcagguggugaaggacgcccaggcccugcugcacggccuggacuucagcgaggugagcaacgugcagagacugaugagaaagcagagaagagacgacagcgaccugaagagacugagagaccugaaccaggccgugaacaaccugguggagcugaagagcacccagcagaagagcgugcugagagugggcacccugagcagcgacgaccugcugacccuggccgccgaccuggagaagcugaagagcaaggugaccagaaccgagagaccccugagcagcggcguguacaugggcaaccugagcagccagcagcuggaccagagaagagcccugcugaaccugaucggcaugaccaacggcagccagggcagccaggccggcagagacggcguggugagagugugggacgugaagaacgccgagcugcugaacaaccaguucggcaccaugcccagccugacccuggccugccugaccaagcagggccagguggaccugaacgacguggugcaggcccugaccgaccugggccugaucuacaccgccaaguaccccaacaccagcgaccuggacagacugacccagagccaccccauccugaacaugaucgacaccaagaagagcagccugaacaucagcggcuacaacuucagccugggcgccgccgugaaggccggcgccugcaugcuggacggcggcaacaugcuggagaccaucaaggugagcccccagagcauggacggcauccugaagagcauccugaaggugaagagagcccugggcauguucgugagcgacacccccggcgagagaaaccccuacgagaacauccuguacaagaucugccugagcggcgacggcuggcccuacaucgccagcagaaccagcaucgugggcagagccugggagaacaccgugguggaccuggagaccgacggcaagccccagaagaucggcagcggcaacagcaacaagagccugcagagcgccggcuucagcgccggccugaccuacagccagcugaugacccugaaggacgccaugcugcagcuggaccccaacgccaagaccuggauggacaucgagggcagacccgaggaccccguggagguggcccuguaccagcccaucagcggcugcuacauccacuucuucagagagcccaccgaccugaagcaguucaagcaggacgccaaguacagccacggcaucgacaucgccgaccuguucgccgcccagcccggccugaccagcgccgugaucgaggcccugcccagaaacauggugaucaccugccagggcagcgaggacaucaagaagcugcuggagagccagggcagaaaggacaucaagcugaucgacaucgcccugagcaagaucgacagcagaaaguucgagaacgccgugugggaccaguacaaggaccugugccacaugcacaccggcguggugguggagaagaagaagagaggcggcaaggaggagaucaccccccacugcgcccugauggacugcaucauguucgacgccgccgugagcggcggccugaacacccuggugcugagagccgugcugcccagagacaugguguucagaaccagcacccccagaguggugcugugaggacuaguuauaagacugacuagcccgaugggccucccaacgggcccuccuccccuccuugcaccgagauuaaucaaaggcucuuuucagagccaccaaaaaaaaaaaaaaaaaaaaaaaaaaaaaaaaaaaaaaaaaaaaaaaaaaaaaaaaaaaaaaaaaaaaaaaaaaaaaaaaaaaaaaaaaaaaaaaaaaaaa

SEQ ID NO: 20523 - RNA, 1974 nt, Artificial Sequence
  mRNA product Design i-3 (hSL-A100) comprising derived and/or modified sequence from LASV(Togo/2016/7082;Clade VI)__AMR44578__SP-HsALB_NP(2-569) (opt4)
aggagaaagcuuaccaugaagugggugaccuucaucagccugcuguuccuguucagcagcgccuacagcagcaacagcaaggaggugaagagcuuccuguggacccagagccugagaagagagcugagcggcuacugcagcaacaucaagcugcagguggugaaggacgcccaggcccugcugcacggccuggacuucagcgaggugagcaacgugcagagacugaugagaaagcagaagagagacgacggcgaccugaagagacugagagaccugaaccaggccgugaacaaccugguggagcugaagagcgugcagcagaagagcauccugagagugggcacccugaccagcgacgaccugcugacccuggccgccgaccuggagaagcugaagagcaaggugaccagaaccgagagaccccugagcagcggcguguacaugggcaaccugagcagccagcagcuggaccagagaagagcccugcugagcaugaucggcaugagcggcggcaaccagaacagccagcccaagggcgacggcguggugagagugugggacgugaagaacgccgaccugcugaacaaccaguucggcaccaugcccagccugacccuggccugccugaccaagcagggccagguggaccugaacgacgccgugcaggcccugaccgaccugggccugaucuacaccgccaaguaccccaacagcagcgaccuggacagacugagccagagccaccccauccugaacaugaucgacaccaagaagagcagccugaacaucagcggcuacaacuucagccugggcgccgccaucaagaccggcgccugcaugcuggacggcggcaacaugcuggagaccaucaaggugaccccccagaccauggacggcauccugaagagcauccugaaggugaagagaagccugggcauguucaucagcgacacccccggcgagagaaaccccuacgagaacauccuguacaagaucugccugagcggcgacggcuggcccuacaucgccagcagaaccgccaucaucggcagagccugggagaacaccgugguggaccuggagagcgacagcaagccccagaagaucggcagcaacggcagcaacaagagccugcagagcgccggcuucgcccccggccugaccuacagccagcugaugacccugaaggacagcaugcugcagcuggaccccaacgccaagaccuggaucgacaucgagggcagacccgaggaccccguggagguggcccuguuccagcccaucagcggcugcuacauccacuucuucagagagcccaccgaccugaagcaguucaagcaggacgccaaguacagccacggcaucgacgugaccgaccuguucgccgcccagcccggccugaccagcgccgugaucgaggcccugcccagaaacauggugcugaccugccagggcagcgacgacaucaagaagcugcuggacagccagggcagaagagacaucaagcugaucgacgugagccugaacaagaucgacagcagaaaguucgagaacgccgugugggaccaguacaaggaccugugccacaugcacaccggcguggugguggagaagaagaagaagggcggcaaggaggagaucaccccccacugcgcccugcuggacugcaucauguucgacgccgccgugagcggcggccugaacgccaccgugcugagagccgugcugcccagagacaugguguucagaaccagcagccccaagguggugcugugaggacuaguuauaagacugacuagcccgaugggccucccaacgggcccuccuccccuccuugcaccgagauuaaucaaaggcucuuuucagagccaccaaaaaaaaaaaaaaaaaaaaaaaaaaaaaaaaaaaaaaaaaaaaaaaaaaaaaaaaaaaaaaaaaaaaaaaaaaaaaaaaaaaaaaaaaaaaaaaaaaaaa

SEQ ID NO: 20524 - RNA, 1974 nt, Artificial Sequence
  mRNA product Design i-3 (hSL-A100) comprising derived and/or modified sequence from LASV(KAK-428;Clade n.d. (VII))__ANH09741__SP-HsALB_NP(2-569) (opt4)
aggagaaagcuuaccaugaagugggugaccuucaucagccugcuguuccuguucagcagcgccuacagcagcaacagcaaggaggugaagagcuuccuguggacccagagccugagaagagagcugagcggcuacugcaccaacaucaagcugcagguggugaaggacgcccaggcccugcugcacggccuggacuucagcgaggugagcaacgugcagagacugaugagaaagcagaagagagacgacaacgaccugaagagacugagagaccugaaccaggccgugaacaaccugguggagcugaagagcgugcagcagaagagcgugcugaaggugggcacccugaacagcgacgaccugcugacccuggccgccgaccuggagaagcugaagagcaagguggugagaaccgagagaccccugagcagcggcguguacaugggcaaccugagcagccagcagcuggaccagagaagagcccugcugaacaugaucggcauggccggcggcagccagggcaaccagcccagcagagacggcguggugagagugugggacgugaagaacgccgaccugcugaacaaccaguucggcaccaugcccagccugacccuggccugccugaccaagcagggccagguggaccugaacgacguggugcuggcccugaccgaccugggccugaucuacaccgccaaguaccccaacagcagcgaccuggacagacugagccagaaccaccccgugcugaacaugaucgacgugaacaagagcagccugaacaucagcggcuacaacuucagccugggcgccgccgugaaggccggcgccugcaugcuggacggcggcaacaugcuggagaccaucaagaucagcccccagaccguggacggcauccugaagagcauccugaaggugaagagagcccugggcauguucgugagcgacacccccggcgagagaaaccccuacgagaacauccuguacaaggugugccugagcggcaacggcuggcccuacaucgccagcagaaccagcaucgugggcagagccugggagaacaccgugguggaccuggagagcaacaagaaccagcccaaggugggcaacaacggcagcaacaagaugcugcagagcagcggcuucgccaccggccugaccuacagccagcugaugacccugagagacagcaugcugcagcuggaccccaccgccaagaccuggaucgacaucgagggcagacccgaggaccccguggagcuggcccuguuccagcccagcagcggcugcuacauccacuucuucagagagcccaccgaccugaagcaguucaagcaggacgccaaguacagccacggcaucgacgugaacgaccuguucagcgcccagcccggccugaccagcgccgugcuggaggcccugcccagaaacauggugcugaccugccagggcagcgacgacaucagaaagcugcuggacagccaggacagaaaggacaucaagcugaucgacaucagccugagcaaggccgacgccagaaaguucgagaacgacgugugggaccaguucaaggaccugugccacaugcacaccggcaucgugguggagaagaagaagaagggcggcaagcaggagaugaccccccacugcgcccugcuggacugcaucauguucgacgccgccgugagcggcggccugaacgugcccacccugagagccgugcugcccaccgacaugguguucagaaccaucaccaccaagguggugcugugaggacuaguuauaagacugacuagcccgaugggccucccaacgggcccuccuccccuccuugcaccgagauuaaucaaaggcucuuuucagagccaccaaaaaaaaaaaaaaaaaaaaaaaaaaaaaaaaaaaaaaaaaaaaaaaaaaaaaaaaaaaaaaaaaaaaaaaaaaaaaaaaaaaaaaaaaaaaaaaaaaaaa

SEQ ID NO: 20525 - RNA, 1974 nt, Artificial Sequence; identical to SEQ ID NO: 20519
  mRNA product Design i-3 (hSL-A100) comprising derived and/or modified sequence from LASV(Pinneo-NIG-1969;Clade I)__AIT17837__SP-HsALB_NP(2-569) (opt4)

SEQ ID NO: 20526 - RNA, 1974 nt, Artificial Sequence
  mRNA product Design i-3 (hSL-A100) comprising derived and/or modified sequence from LASV(ISTH0009-NIG-2011;Clade II)__AIT17405__SP-HsALB_NP(2-569) (opt4)
aggagaaagcuuaccaugaagugggugaccuucaucagccugcuguuccuguucagcagcgccuacagcagcgugagcaaggaggugaagagcuuccuguggacccagagccugagaagagagcugagcggcuacugcagcaacaucaagcugcagguggugaaggacgcccaggcccugcugcacggccuggacuucagcgaggugagcaacgugcagagacugaugagaaagcagaagagagacgacagcgaccugaagagacugagagaccugaaccaggccgugaacaaccugguggagcugaagagcacccagcagaagagcauccugagagugggcacccugaccagcgacgaccugcugacccuggccgccgaccuggagaagcugaagagcaaggugaucagaaccgagagaccccugagcagcggcguguacaugggcaaccugagcacccagcagcuggagcagagaagagcccugcugaacaugaucggcauggugggcggcgcccagggcacccagcccggcagagacggcguggugagagugugggacgugaagaaccccgaccugcugaacaaccaguucggcaccaugcccagccugacccuggccugccugaccaagcagggccagguggaccugaacgacgccgugcuggcccugaccgaccugggccugaucuacaccgccaaguaccccaacagcagcgaccuggacagacugagccagagccaccccauccugaacaugguggacaucaagaagagcagccugaacaucagcggcuacaacuucagccugggcgccgccgugaaggccggcgccugcaugcuggacggcggcaacaugcuggagaccaucaaggugaccccccagaccauggacggcauccugaagagcauccugaaggugaagagaagccugggcauguucgugagcgacacccccggcgagagaaaccccuacgagaacauccuguacaagaucugccugagcggcgacggcuggcccuacaucgccagcagaaccagcaucgugggcagagccugggagaacaccaccguggaccuggagagcgacggcaagccccagaaggugggcagcgccggcagcaacaagagccugcagagcgccggcuuccccaccggccugaccuacagccagcugaugacccugaaggacagcaugaugcagcuggaccccagcgccaagaccuggaucgacaucgagggcagacccgaggaccccguggagaucgcccuguaccagcccaugagcggcugcuacauccacuucuucagagagcccaccgaccugaagcaguucaagcaggacgccaaguacagccacggcaucgacguggccgaccuguuccccgcccagcccggccugaccagcgccgugaucgaggcccugcccagaaacauggugcugaccugccagggcagcgacgacaucaagagacugcuggacagccagggcagaagagacaucaagcugaucgacaucgcccugagcaaggccgacagcagaagauucgagaacgccgugugggaccagugcaaggaccugugccacaugcacaccggcguggugguggagaagaagaagagaggcggcaaggaggagaucaccccccacugcgcccugauggacugcaucauguacgacgccgccgugagcggcggccugaacauccccgugcugagagccgugcugcccagagacaugguguucagaaccagcagccccaagguggugcugugaggacuaguuauaagacugacuagcccgaugggccucccaacgggcccuccuccccuccuugcaccgagauuaaucaaaggcucuuuucagagccaccaaaaaaaaaaaaaaaaaaaaaaaaaaaaaaaaaaaaaaaaaaaaaaaaaaaaaaaaaaaaaaaaaaaaaaaaaaaaaaaaaaaaaaaaaaaaaaaaaaaaa

SEQ ID NO: 20527 - RNA, 1974 nt, Artificial Sequence
  mRNA product Design i-3 (hSL-A100) comprising derived and/or modified sequence from LASV(ISTH2010-NIG-2012;Clade II)__AIT17483__SP-HsALB_NP(2-569) (opt4)
aggagaaagcuuaccaugaagugggugaccuucaucagccugcuguuccuguucagcagcgccuacagcagcgccagcaaggaggugaagagcuuccuguggacccagagccugagaagagagcugagcggcuacugcagcaacaucaagcugcagguggugaaggacgcccaggcccugcugcacggccuggacuucagcgaggugagcaacgugcagagacugaugagaaagcagaagagagacgacagcgaccugaagagacugagagaccugaaccaggccgugaacaaccugguggagcugaagagcacccagcagaagagcauccugagagugggcacccugaccagcgacgaccugcugacccuggccgccgaccuggagaagcugaagagcaaggugaucagaaccgagagaccccugagcagcggcguguacaugggcaaccugagcacccagcagcuggagcagagaagagcccugcugaaccugaucggcauggugggcggcgcccagggcacccagcccggcagagacggcguggugagagugugggacgugaagaaccccgaccugcugaacaaccaguucggcaccaugcccagccugacccuggccugccugaccaagcagggccagguggaccugaacgacgccgugcuggcccugaccgaccugggccugaucuacaccgccaaguaccccaacagcagcgaccuggacagacugagccagagccaccccauccugaacaugguggacaccaagaagagcagccugaacaucagcggcuucaacuucagccugggcgccgccgugaaggccggcgccugcaugcuggacggcggcaacaugcuggagaccaucaaggugaccccccagaccauggacggcauccugaagagcauccugaaggugaagaagagccugggcauguucgugagcgacacccccggcgagagaaaccccuacgagaacauccuguacaagaucugccugagcggcgacggcuggcccuacaucgccagcagaaccagcaucgugggcagagccugggagaacaccaccguggaccuggagagcgacggcaagccccacaaggugggcaccgccggcagcaacaagagccugcagagcgccggcuuccccaccggccugaccuacagccagcugaugacccugaaggacagcaugaugcagcuggaccccagcgccaagaccuggaucgacaucgagggcagacccgaggaccccguggagaucgcccuguaccagcccaugagcggcugcuacauccacuucuucagagagcccaccgaccugaagcaguucaagcaggacgccaaguacagccacggcaucgacguggccgaccuguuccccgcccagcccggccugaccagcgccgugaucgaggcccugcccagaaacauggugcugaccugccagggcagcgacgacaucaagagacugcuggacagccagggcagaagagacaucaagcugaucgacaucgcccugagcaaggccgacagcagaagauucgagaacgccgugugggaccagugcaaggaccugugccacaugcacaccggcguggugguggagaagaagaagagaggcggcaaggaggagaucaccccccacugcgcccugauggacugcaucauguacgacgccgccgugagcggcggccugaacauccccgugcugagagccgugcugcccagagacaugguguucagaaccagcagccccaagguggugcugugaggacuaguuauaagacugacuagcccgaugggccucccaacgggcccuccuccccuccuugcaccgagauuaaucaaaggcucuuuucagagccaccaaaaaaaaaaaaaaaaaaaaaaaaaaaaaaaaaaaaaaaaaaaaaaaaaaaaaaaaaaaaaaaaaaaaaaaaaaaaaaaaaaaaaaaaaaaaaaaaaaaaa

SEQ ID NO: 20528 - RNA, 1974 nt, Artificial Sequence
  mRNA product Design i-3 (hSL-A100) comprising derived and/or modified sequence from LASV(Lassa virus/H.sapiens-wt/NGA/2015/ISTH_0543;Clade II)__AVO03640__SP-HsALB_NP(2-569) (opt4)
aggagaaagcuuaccaugaagugggugaccuucaucagccugcuguuccuguucagcagcgccuacagcagcgccagcaaggaggugaagagcuuccuguggacccagagccugagaagagagcugagcggcuacugcagcaacaucaagcugcagguggugaaggacgcccaggcccugcugcacggccuggacuucagcgaggugagcaacgugcagagacugaugagaaagcagaagagagacgacagcgaccugaagagacugagagaccugaaccaggccgugaacaaccugguggagcugaagagcacccagcagaagagcauccugagagugggcacccugaccagcgacgaccugcugacccuggccgccgaccuggagaagcugaagagcaaggugaucagaaccgagagaccccugagcagcggcguguacaugggcaaccugagcacccagcagcuggagcagagaagagcccugcugaacaugaucggcauggugggcggcgcccagggcacccagcccggcagagacggcguggugagagugugggacgugaagaaccccgaccugcugaacaaccaguucggcaccaugcccagccugacccuggccugccugaccaagcagggccagguggaccugaacgacgccgugcuggcccugaccgaccugggccugaucuacaccgccaaguaccccaacagcagcgaccuggacagacugagccagagccaccccauccugaacaugguggacaccaagaagagcagccugaacaucagcggcuacaacuucagccugggcgccgccgugaaggccggcgccugcaugcuggacggcggcaacaugcuggagaccaucaaggugaccccccagaccauggacggcauccugaagagcauccugaaggugaagaagagccugggcauguucgugagcgacacccccggcgagagaaaccccuacgagaacauccuguacaagaucugccugagcggcgacggcuggcccuacaucgccagcagaaccagcaucgugggcagagccugggagaacaccaccguggaccuggagagcgacggcaagccccagaaggugggcagcgccggcagcaacaagagccugcagagcgccggcuuccccaccggccugaccuacagccagcugaugacccugaaggacagcaugaugcagcuggaccccagcgccaagaccuggaucgacaucgagggcagacccgaggaccccguggagaucgcccuguaccagcccaugagcggcugcuacauccacuucuucagagagcccaccgaccugaagcaguucaagcaggacgccaaguacagccacggcaucgacguggccgaccuguuccccgcccagcccggccugaccagcgccgugaucgaggcccugcccagaaacauggugcugaccugccagggcagcgacgacaucaagagacugcuggacagccagggcagaaaggacaucaagcugaucgacaucgcccugagcaaggccgacagcagaagauucgagaacgccgugugggaccagugcaaggaccugugccacaugcacaccggcguggugguggagaagaagaagagaggcggcaaggaggagaucaccccccacugcgcccugauggacugcaucauguacgacgccgccgugagcggcggccugaacauccccgugcugagagccgugcugcccagagacaugguguucagaaccagcagccccaagguggugcugugaggacuaguuauaagacugacuagcccgaugggccucccaacgggcccuccuccccuccuugcaccgagauuaaucaaaggcucuuuucagagccaccaaaaaaaaaaaaaaaaaaaaaaaaaaaaaaaaaaaaaaaaaaaaaaaaaaaaaaaaaaaaaaaaaaaaaaaaaaaaaaaaaaaaaaaaaaaaaaaaaaaaa

SEQ ID NO: 20529 - RNA, 1974 nt, Artificial Sequence
  mRNA product Design i-3 (hSL-A100) comprising derived and/or modified sequence from LASV(Lassa virus/H.sapiens-wt/NGA/2016/ISTH_0009;Clade II)__AVO03572__SP-HsALB_NP(2-569) (opt4)
aggagaaagcuuaccaugaagugggugaccuucaucagccugcuguuccuguucagcagcgccuacagcagcgccagcaaggaggugaagagcuuccuguggacccagagccugagaagagagcugagcggcuacugcagcaacaucaagcugcagguggugaaggacgcccaggcccugcugcacggccuggacuucagcgaggugagcaacgugcagagacugaugagaaagcagaagagagacgacagcgaccugaagagacugagagaccugaaccaggccgugaacaaccugguggagcugaagagcacccagcagaagagcauccugagagugggcacccugaccagcgacgaccugcugacccuggccgccgaccuggagaagcugaagagcaaggugaucagaaccgagagaccccugagcagcggcguguacaugggcaaccugagcacccagcagcuggagcagagaagagcccugcugaacaugaucggcauggugggcggcgcccagggcacccagcccggcagagacggcguggugagagugugggacgugaagaaccccgaccugcugaacaaccaguucggcaccaugcccagccugacccuggccugccugaccaagcagggccagguggaccugaacgacgccgugcuggcccugaccgaccugggccugaucuacaccgccaaguaccccaacagcagcgaccuggacagacugagccagagccaccccauccugaacaugguggacaccaagaagagcagccugaacaucagcggcuacaacuucagccugggcgccgccgugaaggccggcgccugcaugcuggacggcggcaacaugcuggagaccaucaaggugaccccccagaccauggacggcauccugaagagcauccugaaggugaagaagagccugggcauguucgugagcgacacccccggcgagagaaaccccuacgagaacauccuguacaagaucugccugagcggcgacggcuggcccuacaucgccagcagaaccagcaucgugggcagagccugggagaacaccaccguggaccuggagagcgacggcaagccccagaaggugggcagcgccggcagcaacaagagccugcagagcgccggcuuccccaccggccugaccuacagccagcugaugacccugaaggacagcaugaugcagcuggaccccagcgccaagaccuggaucgacaucgagggcagacccgaggaccccguggagaucgcccuguaccagcccaugagcggcugcuacauccacuucuucagagagcccaccgaccugaagcaguucaagcaggacgccaaguacagccacggcaucgacguggccgaccuguuccccgcccagcccggccugaccagcgccgugaucgaggcccugcccagaaacauggugcugaccugccagggcagcgacgacaucaagagacugcuggacagccagggcagaagagacaucaagcugaucgacaucgcccugagcaaggccgacagcagaagauucgagaacgccgugugggaccagugcaaggaccugugccacaugcacaccggcguggugguggagaagaagaagagaggcggcaaggaggagaucaccccccacugcgcccugauggacugcaucauguacgacgccgccgugagcggcggccugaacauccccgugcugagagccgugcugcccagagacaugguguucagaaccagcagccccaagguggugcugugaggacuaguuauaagacugacuagcccgaugggccucccaacgggcccuccuccccuccuugcaccgagauuaaucaaaggcucuuuucagagccaccaaaaaaaaaaaaaaaaaaaaaaaaaaaaaaaaaaaaaaaaaaaaaaaaaaaaaaaaaaaaaaaaaaaaaaaaaaaaaaaaaaaaaaaaaaaaaaaaaaaaa

SEQ ID NO: 20530 - RNA, 1974 nt, Artificial Sequence
  mRNA product Design i-3 (hSL-A100) comprising derived and/or modified sequence from LASV(Lassa virus/H.sapiens-wt/NGA/2016/ISTH_0017;Clade II)__AVO03568__SP-HsALB_NP(2-569) (opt4)
aggagaaagcuuaccaugaagugggugaccuucaucagccugcuguuccuguucagcagcgccuacagcagcgccagcaaggaggugaagagcuuccuguggacccagagccugagaagagagcugagcggcuacugcagcagcaucaagcugcagguggugaaggacgcccaggcccugcugcacggccuggacuucagcgaggugagcaacgugcagagacugaugagaaagcagaagagagacgacagcgaccugaagagacugagagaccugaaccaggccgugaacaaccugguggagcugaagagcacccagcagaagagcauccugagagugggcacccugaccagcgacgaccugcugacccuggccgccgaccuggagaagcugaagagcaaggugaucagaaccgagagaccccugagcagcggcguguacaugggcaaccugagcacccagcagcuggagcagagaagagcccugcugaacaugaucggcauggccggcggcgcccagggcacccagcccggcagagacggcguggugagagugugggacgugaagaaccccgaccugcugaacaaccaguucggcaccaugcccagccugacccuggccugccugaccaagcagggccagguggaccugaacgacgccgugcuggcccugaccgaccugggccugaucuacaccgccaaguaccccaacagcagcgaccuggacagacugagccagagccaccccauccugaacaugguggacaccaagaagagcagccugaacaucagcggcuacaacuucagccugggcgccgccgugaaggccggcgccugcaugcuggacggcggcaacaugcuggagaccaucaaggugaccccccagaccauggacggcauccugaagagcauccugaaggugaagagaagccugggcauguucgugagcgacgcccccggcgagagaaaccccuacgagaacauccuguacaagaucugccugagcggcgacggcuggcccuacaucgccagcagaaccagcaucgugggcagagccugggagaacaccaccguggaccuggagagcgacggcaagccccagaaggugggcgccaccggcagcaacaagagccugcagagcgccggcuuccccaccggccugaccuacagccagcugaugacccugaaggacagcaugaugcagcuggaccccagcgccaagaccuggaucgacaucgagggcagacccgaggaccccguggagguggcccuguaccagcccgugagcggcugcuacauccacuucuucagagagcccaccgaccugaagcaguucaagcaggacgccaaguacagccacggcaucgacguggccgaccuguuccccgcccagcccggccugaccagcgccgugaucgaggcccugcccagaaacauggugcugaccugccagggcagcgacgacaucaagaagcugcuggacagccagggcagaaaggacaucaagcugaucgacaucgcccugagcaaggccgacagcagaagauucgagaacgccgugugggaccagugcaaggaccugugccacaugcacaccggcguggugguggagaagaagaagagaggcggcaaggaggagaucaccccccacugcgcccugauggacugcaucauguacgacgccgccgugagcggcggccugaacauccccgugcugagagccgugcugcccagagacaugguguucagaaccagcagccccaagguggugcugugaggacuaguuauaagacugacuagcccgaugggccucccaacgggcccuccuccccuccuugcaccgagauuaaucaaaggcucuuuucagagccaccaaaaaaaaaaaaaaaaaaaaaaaaaaaaaaaaaaaaaaaaaaaaaaaaaaaaaaaaaaaaaaaaaaaaaaaaaaaaaaaaaaaaaaaaaaaaaaaaaaaaa

SEQ ID NO: 20531 - RNA, 1974 nt, Artificial Sequence
  mRNA product Design i-3 (hSL-A100) comprising derived and/or modified sequence from LASV(Lassa virus/H.sapiens-wt/NGA/2018/ISTH_0959;Clade II)__AVV65100__SP-HsALB_NP(2-569) (opt4)
aggagaaagcuuaccaugaagugggugaccuucaucagccugcuguuccuguucagcagcgccuacagcagcgccagcaaggaggugaagagcuuccuguggacccagagccugagaagagagcugagcggcuacugcagcaacaucaagcugcagguggugaaggacgcccaggcccugcugcacggccuggacuucagcgaggugagcaacgugcagagacugaugagaaagcagaagagagacgacagcgaccugaagagacugagagaccugaaccaggccgugaacaaccugguggagcugaagagcacccagcagaagagcauccugagagugggcacccugaccagcgacgaccugcugacccuggccgccgaccuggagaagcugaagagcaaggugaucagaaccgagagaccccugagcagcggcguguacaugggcaaccugagcacccagcagcuggagcagagaagagcccugcugaaccugaucggcauggugggcggcgcccagggcacccagcccggcagagacggcguggugagagugugggacgugaagaaccccgaccugcugaacaaccaguucggcaccaugcccagccugacccuggccugccugaccaagcagggccagguggaccugaacgacguggugcuggcccugaccgaccugggccugaucuacaccgccaaguaccccaacagcagcgaccuggacagacugagccagagccaccccauccugaacaugguggacaccaagaagagcagccugaacaucagcggcuucaacuucagccugggcgccgccgugaaggccggcgccugcaugcuggacggcggcaacaugcuggagaccaucaaggugaccccccagaccauggacggcauccugaagagcauccugaaggugaagaagagccugggcauguucgugagcgacacccccggcgagagaaaccccuacgagaacauccuguacaagaucugccugagcggcgacggcuggcccuacaucgccagcagaaccagcaucgugggcagagccugggagaacaccaccguggaccuggagagcgacggcaagccccacaaggugggcaccgccggcagcaacaagagccugcagagcgccggcuuccccaccggccugaccuacagccagcugaugacccugaaggacagcaugaugcagcuggaccccagcgccaagaccuggaucgacaucgagggcagacccgaggaccccguggagaucgcccuguaccagcccaugagcggcugcuacauccacuucuucagagagcccaccgaccugaagcaguucaagcaggacgccaaguacagccacggcaucgacguggccgaccuguuccccgcccagcccggccugaccagcgccgugaucgaggcccugcccagaaacauggugcugaccugccagggcagcgacgacaucaagagacugcuggacagccagggcagaaaggacaucaagcugaucgacaucgcccugagcaagaccgacagcagaagauucgagaacgccgugugggaccagugcaaggaccugugccacaugcacaccggcguggugguggagaagaagaagagaggcggcaaggaggagaucaccccccacugcgcccugauggacugcaucauguacgacgccgccgugagcggcggccugaacauccccgugcugagagccgugcugcccagagacaugguguucagaaccagcagccccaagguggugcugugaggacuaguuauaagacugacuagcccgaugggccucccaacgggcccuccuccccuccuugcaccgagauuaaucaaaggcucuuuucagagccaccaaaaaaaaaaaaaaaaaaaaaaaaaaaaaaaaaaaaaaaaaaaaaaaaaaaaaaaaaaaaaaaaaaaaaaaaaaaaaaaaaaaaaaaaaaaaaaaaaaaaa

SEQ ID NO: 20532 - RNA, 1974 nt, Artificial Sequence
  mRNA product Design i-3 (hSL-A100) comprising derived and/or modified sequence from LASV(LASV003-NIG-2008;Clade II)__AIT17581__SP-HsALB_NP(2-569) (opt4)
aggagaaagcuuaccaugaagugggugaccuucaucagccugcuguuccuguucagcagcgccuacagcagcgccagcaaggaggugaagagcuuccuguggacccagagccugagaagagagcugagcggcuacugcagcagcaucaagcugcagguggugaaggacgcccaggcccugcugcacggccuggacuucagcgaggugagcaacgugcagagacugaugagaaagcagaagagagacgacagcgaccugaagagacugagagaccugaaccaggccgugaacaaccugguggagcugaagagcacccagcagaagagcgugcugagagugggcacccugaccagcgacgaccugcugacccuggccgccgaccuggagaagcugaagagcaaggugaucagaaccgagagaccccugagcagcggcguguacaugggcaaccugagcgcccagcagcuggagcagagaagaacccugcugaacaugaucggcauggugggcggcgcccagggcacccagcccggcagagacggcguggugagagugugggacgugaagaaccccgaccugcugaacaaccaguucggcaccaugcccagccugacccuggccugccugaccaagcagggccagguggaccugaacgacguggugcuggcccugaccgaccugggccugaucuacaccgccaaguaccccaacagcagcgaccuggacagacugagccagagccaccccauccugagcaugguggacaccaagaagagcagccugaacaucagcggcuacaacuucagccugggcgccgccgugaaggccggcgccugcaugcuggacggcggcaacaugcuggagaccaucaaggugaccccccagaccauggacggcauccugaagagcauccugaaggugaagaagagccugggcauguucgugagcgacacccccggcgagagaaaccccuacgagaacauccuguacaagaucugccugagcggcgacggcuggcccuacaucgccagcagaaccagcaucgugggcagagccugggagaacaccaccguggaccuggagagcgacggcaagccccagaaggugggcaccgccggcagcaacaagagccugcagagcgccggcuuccccaccggccugaccuacagccagcugaugacccugaaggacagcaugaugcagcuggaccccagcgccaagaccuggaucgacaucgagggcagacccgaggaccccguggagaucgcccuguaccagcccaugagcggcugcuacauccacuucuucagagagcccaccgaccugaagcaguucaagcaggacgccaaguacagccacggcaucgacgugaccgaccuguuccccgcccagcccggccugaccagcgccgugaucgaggcccugcccagaaacauggugcugaccugccagggcagcgacgacaucaagagacugcuggacagccagggcagaagagacaucaagcugaucgacaucgcccugagcaaggccgacagcagaagauucgagaacgccgugugggaccagugcaaggaccugugccacaugcacaccggcguggugguggagaagaagaagagaggcggcaaggaggagaucaccccccacugcgcccugauggacugcaucauguacgacgccgccgugagcggcggccugaacauccccgugcugagagccgugcugcccagagacaugguguucagaaccagcagccccaagguggugcugugaggacuaguuauaagacugacuagcccgaugggccucccaacgggcccuccuccccuccuugcaccgagauuaaucaaaggcucuuuucagagccaccaaaaaaaaaaaaaaaaaaaaaaaaaaaaaaaaaaaaaaaaaaaaaaaaaaaaaaaaaaaaaaaaaaaaaaaaaaaaaaaaaaaaaaaaaaaaaaaaaaaaa

SEQ ID NO: 20533 - RNA, 1974 nt, Artificial Sequence
  mRNA product Design i-3 (hSL-A100) comprising derived and/or modified sequence from LASV(LASV035-NIG-2009;Clade II)__AIT17589__SP-HsALB_NP(2-569) (opt4)
aggagaaagcuuaccaugaagugggugaccuucaucagccugcuguuccuguucagcagcgccuacagcagcgccagcaaggaggugaagagcuuccuguggacccagagccugagaagagagcugagcggcuacugcagcagcaucaagcugcagguggugaaggacgcccaggcccugcugcacggccuggacuucagcgaggugagcaacgugcagagacugaugagaaagcagaagagagacgacagcgaccugaagagacugagagaccugaaccaggccgugaacaaccugguggagcugaagagcacccagcagaagagcauccugagagugggcacccugaccagcgacgaccugcugacccuggccgccgaccuggagaagcugaagagcaaggugaucagaaccgagagaccccugagcagcggcguguacaugggcaaccugagcgcccagcagcuggagcagagaagagcccugcugaacaugaucggcauggugggcggcgcccagggcacccagcccggcagagacggcguggugagagugugggacgugaagaaccccgaccugcugaacaaccaguucggcaccaugcccagccugacccuggccugccugaccaagcagggccagguggaccugaacgacgccgugcuggcccugaccgaccugggccugaucuacaccgccaaguaccccaacagcagcgaccuggacagacugagccagagccaccccauccugaacaugguggacaccaagaagagcagccugaacaucagcggcuacaacuucagccugggcgccgccgugaaggccggcgccugcaugcuggacggcggcaacaugcuggagaccaucaaggugaccccccagaccauggacggcauccugaagagcauccugaaggugaagagaagccugggcauguucgugagcgacacccccggcgagagaaaccccuacgagaacauccuguacaagaucugccugagcggcgacggcuggcccuacaucgccagcagaaccagcaucgugggcagagccugggagaacaccaccguggaccuggagagcgacggcaagccccagaaggugggcaccaccggcagcaacaagagccugcagagcgccggcuuccccaccggccugaccuacagccagcugaugacccugaaggacagcaugaugcagcuggaccccagcgccaagaccuggaucgacaucgagggcagacccgaggaccccguggagaucgcccuguaccagcccaugagcggcugcuacauccacuucuucagagagcccaccgaccugaagcaguucaagcaggacgccaaguacagccacggcaucgacguggccgaccuguuccccgcccagcccggccugaccagcgccgugaucgaggcccugcccagaaacauggugcugaccugccagggcagcgacgacaucaagaagcugcuggacagccagggcagaagagacaucaagcugaucgacaucgcccugagcaaggccgacagcagaaaguucgagaacgccgugugggaccagugcaaggaccugugccacaugcacaccggcguggugguggagaagaagaagagaggcggcaaggaggagaucaccccccacugcgcccugauggacugcaucauguacgacgccgccgugagcggcggccugaacauccccgugcugagagccgugcugcccagagacaugguguucagaaccagcagccccaagguggugcugugaggacuaguuauaagacugacuagcccgaugggccucccaacgggcccuccuccccuccuugcaccgagauuaaucaaaggcucuuuucagagccaccaaaaaaaaaaaaaaaaaaaaaaaaaaaaaaaaaaaaaaaaaaaaaaaaaaaaaaaaaaaaaaaaaaaaaaaaaaaaaaaaaaaaaaaaaaaaaaaaaaaaa

SEQ ID NO: 20534 - RNA, 1974 nt, Artificial Sequence
  mRNA product Design i-3 (hSL-A100) comprising derived and/or modified sequence from LASV(LASV1000-NIG-2009;Clade II)__AIT17783__SP-HsALB_NP(2-569) (opt4)
aggagaaagcuuaccaugaagugggugaccuucaucagccugcuguuccuguucagcagcgccuacagcagcgccagcaaggaggugaagagcuuccuguggacccagagccugagaagagagcugagcggcuacugcagcaacaucaagcugcagguggugaaggacgcccaggcccugcugcacggccuggacuucagcgaggugagcaacgugcagagacugaugagaaagcagaagagagacgacagcgaccugaagagacugagagaccugaaccaggccgugaacaaccugguggagcugaagagcacccagcagaagagcauccugagagugggcacccugaccagcgacgaccugcugacccuggccgccgaccuggagaagcugaagagcaaggugaucagaaccgagagaccccugagcagcggcguguacaugggcaaccugagcacccagcagcuggagcagagaagagcccugcugaacaugaucggcauggugggcggcgcccagggcacccagcccggcagagacggcguggugagagugugggacgugaagaaccccgaccugcugaacaaccaguucggcaccaugcccagccugacccuggccugccugaccaagcagggccagguggaccugaacgacguggugcuggcccugaccgaccugggccugaucuacaccgccaaguaccccaacagcagcgaccuggacagacugagccagagccaccccauccugaacaugguggacaccaagaagagcagccugaacaucagcggcuacaacuucagccugggcgccgccgugaaggccggcgccugcaugcuggacggcggcaacaugcuggagaccaucaaggugaccccccagaccauggacggcauccugaagagcauccugaaggugaagaagagccugggcauguucgugagcgacacccccggcgagagaaaccccuacgagaacauccuguacaagaucugccugagcggcgacggcuggcccuacaucgccagcagaaccagcaucgugggcagagccugggagaacaccaccguggaccuggagagcgacggcaagccccagaaggugggcaccgccggcagcaacaagagccugcagagcgccggcuuccccaccggccugaccuacagccagcugaugacccugaaggacagcaugaugcagcuggaccccagcgccaagaccuggaucgacaucgagggcagacccgaggaccccguggagaucgcccuguaccagcccgugagcggcugcuacauccacuucuucagagagcccaccgaccugaagcaguucaagcaggacgccaaguacagccacggcaucgacguggccgaccuguuccccgcccagcccggccugaccagcgccgugaucgaggcccugcccagaaacauggugcugaccugccagggcagcgacgacaucaagagacugcuggacagccagggcagaagagacaucaagcugaucgacaucgcccugagcaaggccgacagcagaagauucgagaacgccgugugggaccagugcaaggaccugugccacaugcacaccggcguggugguggagaagaagaagagaggcggcaaggaggagaucaccccccacugcgcccugauggacugcaucauguacgacgccgccgugagcggcggccugaacauccccgugcugagagccgugcugcccagagacaugguguucagaaccagcagccccaagguggugcugugaggacuaguuauaagacugacuagcccgaugggccucccaacgggcccuccuccccuccuugcaccgagauuaaucaaaggcucuuuucagagccaccaaaaaaaaaaaaaaaaaaaaaaaaaaaaaaaaaaaaaaaaaaaaaaaaaaaaaaaaaaaaaaaaaaaaaaaaaaaaaaaaaaaaaaaaaaaaaaaaaaaaa

SEQ ID NO: 20535 - RNA, 1974 nt, Artificial Sequence
  mRNA product Design i-3 (hSL-A100) comprising derived and/or modified sequence from LASV(LASV221-NIG-2010;Clade II)__AIT17625__SP-HsALB_NP(2-569) (opt4)
aggagaaagcuuaccaugaagugggugaccuucaucagccugcuguuccuguucagcagcgccuacagcagcgccagcaaggaggugaagagcuuccuguggacccagagccugagaagagagcugagcggcuacugcagcagcaucaagcugcagguggugaaggacgcccaggcccugcugcacggccuggacuucagcgaggugagcaacgugcagagacugaugagaaagcagagaagagacgacagcgaccugaagagacugagagaccugaaccaggccgugaacaaccugguggagcugaagagcacccagcagaagagcauccugagagugggcacccugaccagcgacgaccugcugacccuggccgccgaccuggagaagcugaagagcaaggugaucagaaccgagagaccccugagcagcggcguguacaugggcaaccugagcacccagcagcuggagcagagaagagcccugcugaacaugaucggcauggugggcggcgcccagggcacccagcccggcagagacggcguggugagagugugggacgugaagaaccccgaccugcugaacaaccaguucggcaccaugcccagccugacccuggccugccugaccaagcagggccagguggaccugaacgacgccgugcuggcccugaccgaccugggccugaucuacaccgccaaguaccccaacagcagcgaccuggacagacugagccagagccaccccauccugaacaugguggacaccaagaagagcagccugaacaucagcggcuacaacuucagccugggcgccgccgugaaggccggcgccugcaugcuggacggcggcaacaugcuggagaccaucaaggugaccccccagaccguggacggcauccugaagagcauccugaaggugaagagaagccugggcauguucgugagcgacacccccggcgagagaaaccccuacgagaacauccuguacaagaucugccugagcggcgacggcuggcccuacaucgccagcagaaccagcaucgugggcagagccugggagaacaccaccguggaccuggagagcgacggcaagccccagaaggugggcaccgccggcagcaacaagagccugcagagcgccggcuuccccaccggccugaccuacagccagcugaugacccugaaggacagcaugaugcagcuggaccccagcgccaagaccuggaucgacaucgagggcagacccgaggaccccguggagaucgcccuguaccagcccaugagcggcugcuacauccacuucuucagagagcccaccgaccugaagcaguucaagcaggacgccaaguacagccacggcaucgacguggccgaccuguuccccgcccagcccggccugaccagcgccgugaucgaggcccugcccagaaacauggugcugaccugccagggcagcgacgacaucaagagacugcuggacagccagggcagaagagacaucaagcugaucgacaucgcccugagcaaggccgacagcagaaaguucgagaacgccgugugggaccagugcaaggaccugugccacaugcacaccggcguggugguggagaagaagaagagaggcggcaaggaggagaucaccccccacugcgcccugauggacugcaucauguacgacgccgccgugagcggcggccugaacauccccgugcugagagccgugcugcccagagacaugguguucagaaccagcagccccaagguggugcugugaggacuaguuauaagacugacuagcccgaugggccucccaacgggcccuccuccccuccuugcaccgagauuaaucaaaggcucuuuucagagccaccaaaaaaaaaaaaaaaaaaaaaaaaaaaaaaaaaaaaaaaaaaaaaaaaaaaaaaaaaaaaaaaaaaaaaaaaaaaaaaaaaaaaaaaaaaaaaaaaaaaaa

SEQ ID NO: 20536 - RNA, 1974 nt, Artificial Sequence
  mRNA product Design i-3 (hSL-A100) comprising derived and/or modified sequence from LASV(LASV237-NIG-2010;Clade II)__AIT17639__SP-HsALB_NP(2-569) (opt4)
aggagaaagcuuaccaugaagugggugaccuucaucagccugcuguuccuguucagcagcgccuacagcagcgccagcaaggaggugaagagcuuccuguggacccagagccugagaagagagcugagcggcuacugcagcaacaucaagcugcagguggugaaggacgcccaggcccugcugcacggccuggacuucagcgaggugagcaacgugcagagacugaugagaaagcagaagagagacgacagcgaccugaagagacugagagaccugaaccaggccgugaacaaccugguggagcugaagagcacccagcagaagagcauccugagagugggcacccugaccagcgacgaccugcugacccuggccgccgaccuggagaagcugaagagcaaggugaucagaaccgagagaccccugagcagcggcguguacaugggcaaccugagcacccagcagcuggagcagagaagagcccugcugaacaugaucggcauggugggcggcgcccagggcacccagcccggcagagacggcguggugagagugugggacgugaagaaccccgaccugcugaacaaccaguucggcaccaugcccagccugacccuggccugccugaccaagcagggccagguggaccugaacgacgccgugcuggcccugaccgaccugggccugaucuacaccgccaaguaccccaacagcagcgaccuggacagacugagccagagccaccccauccugaacaugguggacaucaagaagagcagccugaacaucagcggcuacaacuucagccugggcgccgccgugaaggccggcgccugcaugcuggacggcggcaacaugcuggagaccaucaaggugaccccccagaccauggacggcauccugaagagcauccugaaggugaagagaagccugggcauguucgugagcgacacccccggcgagagaaaccccuacgagaacauccuguacaagaucugccugagcggcgacggcuggcccuacaucgccagcagaaccagcaucgugggcagagccugggagaacaccaccguggaccuggagagcgacggcaagccccagaaggugggcagcgccggcagcaacaagagccugcagagcgccggcuuccccaccggccugaccuacagccagcugaugacccugaaggacagcaugaugcagcuggaccccagcgccaagaccuggaucgacaucgagggcagacccgaggaccccguggagaucgcccuguaccagcccaugagcggcugcuacauccacuucuucagagagcccaccgaccugaagcaguucaagcaggacgccaaguacagccacggcaucgacguggccgaccuguuccccgcccagcccggccugaccagcgccgugaucgaggcccugcccagaaacauggugcugaccugccagggcagcgacgacaucaagagacugcuggacagccagggcagaagagacaucaagcugaucgacaucgcccugagcaaggccgacagcagaagauucgagaacgccgugugggaccagugcaaggaccugugccacaugcacaccggcguggugguggagaagaagaagagaggcggcaaggaggagaucaccccccacugcgcccugauggacugcaucauguacgacgccgccgugagcggcggccugaacauccccgugcugagagccgugcugcccagagacaugguguucagaaccagcagccccaagguggugcugugaggacuaguuauaagacugacuagcccgaugggccucccaacgggcccuccuccccuccuugcaccgagauuaaucaaaggcucuuuucagagccaccaaaaaaaaaaaaaaaaaaaaaaaaaaaaaaaaaaaaaaaaaaaaaaaaaaaaaaaaaaaaaaaaaaaaaaaaaaaaaaaaaaaaaaaaaaaaaaaaaaaaa

SEQ ID NO: 20537 - RNA, 1974 nt, Artificial Sequence
  mRNA product Design i-3 (hSL-A100) comprising derived and/or modified sequence from LASV(LASV253-NIG-2011;Clade II)__AIT17671__SP-HsALB_NP(2-569) (opt4)
aggagaaagcuuaccaugaagugggugaccuucaucagccugcuguuccuguucagcagcgccuacagcagcgccagcaaggaggugaagagcuuccuguggacccagagccugagaagagagcugagcggcuacugcagcagcaucaagcugcagguggugaaggacgcccaggcccugcugcacggccuggacuucagcgaggugagcaacgugcagagacugaugagaaagcagaagagagacgacagcgaccugaagagacugagagaccugaaccaggccgugaacaaccugguggagcugaagagcacccagcagaagagcgugcugagagugggcacccugaccagcgacgaccugcugacccuggccgccgaccuggagaagcugaagagcaaggugaucagaaccgagagaccccugagcagcggcguguacaugggcaaccugagcacccagcagcuggagcagagaagagcccugcugaacaugaucggcauggugggcggcgcccagggcacccagcccggcagagacggcguggugagagugugggacgugaagaaccccgaccugcugaacaaccaguucggcaccaugcccagccugacccuggccugccugaccaagcagggccagguggaccugaacgacguggugcuggcccugaccgaccugggccugaucuacaccgccaaguaccccaacagcagcgaccuggacagacugagccagagccaccccauccugaacaugguggacaccaagaagagcagccugaacaucagcggcuacaacuucagccugggcgccgccgugaaggccggcgccugcaugcuggacggcggcaacaugcuggagaccaucaaggugaccccccagaccauggacggcauccugaagagcauccugaaggugaagaagagccugggcauguucgugagcgacacccccggcgagagaaaccccuacgagaacauccuguacaagaucugccugagcggcgacggcuggcccuacaucgccagcagaaccagcaucgugggcagagccugggagaacaccaccguggaccuggagagcgacggcaagccccagaaggugggcaccgccggcagcaacaagagccugcagagcgccggcuuccccaccggccugaccuacagccagcugaugacccugaaggacagcaugaugcagcuggaccccagcgccaagaccuggaucgacaucgagggcagacccgaggaccccguggagaucgcccuguaccagcccaugagcggcugcuacauccacuucuucagagagcccaccgaccugaagcaguucaagcaggacgccaaguacagccacggcaucgacgugaccgaccuguuccccgcccagcccggccugaccagcgccgugaucgaggcccugcccagaaacauggugcugaccugccagggcagcgacgacaucaagagacugcuggacagccagggcagaagagacaucaagcugaucgacaucgcccugagcaaggccgacagcagaagauucgagaacgccgugugggaccagugcaaggaccugugccacaugcacaccggcguggugguggagaagaagaagagaggcggcaaggaggagaucaccccccacugcgcccugauggacugcaucauguacgacgccgccgugagcggcggccugaacauccccgugcugagagccgugcugcccagagacaugguguucagaaccagcagccccaagguggugcugugaggacuaguuauaagacugacuagcccgaugggccucccaacgggcccuccuccccuccuugcaccgagauuaaucaaaggcucuuuucagagccaccaaaaaaaaaaaaaaaaaaaaaaaaaaaaaaaaaaaaaaaaaaaaaaaaaaaaaaaaaaaaaaaaaaaaaaaaaaaaaaaaaaaaaaaaaaaaaaaaaaaaa

SEQ ID NO: 20538 - RNA, 1974 nt, Artificial Sequence
  mRNA product Design i-3 (hSL-A100) comprising derived and/or modified sequence from LASV(LASV254-NIG-2011;Clade II)__AIT17675__SP-HsALB_NP(2-569) (opt4)
aggagaaagcuuaccaugaagugggugaccuucaucagccugcuguuccuguucagcagcgccuacagcagcgccagcaaggaggugaagagcuuccuguggacccagagccugagaagagagcugagcggcuacugcagcagcaucaagcugcagguggugaaggacgcccaggcccugcugcacggccuggacuucagcgaggugagcaacgugcagagacugaugagaaagcagaagagagacgacagcgaccugaagagacugagagaccugaaccaggccgugaacaaccugguggagcugaagagcacccagcagaagagcgugcugagagugggcacccugaccagcgacgaccugcugacccuggccgccgaccuggagaagcugaagagcaaggugaucagaaccgagagaccccugagcagcggcguguacaugggcaaccugagcacccagcagcuggagcagagaagagcccugcugaacaugaucggcauggugggcggcgcccagggcacccagcccggcagagacggcguggugagagugugggacgugaagaaccccgaccugcugaacaaccaguucggcaccaugcccagccugacccuggccugccugaccaagcagggccagguggaccugaacgacgccgugcuggcccugaccgaccugggccugaucuacaccgccaaguaccccaacagcagcgaccuggacagacugagccagagccaccccauccugaacaugguggacaccaagaagagcagccugaacaucagcggcuacaacuucagccugggcgccgccgugaaggccggcgccugcaugcuggacggcggcaacaugcuggagaccaucaaggugaccccccagaccauggacggcauccugaagagcauccugaaggugaagaagagccugggcauguucgugagcgacacccccggcgagagaaaccccuacgagaacauccuguacaagaucugccugagcggcgacggcuggcccuacaucgccagcagaaccagcaucgugggcagagccugggagaacaccaucguggaccuggagagcgacggcaagccccagaaggugggcaccgccggcagcaacaagagccugcagagcgccggcuuccccaccggccugaccuacagccagcugaugacccugaaggacagcaugaugcagcuggaccccagcgccaagaccuggaucgacaucgagggcagacccgaggaccccguggagaucgcccuguaccagcccaugagcggcugcuacauccacuucuucagagagcccaccgaccugaagcaguucaagcaggacgccaaguacagccacggcaucgacguggccgaccuguuccccgcccagcccggccugaccagcgccgugaucgaggcccugcccagaaacauggugcugaccugccagggcagcgacgacaucaagagacugcuggacagccagggcagaagagacaucaagcugaucgacaucgcccugagcaaggccgacagcagaagauucgagaacgccgugugggaccagugcaaggaccugugccacaugcacaccggcguggugguggagaagaagaagagaggcggcaaggaggagaucaccccccacugcgcccugauggacugcaucauguacgacgccgccgugagcggcggccugaacauccccgugcugagagccgugcugcccagagacaugguguucagaaccagcagccccaagguggugcugugaggacuaguuauaagacugacuagcccgaugggccucccaacgggcccuccuccccuccuugcaccgagauuaaucaaaggcucuuuucagagccaccaaaaaaaaaaaaaaaaaaaaaaaaaaaaaaaaaaaaaaaaaaaaaaaaaaaaaaaaaaaaaaaaaaaaaaaaaaaaaaaaaaaaaaaaaaaaaaaaaaaaa

SEQ ID NO: 20539 - RNA, 1974 nt, Artificial Sequence
  mRNA product Design i-3 (hSL-A100) comprising derived and/or modified sequence from LASV(Nig08-04;Clade II)__ADU56611__SP-HsALB_NP(2-569) (opt4)
aggagaaagcuuaccaugaagugggugaccuucaucagccugcuguuccuguucagcagcgccuacagcagcgccagcaaggaggugaagagcuuccuguggacccagagccugagaagagagcugagcggcuacugcagcaacaucaagcugcagguggugaaggacgcccaggcccugcugcacggccuggacuucagcgaggugagcaacgugcagagacugaugagaaagcagaagagagacgacggcgaccugaagagacugagagaccugaaccaggccgugaacaaccugguggagcugaagagcacccagcagaagagcgugcugagagugggcacccugaccagcgacgaccugcugacccuggccgccgaccuggagaagcugaagagcaaggugaucagaaccgagagaccccugagcagcggcguguacaugggcaaccugagcacccagcagcuggagcagagaaaggcccugcugagcaugaucggcauggugggcggcgcccagggcacccagcccggcagagacggcguggugagagugugggacgugaagaaccccgaccugcugaacaaccaguucggcaccaugcccagccugacccuggccugccugaccaagcagggccagguggaccugaacgacgccgugcuggcccugaccgaccugggccugaucuacaccgccaaguaccccaacagcagcgaccuggacagacugagccagagccaccccauccugaacaugguggacaccaagaagagcagccugaacaucagcggcuacaacuucagccugggcgccgccgugaaggccggcgccugcaugcuggacggcggcaacaugcuggagaccaucaaggugaccccccagaccauggacggcauccugaagagcauccugaaggugaagagaagccugggcauguucgugagcgacacccccggcgagagaaaccccuacgagaacauccuguacaagaucugccugagcggcgacggcuggcccuacaucgccagcagaaccagcaucgugggcagagccugggagaacaccaccguggaccuggagagcgacggcaagccccagaaggugggcaccgccggcagcaacaagagccugcagagcgccggcuuccccaccggccugaccuacagccagcugaugacccugaaggacagcaugaugcagcuggaccccagcgccaagaccuggaucgacaucgagggcagacccgaggaccccguggagaucgcccuguaccagcccaugagcggcugcuacauccacuucuucagagagcccaccgaccugaagcaguucaagcaggacgccaaguacagccacggcaucgacgugaccgaccuguucagcgcccagcccggccugaccagcgccgugaucgaggcccugcccagaaacauggugcugaccugccagggcagcgacgacaucaagaagcugcuggacagccagggcagaagagacaucaagcugaucgacaucagccugaacaaggccgacagcagaagauucgagaacgccgugugggaccagugcaaggaccugugccacaugcacaccggcguggugguggagaagaagaagagaggcggcaaggaggagaucaccccccacugcgcccugauggacugcaucauguucgacgccgccgugagcggcggccugaacauccccauccugagagccgugcugcccagagacaugguguucagaaccagcagccccaagguggugcugugaggacuaguuauaagacugacuagcccgaugggccucccaacgggcccuccuccccuccuugcaccgagauuaaucaaaggcucuuuucagagccaccaaaaaaaaaaaaaaaaaaaaaaaaaaaaaaaaaaaaaaaaaaaaaaaaaaaaaaaaaaaaaaaaaaaaaaaaaaaaaaaaaaaaaaaaaaaaaaaaaaaaa

SEQ ID NO: 20540 - RNA, 1977 nt, Artificial Sequence
  mRNA product Design i-3 (hSL-A100) comprising derived and/or modified sequence from LASV(GA391;Clade III)__AAA46284__SP-HsALB_NP(2-570) (opt4)
aggagaaagcuuaccaugaagugggugaccuucaucagccugcuguuccuguucagcagcgccuacagcagcgccagcaaggaggugagaagcugccuguggacccagagccugagaagagagcugagcggcuacugcagcaacaucaagcugcagguggugaaggacgcccaggcccugcugcacggccuggacuucagcgaggugagcaacgugcagagacugaugagaaagcagaagagagacgacggcgaccugaagagacugagagaccugaaccaggccgugaacaaccugguggagcugaagagcacccagcagaagagcgugcugagagugggcacccugagcagcgacgaccugcugauccuggccgccgaccuggagaagcugaagagcaaggugaccagaaccgagagaccccugagcagcggcguguacaugggcaaccugagcagccagcagcuggaccagagaagagcccugcugaacaugaucggcaugaccggcgugagcggcggcggcaagggcgccagcaacggcaucgugagagugugggacgugaagaacgccgagcugcugaacaaccaguucggcaccaugcccagccugacccuggccugccugaccaagcagggccagguggaccugaacgacgccgugcaggcccugaccgaccugggccugaucuacaccgccaaguaccccaacagcagcgaccuggacagacugagccagagccaccccauccugaacaugaucgacaccaagaagagcagccugaacaucagcggcuacaacuucagccugggcgccgccgugaaggccggcgccugcaugcuggacggcggcaacaugcuggagaccaucaaggugagcccccagaccauggacggcauccugaagagcauccugaaggugaagaagagccugggcauguucgugagcgacacccccggcgagagaaaccccuacgagaacauccuguacaagaucugccugagcggcgacggcuggagcuacaucgccagcagaaccagcaucgugggcagagccugggagaacaccgugguggaccuggagcaggacaacaagccccagaagaucggcaacggcggcagcaacaagagccugcagagcgccggcuucgccgccggccugaucuacagccagcugaugacccugaaggacuucaagugcuucaaccugauccccaacgccaagaccuggauggacaucgagggcagacccgaggaccccguggagaucgcccuguaccagcccagcagcggcugcuacgugcacuucuucagagagcccaccgaccugaagcaguucaagcaggacgccaaguacagccacggcagagacgugaccgaccuguucgccgcccagcccggccugaccagcgccgugaucgaggcccugcccagaaacauggugaucaccugccagggcagcgaggacaucagaaagcugcuggagagccagggcagaagagacaucaagcugaucgacaucacccugagcaaggccgacagcagaaaguucgagaacgccgugugggaccaguucaaggaccugugccacaugcacaccggcguggugguggagaagaagaagagaggcggcaaggaggagaucaccccccacugcgcccugauggacugcaucauguucgacgccgccgugagcggcggccuggacgccaaggugcugagaguggugcugcccagagacaugguguucagaaccagcacccccaagguggugcugugaggacuaguuauaagacugacuagcccgaugggccucccaacgggcccuccuccccuccuugcaccgagauuaaucaaaggcucuuuucagagccaccaaaaaaaaaaaaaaaaaaaaaaaaaaaaaaaaaaaaaaaaaaaaaaaaaaaaaaaaaaaaaaaaaaaaaaaaaaaaaaaaaaaaaaaaaaaaaaaaaaaaa

SEQ ID NO: 20541 - RNA, 1974 nt, Artificial Sequence
  mRNA product Design i-3 (hSL-A100) comprising derived and/or modified sequence from LASV(Nig08-A19;Clade III)__ADU56619__SP-HsALB_NP(2-569) (opt4)
aggagaaagcuuaccaugaagugggugaccuucaucagccugcuguuccuguucagcagcgccuacagcagcgccagcaaggaggugaagagcuuccuguggacccagagccugagaagagagcugagcggcuacugcagcaacaucaagcugcagguggugaaggacgcccaggcccugcugcacggccuggacuucagcgaggugagcaacgugcagagacugaugagaaagcagaagagagacgacggcgaccugaagagacugagagaccugaaccaggccgugaacaaccugguggagcugaagagcacccagcagaagagcgugcugagagugggcacccugagcagcgacgaccugcuggugcuggccgccgaccuggagaagcugaagagcaagguggugagaaccgagagaccccugagcagcggcaucuacaugggcaaccugagcagccagcagcuggaccagagaaaggcccugcugaacaugaucggcaugaccggcggcaacggcggcagaaacaccaccagcgacggcaucgugagagugugggacgugaagaacgccgagcugcugaacaaccaguucggcaccaugcccagccugacccuggccugccugaccaagcagggccagguggaccugaacgacgccgugcaggcccugaccgaccugggccugaucuacaccgccaaguaccccaacagcagcgaccuggacagacuggcccagagccaccccauccugaacaugaucgacaccaagaagagcagccugaacaucagcggcuacaacuucagccugggcgccgccgugaaggccggcgccugcaugcuggacggcggcaacaugcuggagaccaucaaggugagcccccagaccauggacggcauccugaagagcauccugaaggugaagagaagccugggcauguucaucagcgacacccccggcgagagaaaccccuacgagaacauccuguacaagaucugccugagcggcgacggcuggcccuacaucgccagcagaaccagcaucgugggcagagccugggagaacaccgugguggaccuggagagcgacaacaagccccagaagaccggcaacggcggcagcaacaagagccugcagagcgccggcuucgccgccggccugaccuacagccagcugaugacccugaaggacagcaugcugcagcuggaccccaacgccaagaccuggauggacaucgagggcagacccgaggaccccguggagaucgcccuguaccagcccagcagcggcugcuacauccacuucuucagagagcccaccgaccugaagcaguucaagcaggacgccaaguacagccacggcaucgacgugaccgaccuguucgccgcccagcccggccugaccagcgccgugaucgaggcccugcccagaaacauggugaucaccugccagggcagcgaggacaucagaaagcugcuggagagccagggcagaagagacaucaagcugaucgacaucagccugagcaagguggacagcagaaaguucgagaacgccgugugggaccaguucaaggaccugugccacaugcacaccggcaucgugguggagaagaagaagagaggcggcaaggaggagaucaccccccacugcgcccugauggacugcaucauguucgacgccgccgugagcggcggcguggacgccaaggugcugagagccgugcugcccagagacaugguguucagaaccagcacccccaagguggugcugugaggacuaguuauaagacugacuagcccgaugggccucccaacgggcccuccuccccuccuugcaccgagauuaaucaaaggcucuuuucagagccaccaaaaaaaaaaaaaaaaaaaaaaaaaaaaaaaaaaaaaaaaaaaaaaaaaaaaaaaaaaaaaaaaaaaaaaaaaaaaaaaaaaaaaaaaaaaaaaaaaaaaa

SEQ ID NO: 20542 - RNA, 1974 nt, Artificial Sequence
  mRNA product Design i-3 (hSL-A100) comprising derived and/or modified sequence from LASV(G1180-SLE-2010;Clade IV)__AIT17169__SP-HsALB_NP(2-569) (opt4)
aggagaaagcuuaccaugaagugggugaccuucaucagccugcuguuccuguucagcagcgccuacagcagcgccagcaaggagaucaagagcuuccuguggacccagagccugagaagagagcugagcggcuacugcagcaacaucaagcugcagguggugaaggacgcccaggcccugcugcacggccuggacuucagcgaggugagcaacgugcagagacugaugagaaaggagagaagagacgacaacgaccugaagagacugagagaccugaaccaggccgugaacaaccugguggagcugaagagcacccagcagaagagcauccugagagugggcacccugaccagcgacgaccugcugauccuggccgccgaccuggagaagcugaagagcaaggugaucagaaccgagagaccccugagcgccggcguguacaugggcaaccugagcagccagcagcuggaccagagaagagcccugcugagcaugaucggcaugagcagcggcaaccagagagcccaggccggcagagacggcguggugagagugugggacgugaagaacguggagcugcugaacaaccaguucggcaccaugcccagccugacccuggccugccugaccaagcagggccagguggaccugaacgacgccgugcaggcccugaccgaccugggccugaucuacaccgccaaguaccccaacaccagcgaccuggacagacugacccagagccaccccauccugaacaugaucgacaccaagaagagcagccugaacaucagcggcuacaacuucagccugggcgccgccgugaaggccggcgccugcaugcuggacggcggcaacaugcuggagaccaucaaggugagcccccagaccauggacggcauccugaagagcauccugaaggugaagaaggcccugggcauguucaucagcgacacccccggcgagagaaaccccuacgagaacauccuguacaagaucugccugagcggcgacggcuggcccuacaucgccagcagaaccagcaucaccggcagagccugggagaacaccgugguggaccuggagagcgacggcaagccccagaaggccggcagcaacaacagcaacaagagccugcagagcgugggcuucaccgccggccugaccuacagccagcugaugacccugaaggacgccaugcugcagcuggaccccaacgccaagaccuggauggacaucgagggcagacccgaggaccccguggagaucgcccuguaccagcccagcagcggcugcuacauccacuucuucagagagcccaccgaccugaagcaguucaagcaggacgccaaguacagccacggcaucgacgugaccgaccuguucgccgcccagcccggccugaccagcgccgugaucgacgcccugcccagaaacauggugaucaccugccagggcagcgacgacaucagaaagcugcuggagagccagggcagaaaggacaucaagcugaucgacaucgcccugagcaagaccgacagcagaaaguacgagaacgccgugugggaccaguacaaggaccugugccacaugcacaccggcguggugguggagaagaagaagagaggcggcaaggaggagaucaccccccacugcgcccugauggacugcaucauguucgacgccgccgugagcggcggccugaacaccagcgugcugagagccgugcugcccagagacaugguguucagaaccagcacccccagaguggugcugugaggacuaguuauaagacugacuagcccgaugggccucccaacgggcccuccuccccuccuugcaccgagauuaaucaaaggcucuuuucagagccaccaaaaaaaaaaaaaaaaaaaaaaaaaaaaaaaaaaaaaaaaaaaaaaaaaaaaaaaaaaaaaaaaaaaaaaaaaaaaaaaaaaaaaaaaaaaaaaaaaaaaa

SEQ ID NO: 20543 - RNA, 1974 nt, Artificial Sequence
  mRNA product Design i-3 (hSL-A100) comprising derived and/or modified sequence from LASV(G1442-SLE-2011;Clade IV)__AIT17181__SP-HsALB_NP(2-569) (opt4)
aggagaaagcuuaccaugaagugggugaccuucaucagccugcuguuccuguucagcagcgccuacagcagcgccagcaaggaggugaagagcuuccuguggacccagagccugagaagagagcugagcggcuacugcagcaacaucaagcugcagguggugaaggacgcccaggcccugcugcacggccuggacuucagcgaggugagcaacgugcagagacugaugagaaagcagagaagagacgacaacgaccugaagagacugagagaccugaaccaggccgugaacaaccugguggagcugaagagcacccagcagaagagcgugcugagagugggcacccugaccagcgacgaccugcuggugcuggccgccgaccuggagaagcugaagagcaaggugaucagaaccgagagaccccugagcgccggcguguacaugggcaaccugagcagccagcagcuggaccagagaagagcccugcugaacaugaucggcaugagcggcggcauccagggcaccagaaccggcagagacggcguggugagagugugggacgugaagaacgccgaccugcugaacaaccaguucggcaccaugcccagccugacccuggccugccugaccaagcagggccagguggaccugaacgacguggugcaggcccugaccgaccugggccugaucuacaccgccaaguaccccaacgccagcgaccuggacagacugacccagagccaccccauccugaacaugaucgacaccaagaagagcagccugaacaucagcggcuacaacuucagccugggcgccgccgugaaggccggcgccugcaugcuggacggcggcaacaugcuggagaccaucaaggugagcccccagaccauggacggcauccugaagagcauccugaaggugaagaagacccugggcauguucaucagcgacacccccggcgagagaaaccccuacgagaacauccuguacaagaucugccugagcggcgacggcuggcccuacaucgccagcagaaccagcaucaccggcagagccugggagaacaccgugguggaccuggagagcgacggcaagccccagaaggccggcagcaacaacagcaacaagagccugcagagcgccggcuucgccgccggccugaccuacagccagcugaugacccugaaggacgccaugcugcagcuggaccccaacgccaagaccuggauggacaucgagggcagacccgaggaccccguggagaucgcccuguaccagcccagcagcggcugcuacauccacuucuucagagagcccaccgaccugaagcaguucaagcaggacgccaaguacagccacggcaucgacgugaccgaccuguucgccgcccagcccggccugaccagcgccgugaucgaggcccugcccagaaacauggugaucaccugccagggcagcgacgacaucaagaagcugcuggagagccagggcagaaaggacaucaagcugaucgacaucgcccugagcaagaccgacagcagaaaguacgagaacgccgugugggaccaguacaaggaccugugccacaugcacaccggcguggugguggagaagaagaagagaggcggcaaggaggagaucaccccccacugcgcccugauggacugcaucauguucgacgccgccgugagcggcggccugaacacccuggugcugagagccgugcugcccagagacaugguguucagaaccagcacccccagaguggugcugugaggacuaguuauaagacugacuagcccgaugggccucccaacgggcccuccuccccuccuugcaccgagauuaaucaaaggcucuuuucagagccaccaaaaaaaaaaaaaaaaaaaaaaaaaaaaaaaaaaaaaaaaaaaaaaaaaaaaaaaaaaaaaaaaaaaaaaaaaaaaaaaaaaaaaaaaaaaaaaaaaaaaa

SEQ ID NO: 20544 - RNA, 1974 nt, Artificial Sequence
  mRNA product Design i-3 (hSL-A100) comprising derived and/or modified sequence from LASV(G3010-SLE-2013;Clade IV)__AIT17345__SP-HsALB_NP(2-569) (opt4)
aggagaaagcuuaccaugaagugggugaccuucaucagccugcuguuccuguucagcagcgccuacagcagcgccagcaaggagaucaagagcuuccuguggacccagagccugagaagagagcugagcggcuacugcagcaacaucaagcugcagguggugaaggacgcccaggcccugcugcacggccuggacuucagcgaggugagcaacgugcagagacugaugagaaaggagagaagagacgacaacgaccugaagagacugagagaccugaaccaggccgugaacaaccugguggagcugaagagcacccagcagaagagcauccugagagugggcacccugaccagcgacgaccugcugauccuggccgccgaccuggagaagcugaagagcaaggugaccagaaccgagagaccccugagcgccggcguguacaugggcaaccugagcagccagcagcuggaccagagaagagcccugcugagcaugaucggcaugagcagcggcgugcagggcgccagagccggcagagacggcguggugagagugugggacgugaagaacgccgagcugcugaacaaccaguucggcaccaugcccagccugacccuggccugccugaccaagcagggccagguggaccugaacgacguggugcaggcccugaccgaccugggccugaucuacaccgccaaguaccccaacaccagcgaccuggacagacugacccagagccaccccauccugaacaugaucgacaccaagaagagcagccugaacaucagcggcuacaacuucagccugggcgccgccgugaaggccggcgccugcaugcuggacggcggcaacaugcuggagaccaucaaggugagcccccagaccauggacggcauccugaagagcauccugaaggugaagaaggcccugggcauguucaucagcgagacccccggcgagagaaaccccuacgagaacauccuguacaagaucugccugagcggcgacggcuggcccuacaucgccagcagaaccagcaucaccggcagagccugggagaacaccgugguggaccuggagagcgacggcaagccccagaaggccggcagcaacaacagcaacaagagccugcagagcgccggcuucaccgccggccugaccuacagccagcugaugacccugaaggacgccaugcugcagcuggaccccaacgccaagaccuggauggacaucgagggcagacccgaggaccccguggagguggcccuguaccagcccagcagcggcugcuacauccacuucuucagagagcccaccgaccugaagcaguucaagcaggacgccaaguacagccacggcaucgacgugaccgaccuguucgccgcccagcccggccugaccagcgccgugaucgacgcccugcccagaaacauggugaucaccugccagggcagcgacgacaucaagaagcugcuggagagccagggcagaaaggacaucaagcugaucgacaucgcccugagcaagaccgacagcagaaaguacgagaacgccgugugggaccaguacaaggaccugugccacaugcacaccggcguggugguggagaagaagaagagaggcggcaaggaggagaucaccccccacugcgcccugauggacugcaucauguucgacgccgccgugagcggcggccugaacaccagcgugcugagagccgugcugcccagagacaugguguucagaaccagcacccccagaguggugcugugaggacuaguuauaagacugacuagcccgaugggccucccaacgggcccuccuccccuccuugcaccgagauuaaucaaaggcucuuuucagagccaccaaaaaaaaaaaaaaaaaaaaaaaaaaaaaaaaaaaaaaaaaaaaaaaaaaaaaaaaaaaaaaaaaaaaaaaaaaaaaaaaaaaaaaaaaaaaaaaaaaaaa

SEQ ID NO: 20545 - RNA, 1974 nt, Artificial Sequence
  mRNA product Design i-3 (hSL-A100) comprising derived and/or modified sequence from LASV(G502-SLE-2009;Clade IV)__AIT17127__SP-HsALB_NP(2-569) (opt4)
aggagaaagcuuaccaugaagugggugaccuucaucagccugcuguuccuguucagcagcgccuacagcagcgccagcaaggagaucaagagcuuccuguggacccagagccugagaagagagcugagcggcuacugcagcaacaucaagcugcagguggugaaggacgcccaggcccugcugcacggccuggacuucagcgaggugagcaacgugcagagacugaugagaaaggagagaagagacgacaacgaccugaagagacugagagaccugaaccaggccgugaacaaccugguggagcugaagagcacccagcagaagagcauccugagagugggcacccugaccagcgacgaccugcugauccuggccgccgaccuggagaagcugaagagcaaggugaucagaaccgagagaccccugagcgccggcguguacaugggcaaccugagcagccagcagcuggaccagagaagagcccugcugagcaugaucggcaugagcggcggcaaccagggcgugagagccggcaaggacggcguggugagagugugggacgugaagaacgccgagcugcugaacaaccaguucggcaccaugcccagccugacccuggccugccugaccaagcagggccagguggaccugaacgacgccgugcaggcccugaccgaccugggccugaucuacaccgccaaguaccccaacaccagcgaccuggacagacugacccagagccaccccauccugaacaugaucgacaccaagaagagcagccugaacaucagcggcuacaacuucagccugggcgccgccgugaaggccggcgccugcaugcuggacggcggcaacaugcuggagaccaucaaggugagcccccagaccauggacggcauccugaagagcauccugaaggugaagaaggcccugggcauguucaucagcgacacccccggcgagagaaaccccuacgagaacauccuguacaagaucugccugagcggcgacggcuggcccuacaucgccagcagaaccagcaucaccggcagagccugggagaacaccgugguggaccuggagagcgacggcaagccccagaaggccggcagcaacaacagcaacaagagccugcagagcgccggcuucaccgccggccugaccuacagccagcugaugacccugaaggacgccaugcugcagcuggaccccaacaccaagaccuggauggacaucgagggcagacccgaggaccccguggagaucgcccuguaccagcccagcagcggcugcuacauccacuucuucagagagcccaccgaccugaagcaguucaagcaggacgccaaguacagccacggcaucgacgugaccgaccuguucgccgcccagcccggccugaccagcgccgugaucgacgcccugcccagaaacauggugaucaccugccagggcagcgacgacaucagaaagcugcuggagagccagggcagaaaggacaucaagcugaucgacaucgcccugaacaagaccgacagcagaaaguacgagaacgccgugugggaccaguacaaggaccugugccacaugcacaccggcguggugguggagaagaagaagagaggcggcaaggaggagaucaccccccacugcgcccugauggacugcaucauguucgacgccgccgugagcggcggccugaacaccagcgugcugagagccgugcugcccagagacaugguguucagaaccagcacccccagaguggugcugugaggacuaguuauaagacugacuagcccgaugggccucccaacgggcccuccuccccuccuugcaccgagauuaaucaaaggcucuuuucagagccaccaaaaaaaaaaaaaaaaaaaaaaaaaaaaaaaaaaaaaaaaaaaaaaaaaaaaaaaaaaaaaaaaaaaaaaaaaaaaaaaaaaaaaaaaaaaaaaaaaaaaa

SEQ ID NO: 20546 - RNA, 1974 nt, Artificial Sequence
  mRNA product Design i-3 (hSL-A100) comprising derived and/or modified sequence from LASV(G733-SLE-2010;Clade IV)__AIT17155__SP-HsALB_NP(2-569) (opt4)
aggagaaagcuuaccaugaagugggugaccuucaucagccugcuguuccuguucagcagcgccuacagcagcgccagcaaggagaucaagagcuuccuguggacccagagccugagaagagagcugagcggcuacugcagcaacaucaagcugcagguggugaaggacgcccaggcccugcugcacggccuggacuucagcgaggugagcaacgugcagagacugaugagaaaggagagaagagacgacaacgaccugaagagacugagagaccugaaccaggccgugaacaaccugguggagcugaagagcacccagcagaagagcgugcugagagugggcacccugaccagcgacgagcugcuggugcuggccgccgaccuggagaagcugaagagcaaggugaucagaaccgagagaccccugagcgccggcguguacaugggcaaccugagcagccagcagcuggaccagagaagagcccugcugagcaugaucggcaugagcggcggcaaccagggcgccagaaccggcagagacggcguggugagagugugggacgugaagaacgccgagcugcugaacaaccaguucggcaccaugcccagccugacccuggccugccugaccaagcagggccagguggaccugaacgacgccgugcaggcccugaccgaccugggccugaucuacaccgccaaguaccccaacaccagcgaccuggacagacugacccagagccaccccauccugaacaugaucgacaccaagaagagcagccugaacaucagcggcuacaacuucagccugggcgccgccgugaaggccggcgccugcaugcuggacggcggcaacaugcuggagaccaucaaggugagcccccagaccauggacggcauccugaagagcauccugaaggugaagaaggcccugggcauguucaucagcgacacccccggcgagagaaaccccuacgagaacauccuguacaagaucugccugagcggcgacggcuggcccuacaucgccagcagaaccagcaucaccggcagagccugggagaacaccgugguggaccuggagagcgacggcaagccccagaaggccggcagcaacaacagcaacaagagccugcagagcgccggcuucaccgccggccugaccuacagccagcugaugacccugaaggacgccaugcugcagcuggaccccaacgccaagaccuggauggacaucgagggcagacccgaggaccccguggagaucgcccuguaccagcccagcagcggcugcuacauccacuucuucagagagcccaccgaccugaagcaguucaagcaggacgccaaguacagccacggcaucgacgugaccgaccuguucgccgcccagcccggccugaccagcgccgugaucgacgcccugcccagaaacauggugaucaccugccagggcagcgacgacaucagaaagcugcuggagagccagggcagaaaggacaucaagcugaucgacaucgcccugagcaagaucgacagcagaaaguacgagaacgccgugugggaccaguacaaggaccugugccacaugcacaccggcguggugguggagaagaagaagagaggcggcaaggaggagaucaccccccacugcgcccugauggacugcaucauguucgacgccgccgugagcggcggccugaacagccuggugcugagagccgugcugcccagagacaugguguucagaaccagcacccccagaguggugcugugaggacuaguuauaagacugacuagcccgaugggccucccaacgggcccuccuccccuccuugcaccgagauuaaucaaaggcucuuuucagagccaccaaaaaaaaaaaaaaaaaaaaaaaaaaaaaaaaaaaaaaaaaaaaaaaaaaaaaaaaaaaaaaaaaaaaaaaaaaaaaaaaaaaaaaaaaaaaaaaaaaaaa

SEQ ID NO: 20547 - RNA, 1974 nt, Artificial Sequence
  mRNA product Design i-3 (hSL-A100) comprising derived and/or modified sequence from MOPV/LASV reassortant(IGS-1;Clade IV)__AFY05578__SP-HsALB_NP(2-569) (opt4)
aggagaaagcuuaccaugaagugggugaccuucaucagccugcuguuccuguucagcagcgccuacagcagcgccagcaaggagaucaagagcuuccuguggacccagagccugagaagagagcugagcggcuacugcagcaacaucaagcugcagguggugaaggacgcccaggcccugcugcacggccuggacuucagcgaggugagcaacgugcagagacugaugagaaaggagagaagagacgacaacgaccugaagagacugagagaccugaaccaggccgugaacaaccugguggagcugaagagcacccagcagaagagcauccugagagugggcacccugaccagcgacgaccugcugauccuggccgccgaccuggagaagcugagaagcaaggugaucagaaccgagagaccccugagcgccggcguguacaugggcaaccugagcagccagcagcuggaccagagaagagcccugcugaacaugaucggcaugagcggcggcaaccagggcgccagagccggcagagacggcguggugagagugugggacgugaagaacgccgagcugcugagcaaccaguucggcaccaugcccagccugacccuggccugccugaccaagcagggccagguggaccugaacgacgccgugcaggcccugaccgaccugggccugaucuacaccgccaaguaccccaacaccagcgaccuggacagacugacccagagccaccccauccugaacaugaucgacaccaagaagagcagccugaacaucagcggcuacaacuucagccugggcgccgccgugaaggccggcgccugcaugcuggacggcggcaacaugcuggagaccaucaaggugagcccccagaccauggacggcauccugaagagcauccugaaggugaagaaggcccugggcauguucaucagcgacacccccggcgagagaaaccccuacgagaacauccuguacaagaucugccugagcggcgacggcuggcccuacaucgccagcagaaccagcaucaccggcagagccugggagaacaccgugguggaccuggagagcgacggcaagccccagaaggccgacagcaacaacagcagcaagagccugcagagcgccggcuucaccgccggccugaccuacagccagcugaugacccugaaggacgccaugcugcagcuggaccccaacgccaagaccuggauggacaucgagggcagacccgaggaccccguggagaucgcccuguaccagcccagcagcggcugcuacauccacuucuucagagagcccaccgaccugaagcaguucaagcaggacgccaaguacagccacggcaucgacgugaccgaccuguucgccacccagcccggccugaccagcgccgugaucgacgcccugcccagaaacauggugaucaccugccagggcagcgacgacaucagaaagcugcuggagagccagggcagaaaggacaucaagcugaucgacaucgaccugagcaagaccgacagcagaaaguacgagaacgccgugugggaccaguacaaggaccugugccacaugcacaccggcguggugguggagaagaagaagagaggcggcaaggaggagaucaccccccacugcgcccugauggacugcaucauguucgacgccgccgugagcggcggccugaacaccagcgugcugagagccgugcugcccagagacaugguguucagaaccagcacccccagaguggugcugugaggacuaguuauaagacugacuagcccgaugggccucccaacgggcccuccuccccuccuugcaccgagauuaaucaaaggcucuuuucagagccaccaaaaaaaaaaaaaaaaaaaaaaaaaaaaaaaaaaaaaaaaaaaaaaaaaaaaaaaaaaaaaaaaaaaaaaaaaaaaaaaaaaaaaaaaaaaaaaaaaaaaa

SEQ ID NO: 20548 - RNA, 1974 nt, Artificial Sequence
  mRNA product Design i-3 (hSL-A100) comprising derived and/or modified sequence from LASV(LM765-SLE-2012;Clade IV)__AIT17815__SP-HsALB_NP(2-569) (opt4)
aggagaaagcuuaccaugaagugggugaccuucaucagccugcuguuccuguucagcagcgccuacagcagcgccagcaaggagaucaagagcuuccuguggacccagagccugagaagagagcugagcggcuacugcagcaacaucaagcugcagguggugaaggacgcccaggcccugcugcacggccuggacuucagcgaggugagcaacgugcagagacugaugagaaaggagagaagagacgacaacgaccugaagagacugagagaccugaaccaggccgugaacaaccugguggagcugaagagcacccagcagaagagcauccugagagugggcacccugaccagcgacgaccugcugauccuggccgccgaccuggagaagcugaagagcaaggugaccagaaccgagagaccccugagcgccggcguguacaugggcaaccugagcagccagcagcuggaccagagaagagcccugcuggacaugaucggcaugagcggcagcaaccagggcgccagagccggcagagacggcguggugagagugugggacgugaagaacgccgagcugcugaacaaccaguucggcaccaugcccagccugacccuggccugccugaccaagcagggccagguggaccugaacgacgccgugcaggcccugaccgaccugggccugaucuacaccgccaaguaccccaacaccagcgaccuggacagacugacccagagccaccccauccugaacaugaucgacaccaagaagagcagccugaacaucagcggcuacaacuucagccugggcgccgccgugaaggccggcgccugcaugcuggacggcggcaacaugcuggagaccaucaaggugagcccccagaccauggacggcauccugaagagcauccugaaggugaagaaggcccugggcauguucaucagcgacgcccccggcgagagaaaccccuacgagaacauccuguacaagaucugccugagcggcgacggcuggcccuacaucgccagcagaaccagcaucaccggcagagccugggagaacaccgugguggaccuggagagcgacggcaagccccagaaggccggcagcaacggcagcaacaagagccugcagagcgccggcuucaccgccggccugaccuacagccagcugaugacccugaaggacgccaugcugcagcuggaccccaacgccaagaccuggauggacaucgagggcagacccgaggaccccguggagaucgcccuguaccagcccagcagcggcugcuacauccacuucuucagagagcccaccgaccugaagcaguucaagcaggacgccaaguacagccacggcaucgacgugaccgaccuguucgccgcccagcccggccugaccagcgccgugaucgacgcccugcccagaaacauggugaucaccugccagggcagcgacgacaucagaaagcuguucgagagccagggcagaaaggacaucaagcugaucgacaucgcccugagcaagaccgacagcagaaaguacgagaacgccgugugggaccaguacaaggaccugugccacaugcacaccggcaucgugguggagaagaagaagagaggcggcaaggaggagaucaccccccacugcgcccugauggacugcaucauguucgacgccgccgugagcggcggccugaacaccagcgugcugagagccgugcugcccagagacaugguguucagaaccagcacccccagaguggugcugugaggacuaguuauaagacugacuagcccgaugggccucccaacgggcccuccuccccuccuugcaccgagauuaaucaaaggcucuuuucagagccaccaaaaaaaaaaaaaaaaaaaaaaaaaaaaaaaaaaaaaaaaaaaaaaaaaaaaaaaaaaaaaaaaaaaaaaaaaaaaaaaaaaaaaaaaaaaaaaaaaaaaa

SEQ ID NO: 20549 - RNA, 1974 nt, Artificial Sequence
  mRNA product Design i-3 (hSL-A100) comprising derived and/or modified sequence from LASV(LM776-SLE-2012;Clade IV)__AIT17825__SP-HsALB_NP(2-569) (opt4)
aggagaaagcuuaccaugaagugggugaccuucaucagccugcuguuccuguucagcagcgccuacagcagcgccagcaaggagaucaagagcuuccuguggacccagagccugagaagagagcugagcagcuacugcagcaacaucaagcugcagguggugaaggacgcccaggcccugcugcacggccuggacuucagcgaggugagcaacgugcagagacugaugagaaaggagagaagagacgacaacgaccugaagagacugagagaccugaaccaggccgugaacaaccugguggagcugaagagcacccagcagaagagcauccugagagugggcacccugaccagcgacgaccugcugauccuggccgccgaccuggagaagcugaagagcaaggugaccagaaccgagagaccccugagcgccggcguguacaugggcaaccugagcagccagcagcuggaccagagaagagcccugcugagcaugaucggcaugagcggcagcaaccagggcgccagagccggcagagacggcguggugagagugugggacgugaagaacgccgagcugcugaacaaccaguucggcaccaugcccagccugacccuggccugccugaccaagcagggccagguggaccugaacgacgccgugcaggcccugaccgaccugggccugaucuacaccgccaaguaccccaacaccagcgaccuggacagacugacccagagccaccccauccugaacaugaucgacaccaagaagagcagccugaacaucagcggcuacaacuucagccugggcgccgccgugaaggccggcgccugcaugcuggacggcggcaacaugcuggagaccaucaaggugagcccccagaccauggacggcauccugaagagcauccugaaggugaagaaggcccugggcauguucaucagcgacacccccggcgagagaaaccccuacgagaacauccuguacaagaucugccugagcggcgacggcuggcccuacaucgccagcagaaccagcaucaccggcagagccugggagaacaccgugguggaccuggagagcgacggcaagccccagaaggccggcagcaacaacagcaacaagagccugcagagcgccggcuucaccgccggccugaccuacagccagcugaugacccugaaggacgccaugcugcagcuggaccccaacgccaagaccuggauggacaucgagggcagacccgaggaccccguggagguggcccuguaccagcccagcagcggcugcuacauccacuucuucagagagcccaccgaccugaagcaguucaagcaggacgccaaguacagccacggcaucgacgugaccgaccuguucgccgcccagcccggccugaccagcgccgugaucgacgcccugcccagaaacauggugaucaccugccagggcagcgacgacaucagaaagcugcuggagagccagggcagaaaggacaucaagcugaucgacaucgcccugagcaagaccgacagcagaaaguacgagaacgccgugugggaccaguacaaggaccugugccacaugcacaccggcguggugguggagaagaagaagagaggcggcaaggaggagaucaccccccacugcgcccugauggacugcaucauguucgacgccgccgugagcggcggccugaacaccagcgugcugagagccgugcugcccagagacaugguguucagaaccagcacccccagaguggugcugugaggacuaguuauaagacugacuagcccgaugggccucccaacgggcccuccuccccuccuugcaccgagauuaaucaaaggcucuuuucagagccaccaaaaaaaaaaaaaaaaaaaaaaaaaaaaaaaaaaaaaaaaaaaaaaaaaaaaaaaaaaaaaaaaaaaaaaaaaaaaaaaaaaaaaaaaaaaaaaaaaaaaa

SEQ ID NO: 20550 - RNA, 1974 nt, Artificial Sequence
  mRNA product Design i-3 (hSL-A100) comprising derived and/or modified sequence from LASV(Mad39;Clade IV)__ANH09723__SP-HsALB_NP(2-569) (opt4)
aggagaaagcuuaccaugaagugggugaccuucaucagccugcuguuccuguucagcagcgccuacagcagcgccagcaaggagaucaagagcuuccuguggacccagagccugagaagagagcugagcggcuacugcagcaacaucaagcugcagguggugaaggacgcccaggcccugcugcacggccuggacuucagcgaggugagcaacgugcagagacugaugagaaagcagagaagagacgacaacgaccugaagagacugagagaccugaaccaggccgugaacaaccugguggagcugaagagcacccagcagaagagcgugcugagagugggcacccugaccagcgacgaccugcugacccuggccgccgaccuggagaagcugaagagcaaggugaccagaaccgagagaccccugaccgccggcguguacaugggcaaccugagcagccagcagcuggaccagagaagagcccugcugaacaugaucggcaugagcggcggcaaccagggcgccagaaccggcagagacggcguggugagagugugggacgugaagaacgccgagcugcugaacaaccaguucggcaccaugcccagccugacccuggccugccugaccaagcagggccagguggaccugaacgacguggugcaggcccugaccgaccugggccugaucuacaccgccaaguaccccaacaccagcgaccuggacagacugacccagagccaccccauccugaacaugaucgacaccaacaagagcagccugaacaucagcggcuacaacuucagccugggcgccgccgugaaggccggcgccugcaugcuggacggcggcaacaugcuggagaccaucaaggugagcccccagaccauggacggcauccugaagagcauccugaaggugaagaagagccugggcauguucaucagcgacacccccggcgagagaaaccccuacgagaacauccuguacaagaucugccugagcggcgacggcuggcccuacaucgccagcagaaccagcaucaccggcagagccugggagaacaccgugguggaccuggagagcggcggcaagccccagaaggccggcagcaacaacagcaacaagagccugcagagcgccggcuucgccgccggccugaccuacagccagcugaugacccugaaggacgccaugcugcagcuggaccccaacgccaagaccuggauggacaucgagggcagacccgaggaccccguggagaucgcccuguaccagcccaucagcggcugcuacauccacuucuucagagagcccaccgaccugaagcaguucaagcaggacgccaaguacagccacggcaucgacgugaccgaccuguucgccgcccagcccggccugaccagcgccgugaucgaggcccugcccagaaacauggugaucaccugccagggcagcgacgacaucagaaagcuguucgagagccagggcagaaaggacaucaagcugaucgacaucgcccugagcaagaccgacagcagaaaguacgagaacgccgugugggaccaguacaaggaccugugccacaugcacaccggcguggugguggagaagaagaagaagggcggcaaggaggagaucaccccccacugcgcccugauggacugcaucauguucgacgccgccgugagcggcggccugaacacccuggugcugagagccgugcugcccagagacaugguguucagaaccagcacccccaagguggugcugugaggacuaguuauaagacugacuagcccgaugggccucccaacgggcccuccuccccuccuugcaccgagauuaaucaaaggcucuuuucagagccaccaaaaaaaaaaaaaaaaaaaaaaaaaaaaaaaaaaaaaaaaaaaaaaaaaaaaaaaaaaaaaaaaaaaaaaaaaaaaaaaaaaaaaaaaaaaaaaaaaaaaa

SEQ ID NO: 20551 - RNA, 1974 nt, Artificial Sequence
  mRNA product Design i-3 (hSL-A100) comprising derived and/or modified sequence from LASV(Z0947-SLE-2011;Clade IV)__AIT17841__SP-HsALB_NP(2-569) (opt4)
aggagaaagcuuaccaugaagugggugaccuucaucagccugcuguuccuguucagcagcgccuacagcagcgccagcaaggagaucaagagcuuccuguggacccagagccugagaagagagcugagcggcuacugcagcaacaucaagcugcagguggugaaggacgcccaggcccugcugcacggccuggacuucagcgaggugagcaacgugcagagacugaugagaaaggagagaagagacgacaacgaccugaagagacugagagaccugaaccaggccgugaacaaccugguggagcugaagagcacccagcagaagagcauccugagagugggcacccugaccagcgacgaccugcugauccuggccgccgaccuggagaagcugaagagcaaggugaccagaaccgagagaccccugagcgccggcguguacaugggcaaccugagcagccagcagcuggaccagagaagagcccugcugaacaugaucggcaugagcggcagcaaccagggcgccagaaccggcagagacggcguggugagagugugggacgugaagaacgccgagcugcugaacaaccaguucggcaccaugcccagccugacccuggccugccugaccaagcagggccagguggaccugaacgacgccgugcaggcccugaccgaccugggccugaucuacaccgccaaguaccccaacaccagcgaccuggacagacugacccagagccaccccauccugaacaugaucgacaccaagaagagcagccugaacaucagcggcuacaacuucagccugggcgccgccgugaaggccggcgccugcaugcuggacggcggcaacaugcuggagaccaucaaggugagcccccagaccauggacggcauccugaagagcauccugaaggugaagaaggcccugggcauguucaucagcgacgcccccggcgagagaaaccccuacgagaacauccuguacaagaucugccugagcggcgacggcuggcccuacaucgccagcagaaccagcaucaccggcagagccugggagaacaccgugguggaccuggagagcgacggcaagccccagaaggccggcagcaacggcagcaacaagagccugcagagcgccggcuucaccgccggccugaccuacagccagcugaugacccugaaggacgccaugcugcagcuggaccccaacgccaagaccuggauggacaucgagggcagacccgaggaccccguggagaucgcccuguaccagcccagcagcggcugcuacauccacuucuucagagagcccaccgaccugaagcaguucaagcaggacgccaaguacagccacggcaucgacgugaccgaccuguucgccgcccagcccggccugaccagcgccgugaucgacgcccugcccagaaacauggugaucaccugccagggcagcgacgacaucagaaagcuguucgagagccagggcagaaaggacaucaagcugaucgacaucgcccugagcaagaccgacagcagaaaguacgagaacgccgugugggaccaguacaaggaccugugccacaugcacaccggcaucgugguggagaagaagaagagaggcggcaaggaggagaucaccccccacugcgcccugauggacugcaucauguucgacgccgccgugagcggcggccugaacaccagcgugcugagagccgugcugcccagagacaugguguucagaaccagcacccccagaguggugcugugaggacuaguuauaagacugacuagcccgaugggccucccaacgggcccuccuccccuccuugcaccgagauuaaucaaaggcucuuuucagagccaccaaaaaaaaaaaaaaaaaaaaaaaaaaaaaaaaaaaaaaaaaaaaaaaaaaaaaaaaaaaaaaaaaaaaaaaaaaaaaaaaaaaaaaaaaaaaaaaaaaaaa

SEQ ID NO: 20552 - RNA, 1974 nt, Artificial Sequence
  mRNA product Design i-3 (hSL-A100) comprising derived and/or modified sequence from LASV(Josiah;Clade IV)__NP_694869__SP-HsALB_NP(2-569) (opt5)
aggagaaagcuuaccaugaagugggugaccuucaucagccugcucuuucuguucuccucugccuacagcagcgccuccaaggagaucaaaucuuuccuguggacccagagccucagacgggaacuguccggcuacugcucuaacauuaagcugcaaguggucaaagacgcucaggcccugcuccacgggcuggauuuuagcgagguuuccaaugugcagcgccuuaugagaaaggaacggcgcgacgauaacgaccugaaaagacuccgggaucugaaucaggcggugaacaaucuggucgagcucaagucuacacaacaaaagagcauccugcgcgugggaacgcuuaccuccgacgaucugcucauucuggcugccgaccuugaaaaacuuaagagcaaaguuaucagaacagagcggccccucucugccggcguguauauggggaaccuguccagccagcagcuggaucagcgcagagcucuccugaauaugauuggaaugucuggcgggaaccagggagcccgggcuggccgcgacggcgucgugagaguuugggaugugaagaaugccgagcuucugaacaaucaguucgggaccaugccuucccucacacuggcgugucuuaccaaacagggacaagucgaccugaacgaugccgugcaggcucucacagaccugggccugaucuacaccgccaaguauccgaauacgagcgaccucgaucggcugacccagucucaucccauccuuaacaugauugacacaaagaaauccagccugaauaucuccggguacaacuuuucucucggagcugccgugaaggcgggcgccugcaugcuggaugggggaaacaugcuugaaaccauuaaagucagcccucaaacaauggacggcauccugaaguccauucucaaaguuaagaaagcucugggcauguucaucagcgauacccccggggagcgcaauccuuaugaaaacauucuguacaagaucugucucucuggagacggcuggcccuauaucgccuccagaacgagcauuacagggcgggcuugggagaauaccgugguggaucuggagucugacggaaagccucagaaagccgauagcaacaauuccucuaagagccuucaguccgccggcuuuacagcugggcugaccuacagccagcucaugacccugaaagacgcgaugcugcaacuugauccgaacgccaagacauggauggacaucgaaggaagacccgaggacccugucgaaauugcucucuaccagcccucuuccggcugcuauauccacuucuuucgcgagccuacggaucugaaacaguucaagcaggacgccaaguacagccauggcauugaugugaccgaccuguuugccacacaacccgggcucaccucugcuguuaucgaugcccugccgcggaauauggugaucacaugucagggauccgacgauauuagaaaacuucuggaaagccagggccgcaaggacaucaaacucauugauaucgcgcuguccaagaccgacucucggaaauaugagaacgcugucugggaucaguacaaggaccugugccacaugcauacgggggugguuguggagaagaaaaagagaggaggcaaagaagagauuacaccucacugugcccuuauggauugcaucauguucgacgccgcugucagcgggggccucaauaccuccgugcugcgcgccguccugccccgggacaugguguuuagaaccucuacaccucgcguugugcucugaggacuaguuauaagacugacuagcccgaugggccucccaacgggcccuccuccccuccuugcaccgagauuaaucaaaggcucuuuucagagccaccaaaaaaaaaaaaaaaaaaaaaaaaaaaaaaaaaaaaaaaaaaaaaaaaaaaaaaaaaaaaaaaaaaaaaaaaaaaaaaaaaaaaaaaaaaaaaaaaaaaaa

SEQ ID NO: 20553 - RNA, 1974 nt, Artificial Sequence
  mRNA product Design i-3 (hSL-A100) comprising derived and/or modified sequence from LASV(LP;Clade I)__AAF86702__SP-HsALB_NP(2-569) (opt5)
aggagaaagcuuaccaugaagugggugaccuucaucagccugcucuuucuguucuccucugccuacagcagcaacuccaaggagaucaaaucuuuccuguggacccagagccucagacgggaacuguccggcuacugcucuaauauuaagcuccaaguggucaaagacgcccaggcucugcuccacgggcuggauuuuagcgagguuuccaacgugcagcgccuuaugagaaagcagaaacgggacgaugccgaccugaagcgccucagagaucugaaucaagcggugaacaaucuggucgaacucaagucuacacagcagaaaaacgugcugcggguuggaacgcuuagcuccgacgaucugaucacccucgcugccgaccuggagaaacuuaaaagcaaggugauucgcacagaaagaccccugucuuccggcgucuauauggggaaucucagcucucagcaacuggaucagcggcgcgcccugcucuccaugaucggaaugagcggcgggccucagggaaacagaaccggcggcgacggggugguucgggugugggaugucaaaaaugcugagcugcuuaacaaucaguucggaacaaugccgucucugacccucgccugucugacaaagcaaggccagguggaccuuaacgaugcugugcaggcccugaccgaccucgggcugauuuacacggcgaaguaucccaauuccagcgaccuggauaugcucacccaaucccauccuauccugggaauggucgacacaaagaagucuagccuuaacaucuccggcuacaauuuuagccugggggccgcuguuaaagccggagcuugcaugcucgauggcggcaacaugcuggagaccauuaaggugucuccccagacaauggacgggauccuuaaauccauucugaaggugaaacgcagccucggaauguucaucucugauaccccuggcgaaagaaaccccuaugagaauauucuguacaagaucugucugagcggggaaggauggccuuauauugccucccggacgucuaucacaggccgcgcgugggagaacacccucgucgaccuggagagcgauaauaagccgcccaaacuuaacuccgccgggagcaauaagucucugcaggcugccggacucaacgcuggccugacauacucccagcugaugacccuuaaagacugcaugcuccaacuggauccuagcucuaagaccuggaucgacauugaaggcagacccgaggauccuguggaaaucgcccuguuucagcccuccagcggguguuacauucacuucuuucgggagccgacagaccucaaacaguucaagcaggacgccaaguauucccauggaaucgauguuacggaccuguuuucuacccaaccuggccuuacaagcgcugugauugaagcgcugcccagaaauaugguccuuaccugccagggguccgaugacaucaaaaagcugcuggagucucagggacgccgggauaucaaacuuauugacaucagccucuccaaggccgauagcagaaaauucgagaacgcugugugggaccaguacaaggaucugugucacaugcauacaggcguuguggucgaaaagaaaaagcgcgggggcaaagaggaaauuaccccucacugcgcccugcucgacuguaucauguuugaugccgcuacgacaggaucucugaauauuaccacccuucgggccgugcugcccagagacauggucuuccgcacauccacccccaaggugguucucugaggacuaguuauaagacugacuagcccgaugggccucccaacgggcccuccuccccuccuugcaccgagauuaaucaaaggcucuuuucagagccaccaaaaaaaaaaaaaaaaaaaaaaaaaaaaaaaaaaaaaaaaaaaaaaaaaaaaaaaaaaaaaaaaaaaaaaaaaaaaaaaaaaaaaaaaaaaaaaaaaaaaa

SEQ ID NO: 20554 - RNA, 1974 nt, Artificial Sequence
  mRNA product Design i-3 (hSL-A100) comprising derived and/or modified sequence from LASV(803213;Clade II)__AAF86704__SP-HsALB_NP(2-569) (opt5)
aggagaaagcuuaccaugaagugggugaccuucaucagccugcucuuucuguucuccucugccuacagcagcgccuccaaggaggugaaaucuuuccuguggacccagagccucagacgggaacuguccggcuacugcucuaacaucaaacuucaagucguuaaggacgcucaggcccugcuccacgggcuggauuuuagcgaggugaauaacgugcagcgccuuaugagaaagcagaaacgggacgauggagaccugaagcgccucagagaucugaaucaagcggucaacaaucugguggaacucaaguccacacagcagaaaucuauucugcggguuggcacgcuuaccagcgacgaucugcucacacuggcugccgaccuugagaagcugaaauccaaggugauccgcaccgaaagaccccucagcucuggggucuauaugggaaaccuguccacacagcaacuggagcagcggcgcgcccuccugaauaugauuggcauggugggaggagcucagggcacccagccuggcagagaugggguugugcgggucugggacgugaaaaacccggaucuucugaauaaccaauucggaacaaugcccagccucacccuggccugucuuacgaagcagggccagguggaccugaaugaugcuguccucgcccugaccgaccuggggcucaucuacacagcgaaguauccuaacucuuccgaccuggaucgccuuagccaaucucaucccauucugaauaugguugacaccaaaaaguccagccucaacaucuccggauacaauuuuucucugggcgccgcugugaaagccggggcuugcaugcuugauggaggcaacaugcuggagacaaucaaggugaccccucagacgauggacggcauucucaaaagcauccugaaggucaaaagaucccuggggauguucgugagcgauacacccggagaacggaacccuuaugagaauauucucuacaagaucugucugucuggcgacggguggccguauauugccucccgcaccagcaucguugggagagcgugggaaaacacaaccguggaucuugagucugacggcaagccccagaaagucgggaccgccggaagcaauaagucccugcagucugcuggcuuuccuacaggccucacguacagccaacugaugacccugaaagauuccaugaugcagcuugaccccagcgccaagacauggauugauaucgaggggcggccugaagaccccguggagaucgcucucuaccagccgaugucuggaugcuauauucacuucuuuagagaaccuaccgaccugaaacaguucaagcaagaugccaaguacucccauggcaucgacguugccgaucuguuucccgcucagccugggcucacaagcgcggugauugaggcccugccccgcaacaugguccuuaccugucagggaucugacgauaucaaaaagcugcucgacucccagggccggagagauauuaaacugaucgacaucagccuguccaagguggauucucgcaaauucgaaaaugcugucugggaccaaugcaaggaucuuugucacaugcauacgggggugguuguggagaagaaaaagcggggcggaaaagaggaaauuacaccccacugcgcccucauggacuguaucauguuugaugccgcugucagcggcgggcugaacauuccugugcugagagccguucucccgcgcgacaugguguuccggaccuccucucccaaggucgugcugugaggacuaguuauaagacugacuagcccgaugggccucccaacgggcccuccuccccuccuugcaccgagauuaaucaaaggcucuuuucagagccaccaaaaaaaaaaaaaaaaaaaaaaaaaaaaaaaaaaaaaaaaaaaaaaaaaaaaaaaaaaaaaaaaaaaaaaaaaaaaaaaaaaaaaaaaaaaaaaaaaaaaa

SEQ ID NO: 20555 - RNA, 1977 nt, Artificial Sequence
  mRNA product Design i-3 (hSL-A100) comprising derived and/or modified sequence from LASV(GA391;Clade III)__CAA36646__SP-HsALB_NP(2-570) (opt5)
aggagaaagcuuaccaugaagugggugaccuucaucagccugcucuuucuguucuccucugccuacagcagcgccuccaaggaggugagaucuuuccuguggacccagagccuccggcgcgaacuguccggcuacugcucuaacaucaaacuucaagucguuaaggacgcucaggcccugcuccacgggcuggauuuuagcgagguguccaaugugcagagacuuaugcggaaacagaagcgcgacgauggagaccugaaaagacuccgggaucugaaccaagcggucaauaaccugguggaacucaagucuacacagcagaaaagcguucugcgcgugggcacgcuuuccagcgacgaucugcucauucuggcugccgaccuugagaaacugaagucuaaagucaccagaacagaacggccccucuccagcgggguguauaugggaaaucugucuucccagcaacuggaucagcgcagagcccuccugaacaugaucggcaugaccgggguuagcggaggcggcaagggggcuucugacggaauugugcgggucugggaugugaaaaaugccgagcuucugaacaaucaguucggcacaaugccuucccucacccuggcuugucuuacaaagcaggggcaaguggaccugaacgaugccguccaggcgcucaccgaccugggacugaucuacacggccaaguauccgaauagcuccgaccucgaucgccugucucagagccaucccauucuuaacaugaucgacaccaaaaaguccagccugaauaucucuggcuacaacuuuucccucggggcugccguuaaagcuggagccugcaugcuggauggcggcaauaugcuugagacaauuaaggugagcccucaaaccauggacgggauccugaaaucuauucucaaggugaaaaagagccugggaauguucgucuccgauacacccggcgaaagaaacccuuaugagaacauccuguacaagauuugucucucuggggacggauggcccuauaucgcgagccggaccuccauugugggccgcgccugggaaaauacgguuguggaucuggagcaggacaacaaaccucagaagaucgggaauggaggcagcaacaaaucucuucaguccgcuggcuuugccgcugggcugacauacagccaacucaugacccugaaggauuucaaaugcuuuaaucugaucccgaacgccaagacauggauggacauugagggaagacccgaagauccugucgagaucgcccuuuaccagcccucuuccggcuguuaugugcacuucuuucgggaaccuaccgaccucaagcaguucaaacaggacgcuaaguacagccaugggauugauguuaccgaccuguuugcggcccaacccggacugacauccgcugugaucgaggcccucccgagaaauauggucauuacgugccagggcucugaagauauccgcaaacugcuugagagccaggggcggagagacaucaagcugauugauaucacccucuccaaagccgacucucgcaaguucgagaacgcugugugggaucaguuuaaggaccugugucacaugcauacaggcgucgugguugaaaagaagaaacggggaggcaaggaggaaauuaccccucacugcgcccugauggauuguaucauguucgacgcggcugugagcgggggacuugaugccaaaguccucagagugguucugccccgcgacaugguguuccggacauccaccccuaaggucgugcugugaggacuaguuauaagacugacuagcccgaugggccucccaacgggcccuccuccccuccuugcaccgagauuaaucaaaggcucuuuucagagccaccaaaaaaaaaaaaaaaaaaaaaaaaaaaaaaaaaaaaaaaaaaaaaaaaaaaaaaaaaaaaaaaaaaaaaaaaaaaaaaaaaaaaaaaaaaaaaaaaaaaaa

SEQ ID NO: 20556 - RNA, 1974 nt, Artificial Sequence
  mRNA product Design i-3 (hSL-A100) comprising derived and/or modified sequence from LASV(AV;Clade V)__CCA30315__SP-HsALB_NP(2-569) (opt5)
aggagaaagcuuaccaugaagugggugaccuucaucagccugcucuuucuguucuccucugccuacagcagcgccuccaaggaggugaaaucuuuccuguggacccagagccucagacgggaacuguccggcuacugcucuaacaucaaacuucaagucguuaaggacgcucaggcccugcuccacgggcuggauuuuagcgagguguccaaugugcagcgccuuaugagaaagcagcggcgcgacgauucugaccugaaaagacuccgggaucugaaccaagcggucaauaaccugguggaacucaagagcacacagcagaaguccguucugcgcgugggaacgcuuagcucugacgaucugcucacccuggcugccgaccuugagaaacugaaguccaaagucacaagaaccgaacggccccucagcucuggcguguauauggggaaucuguccagccagcaacuggaucagcgcagagcccuccugaaccuuauuggaaugacaaauggcucucaggggucccaggcuggacgggacggcguugugcgcgucugggaugugaagaacgccgagcugcucaauaaccaauucggcaccaugccuagccugacacuugcuugucugaccaaacagggacagguggaccucaaugaugucguucaagcccugacggaccuggggcucaucuacaccgcgaaguauccgaacacauccgaccuggauagacuuacccagucucaucccauucugaauaugaucgacacaaagaaaagcucccucaacauuagcggcuacaauuuuucucugggggccgcugugaaggccggagcuugcaugcuugauggcgggaacaugcuggagaccaucaaaguguccccucagagcauggacggaauccucaagucuauucugaaagucaagcgggcccugggcauguucgugagcgauacgcccggcgaacgcaacccuuaugagaauauccucuacaaaauuugucuguccggggacggauggcccuauaucgcgucuagaacaagcauuguuggccgggccugggaaaacaccguggucgaucuugagacagacgggaagccucagaagaucggauccggcaauagcaacaaaucucugcaauccgcuggguuuagcgccggacucaccuacucucagcugaugacccugaaggaugcuaugcuucagcucgacccgaaugccaaaacauggauggauauugagggcagacccgaagacccuguggagguugcccuguaccagcccaucuccggcugcuauauccacuucuuucgcgaaccuacggaccugaagcaauucaaacaggaugcuaaguacagccaugggauugacaucgcggaucucuuugccgcucagcccggacugaccuccgccgugauugaggcccuuccgcggaacauggucaucacaugucagggcucugaagacauuaagaaacugcucgagagccaagggagaaaggauaucaaacugaucgacauugcucuguccaagaucgauucucgcaaauucgagaaugccgugugggaccaguauaaggaucuuugccacaugcauaccggagucgugguugaaaagaaaaagcggggcgggaaagaggaaauuacaccucacugugcgcucauggacugcaucauguuugaugcugccgugagcggcggacugaacacccugguccucagagccgugcugccccgcgacaugguuuuccggacguccacaccuagagugguccuuugaggacuaguuauaagacugacuagcccgaugggccucccaacgggcccuccuccccuccuugcaccgagauuaaucaaaggcucuuuucagagccaccaaaaaaaaaaaaaaaaaaaaaaaaaaaaaaaaaaaaaaaaaaaaaaaaaaaaaaaaaaaaaaaaaaaaaaaaaaaaaaaaaaaaaaaaaaaaaaaaaaaaa

SEQ ID NO: 20557 - RNA, 1974 nt, Artificial Sequence
  mRNA product Design i-3 (hSL-A100) comprising derived and/or modified sequence from LASV(Togo/2016/7082;Clade VI)__AMR44578__SP-HsALB_NP(2-569) (opt5)
aggagaaagcuuaccaugaagugggugaccuucaucagccugcucuuucuguucuccucugccuacagcagcaacuccaaggaggugaaaucuuuccuguggacccagagccucagacgggaacuguccggcuacugcucuaauaucaaacuucaagucguuaaagacgcccaggcucugcuccacgggcuggauuuuagcgagguguccaacgugcagcgccuuaugagaaagcagaaacgggacgauggagaccugaagcgccucagagaucugaaucaagccgucaacaaucugguggaacucaagucuguucagcagaaaagcauucugcgggugggcacacuuacguccgacgaucugcucacccuggcggcugaccuugagaagcugaaaagcaaggucacacgcaccgaaagaccccucucuuccgggguguauaugggaaaccugagcucucagcaacuggaucagcggcgcgcccuccuguccaugaucggcaugagcgggggaaaucagaacucucagccuaaaggcgacggcguugugagagucugggaugugaagaaugccgaccuucugaacaaucaauucgggacaaugccgucccucacccuggcuugucuuacaaagcagggacagguggaucugaacgacgccguccaagcucucaccgaccugggccugauuuacacggccaaauaucccaauagcuccgaucucgaccggcugucucagagccauccuauccuuaacaugauugauaccaagaaauccagccugaauaucucuggguacaacuuuucccucggagcggccaucaagacaggcgcuugcaugcuggacgggggaaacaugcuugagaccauuaaaguuacaccccagaccauggauggcauccucaagagcauucugaaagugaagcgcucucugggcauguucaucagcgacacgccuggggagagaaaucccuaugaaaacauucuguacaagaucugucucuccggagauggcuggccuuauauugccucucggacagcuaucaucgggcgcgccugggagaauaccguggucgaccuggaaagcgauuccaaaccgcagaagauuggaagcaacggcucuaauaaaucccuucaaagcgcgggguuugcccccggacugacauacucucagcucaugacccugaaggacuccaugcugcagcuugauccuaacgcuaaaaccuggaucgacauugagggcagacccgaggacccuguggaaguugcccucuuccagcccaucagcggcugcuacauucacuuuuuccgggagccgacagaucugaagcaauuuaagcaggacgcuaaauauucccaugggaucgaugugacggaccuguucgccgcccagccuggacucaccucugcugucaucgaagcgcugcccagaaauauggugcuuacaugucagggcagcgaugacauuaagaaacugcucgauucccaagggcgccgggacaucaagcugauugauguuucucugaacaaaaucgacagcagaaaguuugagaaugccgugugggaucaguacaaggaccuuugccacaugcauaccggagucguggucgaaaagaagaaaaagggcgggaaagaggagauuacaccucacugugcucuccuggauugcaucauguucgacgccgccguguccggcggacugaacgcuaccguucuccgcgccgugcugccccgggacauggucuuuagaacgagcucucccaaggugguucuuugaggacuaguuauaagacugacuagcccgaugggccucccaacgggcccuccuccccuccuugcaccgagauuaaucaaaggcucuuuucagagccaccaaaaaaaaaaaaaaaaaaaaaaaaaaaaaaaaaaaaaaaaaaaaaaaaaaaaaaaaaaaaaaaaaaaaaaaaaaaaaaaaaaaaaaaaaaaaaaaaaaaaa

SEQ ID NO: 20558 - RNA, 1974 nt, Artificial Sequence
  mRNA product Design i-3 (hSL-A100) comprising derived and/or modified sequence from LASV(KAK-428;Clade n.d. (VII))__ANH09741__SP-HsALB_NP(2-569) (opt5)
aggagaaagcuuaccaugaagugggugaccuucaucagccugcucuuucuguucuccucugccuacagcagcaacuccaaggaggugaaaucuuuccuguggacccagagccucagacgggaacuguccggcuacugcacaaauaucaaacuucaagucguuaaggacgcccaggcucugcuccacgggcuggauuuuucugaggugagcaacgugcagcgccuuaugagaaagcagaaacgggacgauaaugaccugaagcgccucagagaucugaaccaagccgucaauaaccugguggaacucaaguccguucagcagaaaucugugcugaaggucggaacgcuuaauagcgacgaucugcucacccuggcggcugaccuugagaaacugaaguccaaagugguucggacagaacgcccccucagcucuggcguguauauggggaaccuguccagccagcaacuggaucagagacgggcccuccugaauaugauuggaauggccggcgggucucagggaaaccagccuucccgcgacggcgucgugagagugugggaugucaagaaugcugaccuucugaacaaucaauucggcaccaugccgagccucacacuggccugucuuaccaagcaggggcagguugaucugaacgacguggugcucgcucugacagaccugggacucaucuacaccgccaaauaucccaauucuuccgaucuggaccggcuuagccaaaaccauccuguccugaacaugauugaugugaauaaguccucucucaacaucagcggcuacaauuuuucccugggggcggccguuaaagcuggagccugcaugcuugacggcgggaacaugcuggagacgauuaagaucagcccccagaccguggauggaauccucaaaucuauucugaaggucaaacgcgcucugggcauguucguguccgacacaccuggcgagagaaaucccuaugaaaacauccucuacaagguuugucugagcgggaauggauggccuuauauugccucucggaccagcaucgugggccgcgcgugggagaacacagucguggaucuugaauccaauaagaaccagccgaaagucgggaauaacggaucuaauaagaugcugcagagcuccggcuuugccaccgggcucacguacagccaacugaugacacugagagacucuaugcuucagcucgaucccaccgcuaaaacauggauugacaucgagggacggccugaggaucccguggaacuggcccuguuccagccuuccagcggcugcuacauucacuuuuucagagagcccaccgaccucaagcaguuuaaacaagacgcuaaguauucucauggcaucgauguuaacgaccuguucuccgcccagccggggcuuaccagcgccgugcuggaagcucucccucgcaauaugguccugacaugucagggauccgaugacauccggaagcugcuugauucucaggacagaaaagauauuaagcucaucgacauuagccuguccaaagcggaugcccgcaaguuugagaacgacgugugggaucaauucaaagaccugugccacaugcauacgggcaucguuguggaaaagaagaaaaagggagggaaacaggagaugacaccccacugugcucuccuggauugcauuauguuugacgccgccgucucuggcgggcuuaacgugccuacccugcgggcugugcuccccaccgacaugguuuucagaacaaucaccacgaaggucgugcugugaggacuaguuauaagacugacuagcccgaugggccucccaacgggcccuccuccccuccuugcaccgagauuaaucaaaggcucuuuucagagccaccaaaaaaaaaaaaaaaaaaaaaaaaaaaaaaaaaaaaaaaaaaaaaaaaaaaaaaaaaaaaaaaaaaaaaaaaaaaaaaaaaaaaaaaaaaaaaaaaaaaaa

SEQ ID NO: 20559 - RNA, 1974 nt, Artificial Sequence; identical to SEQ ID NO: 20553
  mRNA product Design i-3 (hSL-A100) comprising derived and/or modified sequence from LASV(Pinneo-NIG-1969;Clade I)__AIT17837__SP-HsALB_NP(2-569) (opt5)

SEQ ID NO: 20560 - RNA, 1974 nt, Artificial Sequence
  mRNA product Design i-3 (hSL-A100) comprising derived and/or modified sequence from LASV(ISTH0009-NIG-2011;Clade II)__AIT17405__SP-HsALB_NP(2-569) (opt5)
aggagaaagcuuaccaugaagugggugaccuucaucagccugcucuuucuguucuccucugccuacagcagcguguccaaggaggucaaaucuuuccuguggacccagagccucagacgggaacuguccggcuacugcucuaacaucaaacuucaaguugugaaggacgcccaggcucugcuccacgggcuggauuuuagcgagguguccaauguccagcgccuuaugagaaagcagaaacgggacgauucugaccugaagcgccucagagaucugaaccaagccgugaauaaccugguugaacucaagagcacacagcagaaauccauucugcgggugggaacgcuuaccagcgacgaucugcucacacuggcggcugaccuugagaagcugaaaucuaaggucauccgcaccgaaagaccccucuccagcggcguguauauggggaaucugucuacacagcaacuggagcagcggcgcgcccuccugaacaugauuggaaugguuggcggggcccagggaacccagccuggcagagauggcgugguccgggugugggacgugaaaaauccggaucuucugaacaaucaauucgggacaaugcccucccucacccuggcuugucuuacgaagcagggacaggucgaccugaacgaugccguucucgcucugaccgaccugggccucaucuacacagccaaguauccuaauagcucugaccuggaucgccuuucccaaagccaucccauucugaacaugguggacaucaaaaaguccucucucaauaucagcggguacaacuuuucccugggagcggccgugaaagcuggcgccugcaugcuugaugggggaaauaugcuggagaccauuaaggucacaccucagaccauggacggcauccucaaaagcauucugaaggugaaaagaucucugggcauguucguuuccgauacgcccggggaacggaacccuuaugagaacauccucuacaagauuugucugagcggagacggcuggccguauaucgcuucucgcacaagcauuguggggagagccugggaaaauaccacagucgaucuugaguccgacggaaagccccagaaagugggcucugcggggagcaacaagucccugcagagcgccggauuuccuaccggccucaccuacucucaacugaugacacugaaagauuccaugaugcagcuugaccccagcgcuaagacguggaucgauaucgagggccggccugaagaccccguugagauugcccucuaccagccgaugucugggugcuauauccacuucuuuagagaaccuaccgaccugaaacaguucaagcaagaugcuaaguacucccauggaauugacguggccgaucuguuucccgcccagccuggccucacaagcgcugucaucgaggcgcugccccgcaauauggugcuuaccugucagggguccgacgauauuaaacggcugcucgacucucagggaagacgcgauaucaagcugaucgacauugcccugagcaaagcugauucccggagauucgaaaacgccgucugggaccaaugcaaggaucuuugucacaugcauacaggcgugguuguggagaaaaagaagcgcgggggcaaagaggaaaucacgccccacugcgcccucauggacuguauuauguaugaugcugccgucucuggaggccugaauaucccugugcugcgggcgguucucccgagagacaugguguuucgcaccagcucccccaaggucgugcugugaggacuaguuauaagacugacuagcccgaugggccucccaacgggcccuccuccccuccuugcaccgagauuaaucaaaggcucuuuucagagccaccaaaaaaaaaaaaaaaaaaaaaaaaaaaaaaaaaaaaaaaaaaaaaaaaaaaaaaaaaaaaaaaaaaaaaaaaaaaaaaaaaaaaaaaaaaaaaaaaaaaaa

SEQ ID NO: 20561 - RNA, 1974 nt, Artificial Sequence
  mRNA product Design i-3 (hSL-A100) comprising derived and/or modified sequence from LASV(ISTH2010-NIG-2012;Clade II)__AIT17483__SP-HsALB_NP(2-569) (opt5)
aggagaaagcuuaccaugaagugggugaccuucaucagccugcucuuucuguucuccucugccuacagcagcgccuccaaggaggugaaaucuuuccuguggacccagagccucagacgggaacuguccggcuacugcucuaacaucaaacuucaagucguuaaggacgcucaggcccugcuccacgggcuggauuuuagcgagguguccaaugugcagcgccuuaugagaaagcagaaacgggacgauucugaccugaagcgccucagagaucugaaccaagcggucaauaaccugguggaacucaagagcacacagcagaaauccauucugcggguuggaacgcuuaccagcgacgaucugcucacacuggcugccgaccuugagaagcugaaaucuaaggugauccgcaccgaaagaccccucuccagcggcgucuauauggggaaucugucuacacagcaacuggagcagcggcgcgcccuccugaaccuuauuggaauggugggcggggcucagggaacccagccuggcagagauggcguugugcgggucugggacgugaaaaauccggaucugcucaacaaucaauucgggacaaugcccucccugacccuugccugucugacgaagcagggacagguggaccucaacgaugcuguccuggcccugaccgaccucggccugaucuacacagcgaaguauccuaauagcucugaccuugaucgccugucccaaagccaucccauucucaacaugguugacaccaaaaaguccucucugaauaucagcggguuuaacuucucccuuggagccgcugugaaagccggcgcuugcaugcuggaugggggaaauaugcucgagacaaucaaggugaccccucagacgauggacggcauucugaaaagcauccugaaggucaaaaagucucucggcauguuuguguccgauacacccggggaaagaaacccuuacgagaacauucuguauaagaucugucuuagcggagacggcuggccguacauugccucucggaccagcaucguugggcgcgcgugggaaaauacaaccguggaucuggaguccgacggaaaaccccacaaggucggcaccgccgggucuaacaaaagccuccaguccgcuggauucccuacaggccugacguauagccagcugaugacccuuaaggauucuaugaugcaacucgaccccuccgccaaaacauggauugauaucgagggcagaccugaagaccccguggagaucgcucuguaccagccgaugagcgggugcuacauucacuuuuuccgggaaccuaccgaccugaagcaguuuaagcaggaugccaaauauucucauggaaucgacguugccgaucucuuccccgcucaaccuggccugacauccgcggugauugaggcccuucccagaaauaugguccugaccugucaggggagcgacgauaucaagcgccuccuggacucccagggacggagagauauuaaacugaucgacaucgcucuuucuaaggccgauagccgccgguuugaaaacgccgugugggaccagugcaaagaucucugucauaugcacacgggcgucgugguugagaagaagaaaagagggggcaaggaggaaauuacaccccacugcgcucugauggacuguaucauguacgaugccgcgguguccggaggccugaauauuccuguccuccgcgcugugcugccgcgggacaugguuuucagaaccucuagccccaaagugguccuuugaggacuaguuauaagacugacuagcccgaugggccucccaacgggcccuccuccccuccuugcaccgagauuaaucaaaggcucuuuucagagccaccaaaaaaaaaaaaaaaaaaaaaaaaaaaaaaaaaaaaaaaaaaaaaaaaaaaaaaaaaaaaaaaaaaaaaaaaaaaaaaaaaaaaaaaaaaaaaaaaaaaaa

SEQ ID NO: 20562 - RNA, 1974 nt, Artificial Sequence
  mRNA product Design i-3 (hSL-A100) comprising derived and/or modified sequence from LASV(Lassa virus/H.sapiens-wt/NGA/2015/ISTH_0543;Clade II)__AVO03640__SP-HsALB_NP(2-569) (opt5)
aggagaaagcuuaccaugaagugggugaccuucaucagccugcucuuucuguucuccucugccuacagcagcgccuccaaggaggugaaaucuuuccuguggacccagagccucagacgggaacuguccggcuacugcucuaacaucaaacuucaagucguuaaggacgcucaggcccugcuccacgggcuggauuuuagcgagguguccaaugugcagcgccuuaugagaaagcagaaacgggacgauucugaccugaagcgccucagagaucugaaccaagcggucaauaaccugguggaacucaagagcacacagcagaaauccauucugcggguuggaacgcuuaccagcgacgaucugcucacacuggcugccgaccuugagaagcugaaaucuaaggugauccgcaccgaaagaccccucuccagcggcgucuauauggggaaucugucuacacagcaacuggagcagcggcgcgcccuccugaacaugauuggaauggugggcggggcucagggaacccagccuggcagagauggcguugugcgggucugggacgugaaaaauccggaucuucugaacaaucaauucgggacaaugcccucccucacccuggccugucuuacgaagcagggacagguggaccugaacgaugcuguccucgcccugaccgaccugggccucaucuacacagcgaaguauccuaauagcucugaccuggaucgccuuucccaaagccaucccauucugaacaugguugacaccaaaaaguccucucucaauaucagcggguacaacuuuucccugggagccgcugugaaagccggcgcuugcaugcuugaugggggaaauaugcuggagacaaucaaggugaccccucagacgauggacggcauucucaaaagcauccugaaggucaaaaagucucugggcauguucguguccgauacacccggggaaagaaacccuuaugagaacauucucuacaagaucugucugagcggagacggcuggccguauauugccucucggaccagcaucguugggcgcgcgugggaaaauacaaccguggaucuugaguccgacggaaaaccccagaaggucggcucugccgggagcaacaaaucccugcagagcgcuggauuuccuaccggccucacauacucucaacugaugacgcugaaggauuccaugaugcagcuugaccccagcgccaaaaccuggauugauaucgagggcagaccugaagaccccguggagaucgcucucuaccagccgaugucugggugcuauauucacuucuuucgggaaccuacagaccugaagcaguucaagcaagaugccaaauacucccauggaaucgacguugccgaucuguuucccgcucagccuggccucaccagcgcggugauugaggcccugcccagaaauaugguccuuacaugucagggguccgacgauaucaagcgccugcucgacucucagggacggaaagauauuaagcugaucgacaucgcucugagcaaagccgauuccagacgcuucgaaaacgccgugugggaccaaugcaaggaucuuugucacaugcauaccggcgucgugguugagaagaaaaagagagggggcaaagaggaaauuacgccccacugcgcucucauggacuguaucauguaugaugccgcggugucuggaggccugaauauuccuguccugcgggcugugcucccgcgcgacaugguuuuucggacaagcucccccaaggugguccugugaggacuaguuauaagacugacuagcccgaugggccucccaacgggcccuccuccccuccuugcaccgagauuaaucaaaggcucuuuucagagccaccaaaaaaaaaaaaaaaaaaaaaaaaaaaaaaaaaaaaaaaaaaaaaaaaaaaaaaaaaaaaaaaaaaaaaaaaaaaaaaaaaaaaaaaaaaaaaaaaaaaaa

SEQ ID NO: 20563 - RNA, 1974 nt, Artificial Sequence
  mRNA product Design i-3 (hSL-A100) comprising derived and/or modified sequence from LASV(Lassa virus/H.sapiens-wt/NGA/2016/ISTH_0009;Clade II)__AVO03572__SP-HsALB_NP(2-569) (opt5)
aggagaaagcuuaccaugaagugggugaccuucaucagccugcucuuucuguucuccucugccuacagcagcgccuccaaggaggugaaaucuuuccuguggacccagagccucagacgggaacuguccggcuacugcucuaacaucaaacuucaagucguuaaggacgcucaggcccugcuccacgggcuggauuuuagcgagguguccaaugugcagcgccuuaugagaaagcagaaacgggacgauucugaccugaagcgccucagagaucugaaccaagcggucaauaaccugguggaacucaagagcacacagcagaaauccauucugcggguuggaacgcuuaccagcgacgaucugcucacacuggcugccgaccuugagaagcugaaaucuaaggugauccgcaccgaaagaccccucuccagcggcgucuauauggggaaucugucuacacagcaacuggagcagcggcgcgcccuccugaacaugauuggaauggugggcggggcucagggaacccagccuggcagagauggcguugugcgggucugggacgugaaaaauccggaucuucugaacaaucaauucgggacaaugcccucccucacccuggccugucuuacgaagcagggacagguggaccugaacgaugcuguccucgcccugaccgaccugggccucaucuacacagcgaaguauccuaauagcucugaccuggaucgccuuucccaaagccaucccauucugaacaugguugacaccaaaaaguccucucucaauaucagcggguacaacuuuucccugggagccgcugugaaagccggcgcuugcaugcuugaugggggaaauaugcuggagacaaucaaggugaccccucagacgauggacggcauucucaaaagcauccugaaggucaaaaagucucugggcauguucguguccgauacacccggggaaagaaacccuuaugagaacauucucuacaagaucugucugagcggagacggcuggccguauauugccucucggaccagcaucguugggcgcgcgugggaaaauacaaccguggaucuugaguccgacggaaaaccccagaaggucggcucugccgggagcaacaaaucccugcagagcgcuggauuuccuaccggccucacauacucucaacugaugacgcugaaggauuccaugaugcagcuugaccccagcgccaaaaccuggauugauaucgagggcagaccugaagaccccguggagaucgcucucuaccagccgaugucugggugcuauauucacuucuuucgggaaccuacagaccugaagcaguucaagcaagaugccaaauacucccauggaaucgacguugccgaucuguuucccgcucagccuggccucaccagcgcggugauugaggcccugcccagaaauaugguccuuacaugucagggguccgacgauaucaagcgccugcucgacucucagggacggagagauauuaaacugaucgacaucgcucugagcaaggccgauucccgccgguucgaaaacgccgugugggaccaaugcaaagaucuuugucacaugcauaccggcgucgugguugagaagaagaaaagagggggcaaggaggaaauuacgccccacugcgcucucauggacuguaucauguaugaugccgcggugucuggaggccugaauauuccuguccugcgcgcugugcucccgcgggacaugguuuuuagaacaagcucccccaaagugguccugugaggacuaguuauaagacugacuagcccgaugggccucccaacgggcccuccuccccuccuugcaccgagauuaaucaaaggcucuuuucagagccaccaaaaaaaaaaaaaaaaaaaaaaaaaaaaaaaaaaaaaaaaaaaaaaaaaaaaaaaaaaaaaaaaaaaaaaaaaaaaaaaaaaaaaaaaaaaaaaaaaaaaa

SEQ ID NO: 20564 - RNA, 1974 nt, Artificial Sequence
  mRNA product Design i-3 (hSL-A100) comprising derived and/or modified sequence from LASV(Lassa virus/H.sapiens-wt/NGA/2016/ISTH_0017;Clade II)__AVO03568__SP-HsALB_NP(2-569) (opt5)
aggagaaagcuuaccaugaagugggugaccuucaucagccugcucuuucuguucuccucugccuacagcagcgccuccaaggaggugaaaucuuuccuguggacccagagccucagacgggaacuguccggcuacugcucuagcaucaaacuucaagucguuaaggacgcucaggcccugcuccacgggcuggauuuuuccgaggugucuaacgugcagcgccuuaugagaaagcagaaacgggacgauagcgaccugaagcgccucagagaucugaaucaagcggucaacaaucugguggaacucaaguccacacagcagaaaagcauucugcggguuggaacgcuuaccucugacgaucugcucacacuggcugccgaccuugagaagcugaaauccaaggugauccgcaccgaaagaccccucagcucuggcgucuauauggggaaccuguccacacagcaacuggagcagcggcgcgcccuccugaauaugauuggaauggcuggcggggcccagggaacccagccuggcagagauggcgugguucgggugugggacgucaaaaacccggaucuucugaauaaccaauucgggacaaugcccagccucacccuggcuugucuuacgaagcagggacagguggaccugaaugaugccgugcucgcgcugaccgaccugggccucaucuacacagccaaguauccuaacucuuccgaccuggaucgccuuagccaaucccaucccauucugaauauggucgacaccaaaaagucuagccucaacaucuccggguacaauuuuagccugggagcugccguuaaagcuggcgccugcaugcuugaugggggaaacaugcuggagacaaucaaggugaccccucagacgauggacggcauucucaaaucuauccugaaggugaaaagaucccugggcauguucgucagcgaugcgcccggggaacggaauccuuaugagaacauucucuacaagaucugucugucuggagacggcuggccguauauugccagccgcacauccaucguggggagagcuugggaaaacaccacaguugaucuugagucugacggaaagccccagaaagugggcgccaccgggagcaauaagucccugcagagcgcuggauuuccuaccggccucacauacucucaacugaugacgcugaaagauuccaugaugcagcuugaccccagcgccaagaccuggauugauaucgagggccggccugaagaccccgucgagguggcccucuaccagccgguuucugggugcuauauccacuucuuuagagaaccuacagaccugaaacaguucaagcaagaugcuaaguacucccauggaauugacguggcggaucuguuucccgcccagccuggccucaccagcgcugucaucgaggcccugccccgcaacauggugcuuacaugucagggguccgacgauauuaaaaagcugcucgacucucagggacggaaagauaucaagcugauugacaucgcccugagcaaagcugauuccagacgcuucgaaaaugccgucugggaccaaugcaaggaucuuugucacaugcauaccggcgugguuguggagaagaaaaagagagggggcaaagaggaaaucacgccccacugcgcgcucauggacuguauuauguaugaugcugccgucucuggaggccugaacaucccugugcugcgggccguucucccgcgcgacaugguguuucggacaagcucccccaaggucgugcugugaggacuaguuauaagacugacuagcccgaugggccucccaacgggcccuccuccccuccuugcaccgagauuaaucaaaggcucuuuucagagccaccaaaaaaaaaaaaaaaaaaaaaaaaaaaaaaaaaaaaaaaaaaaaaaaaaaaaaaaaaaaaaaaaaaaaaaaaaaaaaaaaaaaaaaaaaaaaaaaaaaaaa

SEQ ID NO: 20565 - RNA, 1974 nt, Artificial Sequence
  mRNA product Design i-3 (hSL-A100) comprising derived and/or modified sequence from LASV(Lassa virus/H.sapiens-wt/NGA/2018/ISTH_0959;Clade II)__AVV65100__SP-HsALB_NP(2-569) (opt5)
aggagaaagcuuaccaugaagugggugaccuucaucagccugcucuuucuguucuccucugccuacagcagcgccuccaaggaggugaaaucuuuccuguggacccagagccucagacgggaacuguccggcuacugcucuaacaucaaacuucaagucguuaaggacgcucaggcccugcuccacgggcuggauuuuagcgagguguccaaugugcagcgccuuaugagaaagcagaaacgggacgauucugaccugaagcgccucagagaucugaaccaagcggucaauaaccugguggaacucaagagcacccagcagaaauccauucugcggguuggaacgcuuaccagcgacgaucugcucacacuggcugccgaccuugagaagcugaaaucuaaggugauccgcaccgaaagaccccucuccagcggcgucuauauggggaaucugucuacacagcaacuggagcagcggcgcgcccuccugaaccuuauuggaauggugggcggggcucagggaacccagccuggcagagauggcguugugcgggucugggacgugaaaaauccggaucugcucaacaaucaauucgggacaaugcccucccugacccuugccugucugacgaagcagggacagguggaccucaacgaugucguucuggcucugaccgaccucggccugaucuacacagccaaguauccuaauagcucugaccuugaucgccugucccaaagccaucccauucucaacaugguggacaccaaaaaguccucucugaauaucagcggguuuaacuucucccuuggagcggccgugaaagcuggcgccugcaugcuggaugggggaaauaugcucgagacaaucaaggucaccccucagacgauggacggcauucugaaaagcauccugaaggugaaaaagucucucggcauguuuguuuccgauacacccggggaaagaaacccuuacgagaacauucuguauaagaucugucuuagcggagacggcuggccguacauugcuucucggaccagcaucguggggcgcgccugggaaaauacaaccgucgaucuggaguccgacggaaaaccccacaaggugggcaccgcggggucuaacaaaagccuccaguccgccggauucccuacaggccugacguauagccagcugaugacccuuaaggauucuaugaugcaacucgaccccuccgcuaaaacauggauugauaucgagggcagaccugaagaccccguugagaucgcccuguaccagccgaugagcgggugcuacauucacuuuuuccgggaaccuaccgaccugaagcaguuuaagcaggaugcuaaauauucucauggaaucgacguggccgaucucuuccccgcccaaccuggccugacauccgcugucauugaggcgcuucccagaaauauggugcugaccugucaggggagcgacgauaucaagcgccuccuggacucccagggacggaaagauauuaagcugaucgacaucgcccuuucuaaaacggauagcagacgcuuugaaaacgcugucugggaccagugcaaggaucucugucauaugcacacaggcgugguuguggagaagaaaaagagagggggcaaagaggaaauuacaccccacugcgcccugauggacuguaucauguacgaugccgcugucuccggaggccugaauauuccugugcuccgggccguucugccgcgcgacaugguguuccggaccucuagccccaaggucgugcuuugaggacuaguuauaagacugacuagcccgaugggccucccaacgggcccuccuccccuccuugcaccgagauuaaucaaaggcucuuuucagagccaccaaaaaaaaaaaaaaaaaaaaaaaaaaaaaaaaaaaaaaaaaaaaaaaaaaaaaaaaaaaaaaaaaaaaaaaaaaaaaaaaaaaaaaaaaaaaaaaaaaaaa

SEQ ID NO: 20566 - RNA, 1974 nt, Artificial Sequence
  mRNA product Design i-3 (hSL-A100) comprising derived and/or modified sequence from LASV(LASV003-NIG-2008;Clade II)__AIT17581__SP-HsALB_NP(2-569) (opt5)
aggagaaagcuuaccaugaagugggugaccuucaucagccugcucuuucuguucuccucugccuacagcagcgccuccaaggaggugaaaucuuuccuguggacccagagccucagacgggaacuguccggcuacugcucuagcaucaaacuucaagucguuaaggacgcucaggcccugcuccacgggcuggauuuuuccgaggugucuaacgugcagcgccuuaugagaaagcagaaacgggacgauagcgaccugaagcgccucagagaucugaaucaagcggucaacaaucugguggaacucaaguccacccagcagaaaagcguucugcgggugggaacgcuuaccucugacgaucugcucacacuggcugccgaccuugagaagcugaaauccaaggucauucgcaccgaaagaccccucagcucuggcguguauauggggaaccuguccgcccagcaacuggagcagcggcgcacacuccugaauaugaucggaaugguuggcggggcucagggaacccagccuggcagagauggcgugguccgggugugggacgugaaaaacccggaucuucugaauaaccaauucgggacaaugcccagccucacccuggccugucuuacgaagcagggacaggucgaccugaaugauguugugcucgcucugaccgaccugggccucauuuacacagccaaguauccuaacucuuccgaccuggaucgccuuagccaaucccaucccauccugucuaugguggacaccaaaaagagcucccucaauauuagcggguacaacuuuucucugggagcggccgucaaagcuggcgccugcaugcuugaugggggaaauaugcuggagacaaucaaggugaccccucagacgauggacggcauccucaaauccauucugaagguuaaaaagagccugggcauguucgugucugauacacccggggaaagaaacccuuaugagaauauccucuacaagauuugucugagcggagacggcuggccguauaucgcuucccggaccucuauugucgggcgcgccugggaaaacacaaccguggaucuugagagcgacggaaaaccccagaagguuggcaccgcgggguccaacaaaagccugcagucugccggauuuccuacaggccucacguacucccaacugaugacccugaaggauagcaugaugcagcuugaccccucugcuaaaacauggaucgauauugagggcagaccugaagaccccguggagaucgcccucuaccagccgauguccgggugcuauauccacuucuuucgggaaccuaccgaccugaagcaguucaagcaagaugcuaaauacagccauggaauugacgucacagaucuguuucccgcccagccuggccucaccuccgccgugaucgaggcucugcccagaaauaugguccuuacgugucaggggucugacgauauuaagcgccugcucgacagccagggacggagagauaucaaacugauugacaucgcgcuguccaaggccgauucucgccgguucgaaaacgcugugugggaccaaugcaaagaucuuugucacaugcauacaggcguuguggucgagaagaagaaaagagggggcaaggaggaaaucacaccccacugcgcccucauggacuguauuauguaugaugccgcugugagcggaggccugaauaucccuguucugcgcgccgugcucccgcgggacauggucuuuagaaccuccagccccaaaguggugcugugaggacuaguuauaagacugacuagcccgaugggccucccaacgggcccuccuccccuccuugcaccgagauuaaucaaaggcucuuuucagagccaccaaaaaaaaaaaaaaaaaaaaaaaaaaaaaaaaaaaaaaaaaaaaaaaaaaaaaaaaaaaaaaaaaaaaaaaaaaaaaaaaaaaaaaaaaaaaaaaaaaaaa

SEQ ID NO: 20567 - RNA, 1974 nt, Artificial Sequence
  mRNA product Design i-3 (hSL-A100) comprising derived and/or modified sequence from LASV(LASV035-NIG-2009;Clade II)__AIT17589__SP-HsALB_NP(2-569) (opt5)
aggagaaagcuuaccaugaagugggugaccuucaucagccugcucuuucuguucuccucugccuacagcagcgccuccaaggaggugaaaucuuuccuguggacccagagccucagacgggaacuguccggcuacugcucuagcaucaaacuucaagucguuaaagacgcucaggcccugcuccacgggcuggauuuuuccgaggugucuaacgugcagcgccuuaugagaaagcagaaacgggacgauagcgaccugaagcgccucagagaucugaaucaagcggucaacaaucugguggaacucaaguccacacagcagaaaagcauucugcggguuggaacgcuuaccucugacgaucugcucacacuggcugccgaccuugagaagcugaaauccaaggugauccgcaccgaaagaccccucagcucuggcgucuauauggggaaccuguccgcccagcaacuggagcagcggcgcgcucuccugaauaugauuggaauggugggcggggcccagggaacacagccuggcagagauggcguugugcgggucugggacgugaaaaacccggaucuucugaauaaccaauucgggaccaugcccagccucacacuggcuugucuuaccaagcagggacagguggaccugaaugaugccguccucgcgcugacggaccugggccucaucuacaccgccaaguauccuaacucuuccgaccuggaucgccuuagccaaucccaucccauucugaauaugguugacacaaagaagucuagccucaacaucuccggguacaauuuuagccugggagcugccgugaaagcuggcgccugcaugcuugaugggggaaacaugcuggagaccaucaaggugacaccucagaccauggacggcauucucaaaucuauccugaaggucaaaagaucccugggcauguucgugagcgauacgcccggggaacggaauccuuaugagaacauucucuacaagaucugucugucuggagacggcuggccguauauugcgagccgcacauccaucguugggagagccugggaaaacaccacaguggaucuugagucugacggaaagccccagaaagucggcaccaccgggagcaauaagucccugcagagcgcuggauuuccuacaggccucacguacucucaacugaugacccugaaagauuccaugaugcagcuugaccccagcgccaagacauggauugauaucgagggccggccugaagaccccguggagaucgcucucuaccagccgaugucugggugcuauauucacuucuuuagagaaccuaccgaccugaaacaguucaagcaagaugccaaguacucccauggaaucgacguugccgaucuguuucccgcucagccuggccucacaagcgcggugauugaggcccugccccgcaacaugguccuuaccugucagggguccgacgauaucaaaaagcugcucgacucucagggacggagagauauuaaacugaucgacaucgcucugagcaaggccgauucccgcaaauucgaaaaugccgugugggaccaaugcaaggaucuuugucacaugcauacgggcgucgugguugagaagaaaaagagagggggcaaagaggaaauuacaccccacugcgcucucauggacuguaucauguaugaugccgcggugucuggaggccugaacauuccuguccugcgggcugugcucccgcgcgacaugguuuuucggaccagcucccccaaggugguccugugaggacuaguuauaagacugacuagcccgaugggccucccaacgggcccuccuccccuccuugcaccgagauuaaucaaaggcucuuuucagagccaccaaaaaaaaaaaaaaaaaaaaaaaaaaaaaaaaaaaaaaaaaaaaaaaaaaaaaaaaaaaaaaaaaaaaaaaaaaaaaaaaaaaaaaaaaaaaaaaaaaaaa

SEQ ID NO: 20568 - RNA, 1974 nt, Artificial Sequence
  mRNA product Design i-3 (hSL-A100) comprising derived and/or modified sequence from LASV(LASV1000-NIG-2009;Clade II)__AIT17783__SP-HsALB_NP(2-569) (opt5)
aggagaaagcuuaccaugaagugggugaccuucaucagccugcucuuucuguucuccucugccuacagcagcgccuccaaggaggugaaaucuuuccuguggacccagagccucagacgggaacuguccggcuacugcucuaacaucaaacuucaagucguuaaggacgcucaggcccugcuccacgggcuggauuuuagcgagguguccaaugugcagcgccuuaugagaaagcagaaacgggacgauucugaccugaagcgccucagagaucugaaccaagcggucaauaaccugguggaacucaagagcacacagcagaaauccauucugcggguuggaacgcuuaccagcgacgaucugcucacacuggcugccgaccuugagaagcugaaaucuaaggugauccgcaccgaaagaccccucuccagcggcgucuauauggggaaucugucuacacagcaacuggagcagcggcgcgcccuccugaacaugauuggaauggugggcggggcucagggaacccagccuggcagagauggcguugugcgggucugggacgugaaaaauccggaucuucugaacaaucaauucgggacaaugcccucccucacccuggccugucuuacgaagcagggacagguggaccugaacgaugucguucucgcucugaccgaccugggccucaucuacacagccaaguauccuaauagcucugaccuggaucgccuuucccaaagccaucccauucugaacaugguggacaccaaaaaguccucucucaauaucagcggguacaacuuuucccugggagcggccgugaaagcuggcgccugcaugcuugaugggggaaauaugcuggagacaaucaaggucaccccucagacgauggacggcauucucaaaagcauccugaaggugaaaaagucucugggcauguucguuuccgauacacccggggaaagaaacccuuaugagaacauucucuacaagaucugucugagcggagacggcuggccguauauugcuucucggaccagcaucguggggcgcgccugggaaaauacaaccgucgaucuugaguccgacggaaaaccccagaaggugggcaccgcggggucuaacaaaagccugcaguccgccggauuuccuacaggccucacguacagccaacugaugacccugaaggauucuaugaugcagcuugaccccuccgcuaaaacauggauugauaucgagggcagaccugaagaccccguugagaucgcccucuaccagccggugagcgggugcuauauucacuucuuucgggaaccuaccgaccugaagcaguucaagcaagaugcuaaauacucucauggaaucgacgucgccgaucuguuucccgcccagccuggccucacauccgcugugauugaggcgcugcccagaaauaugguccuuaccugucaggggagcgacgauaucaagcgccugcucgacucccagggacggagagauauuaaacugaucgacaucgcccugucuaaggcugauagccgccgguucgaaaacgccgugugggaccaaugcaaagaucuuugucacaugcauacgggcguuguggucgagaagaagaaaagagggggcaaggaggaaauuacaccccacugcgcccucauggacuguaucauguaugaugcugccguguccggaggccugaauauuccuguucugcgcgcggugcucccgcgggacauggucuuuagaaccucuagccccaaaguggugcugugaggacuaguuauaagacugacuagcccgaugggccucccaacgggcccuccuccccuccuugcaccgagauuaaucaaaggcucuuuucagagccaccaaaaaaaaaaaaaaaaaaaaaaaaaaaaaaaaaaaaaaaaaaaaaaaaaaaaaaaaaaaaaaaaaaaaaaaaaaaaaaaaaaaaaaaaaaaaaaaaaaaaa

SEQ ID NO: 20569 - RNA, 1974 nt, Artificial Sequence
  mRNA product Design i-3 (hSL-A100) comprising derived and/or modified sequence from LASV(LASV221-NIG-2010;Clade II)__AIT17625__SP-HsALB_NP(2-569) (opt5)
aggagaaagcuuaccaugaagugggugaccuucaucagccugcucuuucuguucuccucugccuacagcagcgccuccaaggaggugaaaucuuuccuguggacccagagccucagacgggaacuguccggcuacugcucuagcaucaaacuucaagucguuaaggacgcucaggcccugcuccacgggcuggauuuuuccgaggugucuaacgugcagcgccuuaugagaaagcagcggcgcgacgauagcgaccugaaaagacuccgggaucugaaucaagcggucaacaaucugguggaacucaaguccacacagcaaaagagcauucugcgcguuggaacgcuuaccucugacgaucugcucacacuggcugccgaccuugagaaacugaaguccaaagugaucagaaccgaacggccccucagcucuggcgucuauauggggaaccuguccacacagcagcuggagcagcgcagagcccuccugaauaugauuggaauggugggcggggcucagggaacccagccuggccgggauggcguugugcgcgucugggacgugaagaacccggaucuucugaauaaccaauucgggacaaugcccagccucacccuggccugucuuacgaaacagggacagguggaccugaaugaugcuguccucgcccugaccgaccugggccucaucuacacagcgaaguauccuaacucuuccgaccuggauagacuuagccaaucccaucccauucugaauaugguugacaccaagaaaucuagccucaacaucuccggguacaauuuuagccugggagccgcugugaaggccggcgcuugcaugcuugaugggggaaacaugcuggagacaaucaaagugaccccucagacggucgacggcauucucaagucuauccugaaagugaagcggucccugggcauguucguuagcgauacacccggggaacgcaauccuuaugagaacauucucuacaaaaucugucugucuggagacggcuggccguauauugccagcagaaccuccaucguggggcgggcgugggaaaacacaaccgucgaucuugagucugacggaaagccccagaaggugggcaccgccgggagcaauaaaucccugcagagcgcuggauuuccuacaggccucacguacucucaacugaugacccugaaggauuccaugaugcagcuugaccccagcgccaaaacauggauugauaucgagggcagaccugaagaccccguugagaucgcucucuaccagccgaugucugggugcuauauucacuucuuucgcgaaccuaccgaccugaagcaguucaaacaagaugccaaguacucccauggaaucgacguggccgaucuguuucccgcucagccuggccucacaagcgcggucauugaggcccugccccggaacauggugcuuaccugucagggguccgacgauaucaagagacugcucgacucucagggacgccgggauauuaaacugaucgacaucgcucugagcaaggccgauuccagaaaauucgaaaaugccgucugggaccaaugcaaggaucuuugucacaugcauacgggcgugguuguggagaaaaagaagcgcgggggcaaagaggaaauuacaccccacugcgcucucauggacuguaucauguaugaugccgcggucucuggaggccugaacauuccugugcugcgggcuguucucccgagagacaugguguuucgcaccagcucccccaaggucgugcugugaggacuaguuauaagacugacuagcccgaugggccucccaacgggcccuccuccccuccuugcaccgagauuaaucaaaggcucuuuucagagccaccaaaaaaaaaaaaaaaaaaaaaaaaaaaaaaaaaaaaaaaaaaaaaaaaaaaaaaaaaaaaaaaaaaaaaaaaaaaaaaaaaaaaaaaaaaaaaaaaaaaaa

SEQ ID NO: 20570 - RNA, 1974 nt, Artificial Sequence
  mRNA product Design i-3 (hSL-A100) comprising derived and/or modified sequence from LASV(LASV237-NIG-2010;Clade II)__AIT17639__SP-HsALB_NP(2-569) (opt5)
aggagaaagcuuaccaugaagugggugaccuucaucagccugcucuuucuguucuccucugccuacagcagcgccuccaaggaggugaaaucuuuccuguggacccagagccucagacgggaacuguccggcuacugcucuaacaucaaacuucaagucguuaaggacgcucaggcccugcuccacgggcuggauuuuagcgagguguccaaugugcagcgccuuaugagaaagcagaaacgggacgauucugaccugaagcgccucagagaucugaaccaagcggucaauaaccugguggaacucaagagcacacagcagaaauccauucugcggguuggaacgcuuaccagcgacgaucugcucacacuggcugccgaccuugagaagcugaaaucuaaggugauccgcaccgaaagaccccucuccagcggcgucuauauggggaaucugucuacacagcaacuggagcagcggcgcgcccuccugaacaugauuggaauggugggcggggcucagggaacccagccuggcagagauggcguugugcgggucugggacgugaaaaauccggaucuucugaacaaucaauucgggacaaugcccucccucacccuggccugucuuacgaagcagggacagguggaccugaacgaugcuguccucgcccugaccgaccugggccucaucuacacagcgaaguauccuaauagcucugaccuggaucgccuuucccaaagccaucccauucugaacaugguugacaucaaaaaguccucucucaauaucagcggguacaacuuuucccugggagccgcugugaaagccggcgcuugcaugcuugaugggggaaauaugcuggagaccauuaaggugacaccucagaccauggacggcauccucaaaagcauucugaaggucaaaagaucucugggcauguucguguccgauacgcccggggaacggaacccuuaugagaacauccucuacaagauuugucugagcggagacggcuggccguauaucgccucucgcacaagcauuguugggagagcgugggaaaauaccacaguggaucuugaguccgacggaaagccccagaaagucggcucugccgggagcaacaagucccugcagagcgcuggauuuccuaccggccucaccuacucucaacugaugacacugaaagauuccaugaugcagcuugaccccagcgccaagacguggaucgauaucgagggccggccugaagaccccguggagauugcucucuaccagccgaugucugggugcuauauccacuucuuuagagaaccuaccgaccugaaacaguucaagcaagaugccaaguacucccauggaauugacguugccgaucuguuucccgcucagccuggccucacaagcgcggugaucgaggcccugccccgcaauaugguccuuaccugucagggguccgacgauauuaaacggcugcucgacucucagggaagacgcgauaucaagcugaucgacauugcucugagcaaagccgauucccggagauucgaaaacgccgugugggaccaaugcaaggaucuuugucacaugcauacaggcgucgugguugagaaaaagaagcgcgggggcaaagaggaaaucacgccccacugcgcucucauggacuguauuauguaugaugccgcggugucuggaggccugaauaucccuguccugcgggcugugcucccgagagacaugguuuuucgcaccagcucccccaaggugguccugugaggacuaguuauaagacugacuagcccgaugggccucccaacgggcccuccuccccuccuugcaccgagauuaaucaaaggcucuuuucagagccaccaaaaaaaaaaaaaaaaaaaaaaaaaaaaaaaaaaaaaaaaaaaaaaaaaaaaaaaaaaaaaaaaaaaaaaaaaaaaaaaaaaaaaaaaaaaaaaaaaaaaa

SEQ ID NO: 20571 - RNA, 1974 nt, Artificial Sequence
  mRNA product Design i-3 (hSL-A100) comprising derived and/or modified sequence from LASV(LASV253-NIG-2011;Clade II)__AIT17671__SP-HsALB_NP(2-569) (opt5)
aggagaaagcuuaccaugaagugggugaccuucaucagccugcucuuucuguucuccucugccuacagcagcgccuccaaggaggugaaaucuuuccuguggacccagagccucagacgggaacuguccggcuacugcucuagcaucaaacuucaagucguuaaggacgcucaggcccugcuccacgggcuggauuuuuccgaggugucuaacgugcagcgccuuaugagaaagcagaaacgggacgauagcgaccugaagcgccucagagaucugaaucaagcggucaacaaucugguggaacucaaguccacccagcagaaaagcguucugcgggugggaacgcuuaccucugacgaucugcucacacuggcugccgaccuugagaagcugaaauccaaggucauucgcaccgaaagaccccucagcucuggcguguauauggggaaccuguccacacagcaacuggagcagcggcgcgcccuccugaauaugaucggaaugguuggcggggcucagggaacccagccuggcagagauggcgugguccgggugugggacgugaaaaacccggaucuucugaauaaccaauucgggacaaugcccagccucacccuggccugucuuacgaagcagggacaggucgaccugaaugauguugugcucgcucugaccgaccugggccucauuuacacagccaaguauccuaacucuuccgaccuggaucgccuuagccaaucccaucccauccugaauaugguggacaccaaaaagucuagccucaacauuuccggguacaauuuuagccugggagcggccgucaaagcuggcgccugcaugcuugaugggggaaacaugcuggagacaaucaaggugaccccucagacgauggacggcauccucaaaucuauucugaagguuaaaaagucccugggcauguucgugagcgauacacccggggaaagaaauccuuaugagaacauccucuacaagauuugucugucuggagacggcuggccguauaucgcuagccggaccuccauugucgggcgcgccugggaaaacacaaccguggaucuugagucugacggaaaaccccagaagguuggcaccgcggggagcaauaaaucccugcagagcgccggauuuccuacaggccucacguacucucaacugaugacccugaaggauuccaugaugcagcuugaccccagcgcuaaaacauggaucgauauugagggcagaccugaagaccccguggagaucgcccucuaccagccgaugucugggugcuauauccacuucuuucgggaaccuaccgaccugaagcaguucaagcaagaugcuaaauacucccauggaauugacgucacagaucuguuucccgcccagccuggccucaccagcgccgugaucgaggcucugcccagaaacaugguccuuacgugucagggguccgacgauauuaagcgccugcucgacucucagggacggagagauaucaaacugauugacaucgcgcugagcaaggccgauucccgccgguucgaaaaugcugugugggaccaaugcaaagaucuuugucacaugcauacaggcguuguggucgagaagaagaaaagagggggcaaggaggaaaucacaccccacugcgcccucauggacuguauuauguaugaugccgcugugucuggaggccugaacaucccuguucugcgcgccgugcucccgcgggacauggucuuuagaaccagcucccccaaaguggugcugugaggacuaguuauaagacugacuagcccgaugggccucccaacgggcccuccuccccuccuugcaccgagauuaaucaaaggcucuuuucagagccaccaaaaaaaaaaaaaaaaaaaaaaaaaaaaaaaaaaaaaaaaaaaaaaaaaaaaaaaaaaaaaaaaaaaaaaaaaaaaaaaaaaaaaaaaaaaaaaaaaaaaa

SEQ ID NO: 20572 - RNA, 1974 nt, Artificial Sequence
  mRNA product Design i-3 (hSL-A100) comprising derived and/or modified sequence from LASV(LASV254-NIG-2011;Clade II)__AIT17675__SP-HsALB_NP(2-569) (opt5)
aggagaaagcuuaccaugaagugggugaccuucaucagccugcucuuucuguucuccucugccuacagcagcgccuccaaggaggugaaaucuuuccuguggacccagagccucagacgggaacuguccggcuacugcucuagcaucaaacuucaagucguuaaggacgcucaggcccugcuccacgggcuggauuuuuccgaggugucuaacgugcagcgccuuaugagaaagcagaaacgggacgauagcgaccugaagcgccucagagaucugaaucaagcggucaacaaucugguggaacucaaguccacacagcagaaaagcguucugcgggugggaacgcuuaccucugacgaucugcucacacuggcugccgaccuugagaagcugaaauccaaggucauucgcaccgaaagaccccucagcucuggcguguauauggggaaccuguccacacagcaacuggagcagcggcgcgcccuccugaauaugaucggaaugguuggcggggcucagggaacccagccuggcagagauggcgugguccgggugugggacgugaaaaacccggaucuucugaauaaccaauucgggacaaugcccagccucacccuggccugucuuacgaagcagggacaggucgaccugaaugaugcuguucucgcccugaccgaccugggccucauuuacacagcgaaguauccuaacucuuccgaccuggaucgccuuagccaaucccaucccauccugaauaugguggacaccaaaaagucuagccucaacauuuccggguacaauuuuagccugggagccgcugugaaagccggcgcuugcaugcuugaugggggaaacaugcuggagacaaucaaggucaccccucagacgauggacggcauccucaaaucuauucugaaggugaaaaagucccugggcauguucguuagcgauacacccggggaaagaaauccuuaugagaacauccucuacaagauuugucugucuggagacggcuggccguauaucgccagccggaccuccauuguggggcgcgcgugggaaaacacaaucgucgaucuugagucugacggaaaaccccagaaggugggcaccgccgggagcaauaaaucccugcagagcgcuggauuuccuaccggccucacauacucucaacugaugacgcugaaggauuccaugaugcagcuugaccccagcgccaaaaccuggauugauaucgagggcagaccugaagaccccguugagaucgcucucuaccagccgaugucugggugcuauauucacuucuuucgggaaccuacagaccugaagcaguucaagcaagaugccaaauacucccauggaaucgacguggccgaucuguuucccgcucagccuggccucaccagcgcggucauugaggcccugcccagaaacauggugcuuacaugucagggguccgacgauaucaagcgccugcucgacucucagggacggagagauauuaaacugaucgacaucgcucugagcaaggccgauucccgccgguucgaaaaugccgucugggaccaaugcaaagaucuuugucacaugcauaccggcgugguuguggagaagaagaaaagagggggcaaggaggaaauuacgccccacugcgcucucauggacuguaucauguaugaugccgcggucucuggaggccugaacauuccugugcugcgcgcuguucucccgcgggacaugguguuuagaacaagcucccccaaagucgugcugugaggacuaguuauaagacugacuagcccgaugggccucccaacgggcccuccuccccuccuugcaccgagauuaaucaaaggcucuuuucagagccaccaaaaaaaaaaaaaaaaaaaaaaaaaaaaaaaaaaaaaaaaaaaaaaaaaaaaaaaaaaaaaaaaaaaaaaaaaaaaaaaaaaaaaaaaaaaaaaaaaaaaa

SEQ ID NO: 20573 - RNA, 1974 nt, Artificial Sequence
  mRNA product Design i-3 (hSL-A100) comprising derived and/or modified sequence from LASV(Nig08-04;Clade II)__ADU56611__SP-HsALB_NP(2-569) (opt5)
aggagaaagcuuaccaugaagugggugaccuucaucagccugcucuuucuguucuccucugccuacagcagcgccuccaaggaggugaaaucuuuccuguggacccagagccucagacgggaacuguccggcuacugcucuaacaucaaacuucaagucguuaaggacgcucaggcccugcuccacgggcuggauuuuagcgagguguccaaugugcagcgccuuaugagaaagcagaaacgggacgauggagaccugaagcgccucagagaucugaaccaagcggucaauaaccugguggaacucaagucuacccagcagaaaagcguucugcgggugggcacgcuuaccuccgacgaucugcucacacuggcugccgaccuugagaagcugaaaagcaaggucauucgcaccgaaagaccccucucuuccgggguguauaugggaaaucugagcacacagcaacuggagcagcggaaagcccuccugucuaugaucggcaugguugggggagcucagggcacccagccuggccgcgaugggguggucagagugugggacgugaagaacccggaucuucugaauaaccaauucggaacaaugcccucccucacccuggccugucuuacgaagcagggccaggucgaccugaaugaugcuguucucgcccugaccgaccuggggcucauuuacacagcgaaauauccuaacagcucugaccuggaucggcuuucccaaagccaucccauccugaauaugguggacaccaagaaauccucucucaacauuagcggauacaauuuuucccugggcgccgcugugaaggccggggcuugcaugcuugauggaggcaacaugcuggagacaaucaaagucaccccucagacgauggacggcauccucaagagcauucugaaagugaagcgcucucuggggauguucguuuccgauacacccggagaaagaaauccuuaugagaacauccucuacaagauuugucugagcggcgacggguggccguauaucgccucucggaccagcauugugggacgcgcgugggaaaacacaaccgucgaucuugaguccgacggcaaaccccagaagguggggaccgccggaucuaauaaaagccugcaguccgcuggcuuuccuacaggccucacguacagccaacugaugacccugaaggauucuaugaugcagcuugaccccuccgccaaaacauggaucgauauugaggggagaccugaagaccccguugagaucgcucucuaccagccgaugagcggaugcuauauccacuucuuucgggaaccuaccgaccugaagcaguucaagcaagaugccaaauacucucauggcauugacgugacagaucuguuuuccgcccagcccgggcucaccagcgcugucaucgaggcgcugccuagaaacauggugcuuacgugucagggauccgacgauauuaagaaacugcucgacucucagggccgccgggauaucaagcugauugacaucagccugaauaaagccgauuccagacgcuucgaaaacgcugucugggaccaaugcaaggaucuuugucacaugcauacaggggugguuguggagaagaaaaagcggggcggaaaagaggaaaucacaccccacugcgcccucauggacuguauuauguuugaugccgcugucucuggcgggcugaauauccccauucugagagccgugcucccucgcgacaugguuuuccggaccagcuccccgaaggugguccugugaggacuaguuauaagacugacuagcccgaugggccucccaacgggcccuccuccccuccuugcaccgagauuaaucaaaggcucuuuucagagccaccaaaaaaaaaaaaaaaaaaaaaaaaaaaaaaaaaaaaaaaaaaaaaaaaaaaaaaaaaaaaaaaaaaaaaaaaaaaaaaaaaaaaaaaaaaaaaaaaaaaaa

SEQ ID NO: 20574 - RNA, 1977 nt, Artificial Sequence
  mRNA product Design i-3 (hSL-A100) comprising derived and/or modified sequence from LASV(GA391;Clade III)__AAA46284__SP-HsALB_NP(2-570) (opt5)
aggagaaagcuuaccaugaagugggugaccuucaucagccugcucuuucuguucuccucugccuacagcagcgccuccaaggaggugagaucuugccuguggacccagagccuccggcgcgaacuguccggcuacuguucuaacaucaaacuucaagucguuaaggacgcucaggcccugcuccacgggcuggauuucagcgagguguccaaugugcagagacuuaugcggaaacagaagcgcgacgauggagaccugaaaagacuccgggaucugaaccaagcggucaauaaccugguggaacucaagucuacacagcagaaaagcguucugcgcgugggcacgcuuuccagcgacgaucugcucauucuggcugccgaccuugagaaacugaagucuaaagucaccagaacagaacggccccucuccagcgggguguauaugggaaaucugucuucccagcaacuggaucagcgcagagcccuccugaacaugaucggcaugaccgggguuagcggaggcggcaagggggcuucuaauggaauugugcgggucugggacgugaaaaacgccgagcuucugaauaaccaguuuggcacaaugccuucccucacccuggcuugccuuacaaagcaggggcaaguggaucugaaugacgccguccaggcgcucaccgaucugggacugaucuacacggccaaguauccgaacagcuccgaccucgaccgccugucucagagccaucccauucuuaauaugaucgauaccaaaaaguccagccugaacaucucuggcuacaauuucucccucggggcugccguuaaagcuggagccuguaugcuggacggcggcaacaugcuugagacaauuaaggugagcccucaaaccauggaugggauccugaaaucuauucucaaggugaaaaagagccugggaauguuugucuccgacacacccggcgaaagaaacccuuaugagaauauccuguacaagauuugccucucuggggauggauggagcuauaucgcgucccggaccagcauugugggccgcgccugggaaaacacgguuguggaccuggagcaggauaauaaaccccagaagaucgggaacggaggcucuaauaaaucccuucagagcgcuggcuucgccgcugggcugaucuacucucaacucaugacacugaaggacuuuaaauguuucaaccugauuccuaaugccaagaccuggauggauaucgagggaagaccggaagaccccgucgagauugcccuuuaccagccuuccagcggcugcuaugugcacuuuuuccgggaacccacagaucucaagcaguuuaaacaggacgcuaaguacucccaugggagagacguuaccgaucuguucgcggcccaaccuggacugaccucugcugugaucgaggcccucccccgcaacauggucauuacaugucagggcagcgaagacauccggaaacugcuugagucccaggggagacgcgauaucaagcugauugacaucacgcucucuaaagccgauagccggaaguuugagaaugcugugugggaccaguucaaggaucugugccacaugcauaccggcgucgugguugaaaagaagaaaagaggaggcaaggaggaaauuacaccgcacugugcccugauggacugcaucauguuugaugcggcuguguccgggggacuugacgccaaaguccuccgcgugguucugccucgggauaugguguucagaaccagcacacccaaggucgugcugugaggacuaguuauaagacugacuagcccgaugggccucccaacgggcccuccuccccuccuugcaccgagauuaaucaaaggcucuuuucagagccaccaaaaaaaaaaaaaaaaaaaaaaaaaaaaaaaaaaaaaaaaaaaaaaaaaaaaaaaaaaaaaaaaaaaaaaaaaaaaaaaaaaaaaaaaaaaaaaaaaaaaa

SEQ ID NO: 20575 - RNA, 1974 nt, Artificial Sequence
  mRNA product Design i-3 (hSL-A100) comprising derived and/or modified sequence from LASV(Nig08-A19;Clade III)__ADU56619__SP-HsALB_NP(2-569) (opt5)
aggagaaagcuuaccaugaagugggugaccuucaucagccugcucuuucuguucuccucugccuacagcagcgccuccaaggaggugaaaucuuuccuguggacccagagccucagacgggaacuguccggcuacugcucuaacaucaaacuucaagucguuaaggacgcucaggcccugcuccacgggcuggauuuuagcgagguguccaaugugcagcgccuuaugagaaagcagaaacgggacgauggagaccugaagcgccucagagaucugaaccaagcggucaauaaccugguggaacucaagucuacacagcagaaaagcguucugcgggugggcacgcuuuccagcgacgaucugcucguccuggcugccgaccuugagaagcugaaaucuaaggugguucgcaccgaaagaccccucuccagcgggauuuauaugggaaaucugucuucccagcaacuggaucagcggaaagcccuccugaacaugaucggcaugacagggggaaauggcggccgcaacaccacaagcgacgggauugugagagucugggaugugaagaaugcugagcuucugaacaaucaguucggaaccaugccuucucucacacuggccugucuuaccaagcagggccaaguggaccugaacgaugcuguccaggcccucacggaccuggggcugaucuacaccgcgaaauaucccaauuccagcgaccucgaucggcuggcccagucccauccgauucuuaacaugaucgacacaaagaaaucuagccugaauaucuccggauacaacuuuagccucggcgcugccguuaaggcuggggccugcaugcuggauggaggcaacaugcuugagaccauuaaagugucuccucaaacaauggacggcauccugaaguccauucucaaagugaagcgcagccuggggauguucaucucugauacccccggagaaagaaauccuuaugagaacauucuguacaagaucugucucagcggcgacggguggcccuauauugcgucccggacgucuaucgucggacgcgccugggaaaauacagugguugaucuggagagcgacaacaaaccucagaagaccggcaaugggggauccaacaaaagccuucagucugcuggcuuugccgcuggccugacauacucccagcucaugacccugaaggauagcaugcugcaacuugacccgaaugccaaaaccuggauggauaucgaggggagacccgaagacccuguggagauugcccucuaccagcccucuuccggaugcuauauccacuucuuucgggaaccuacagaccugaagcaguucaagcaggaugcuaaauacagccauggcauugacgucacggaucuguuugcggcccaacccgggcucaccuccgcugugaucgaggcccugccgagaaacaugguuauuacaugucagggaucugaagacauccgcaaacuucuggagagccagggccggagagauaucaagcucauugacaucucccugucuaagguggauagccgcaaauucgagaaugccgucugggaccaguuuaaggaucugugccacaugcauaccgggauuguggucgaaaagaaaaagcggggcggaaaagaggaaaucacaccucacugugcucuuauggacugcauuauguucgaugccgcgguguccggcgggguugacgcuaaggugcucagagccguccugccccgcgauaugguguuucggaccagcacgccuaaaguugugcugugaggacuaguuauaagacugacuagcccgaugggccucccaacgggcccuccuccccuccuugcaccgagauuaaucaaaggcucuuuucagagccaccaaaaaaaaaaaaaaaaaaaaaaaaaaaaaaaaaaaaaaaaaaaaaaaaaaaaaaaaaaaaaaaaaaaaaaaaaaaaaaaaaaaaaaaaaaaaaaaaaaaaa

SEQ ID NO: 20576 - RNA, 1974 nt, Artificial Sequence
  mRNA product Design i-3 (hSL-A100) comprising derived and/or modified sequence from LASV(G1180-SLE-2010;Clade IV)__AIT17169__SP-HsALB_NP(2-569) (opt5)
aggagaaagcuuaccaugaagugggugaccuucaucagccugcucuuucuguucuccucugccuacagcagcgccuccaaggagaucaaaucuuuccuguggacccagagccucagacgggaacuguccggcuacugcucuaacauuaagcugcaaguggucaaagacgcucaggcccugcuccacgggcuggauuuuagcgagguuuccaaugugcagcgccuuaugagaaaggaacggcgcgacgauaacgaccugaaaagacuccgggaucugaaucaggcggugaacaaucuggucgagcucaagucuacacaacaaaagagcauccugcgcgugggaacgcuuaccuccgacgaucugcucauucuggcugccgaccuugaaaaacuuaagagcaaaguuaucagaacagagcggccccucucugccggcguguauauggggaaccuguccagccagcagcuggaucagcgcagagcucuccugucuaugauuggaauguccagcggcaaucagcgggcccaggcugggcgcgacggagucgugagaguuugggaugugaagaacgucgagcuucugaauaaccaguucggcaccaugccuucucucacacuggccugucuuaccaaacaaggccagguggaccugaaugaugcggugcaggcccucacagaccuggggcugaucuacaccgcuaaguauccgaacacguccgaccucgaucggcugacccaaagccaucccauccuuaauaugauugacacaaagaaauccucucugaacaucagcggauacaauuuuucccucggcgccgcugucaaggccggggcgugcaugcuggauggaggcaacaugcuugaaaccauuaaaguuagcccucagacaauggacgggauccugaagucuauucucaaagugaagaaagcccugggaauguucaucuccgauacccccggcgagcgcaacccuuaugaaaauauucuguacaagaucugucucagcggcgacggguggcccuauaucgcuucuagaacgagcauuacaggacgggccugggagaacaccguggucgaucuggaguccgacggcaagccucagaaagcugggucuaauaacagcaauaagucccuucagagcgugggauuuacagccggccugaccuacucucaacucaugacccugaaagaugccaugcugcagcuugacccgaacgcuaagacauggauggauaucgaagggagacccgaggacccuguugaaauugcgcucuaccagcccuccagcggaugcuauauccacuucuuucgcgagccuacggaccugaaacaguucaagcaagaugccaaguacucucauggcauugacgugaccgaucuguuugcugcccagcccggccucacauccgccgucaucgacgcucugccgcggaauauggugaucaccugucaggggagcgaugacauuagaaaacuucuggaaucccagggacgcaaggauaucaaacucauugacaucgcccugucuaagacagauagccggaaauaugagaacgcgguuugggaccaauacaaggaucugugccacaugcauaccggcguggucguggagaagaaaaagagagggggaaaagaagagauuacgccucacugugcucuuauggacugcaucauguucgaugccgccgucuccggcgggcucaauacaucugugcugcgcgcuguucugccccgggacaugguguuuagaaccagcaccccucgcgucgugcucugaggacuaguuauaagacugacuagcccgaugggccucccaacgggcccuccuccccuccuugcaccgagauuaaucaaaggcucuuuucagagccaccaaaaaaaaaaaaaaaaaaaaaaaaaaaaaaaaaaaaaaaaaaaaaaaaaaaaaaaaaaaaaaaaaaaaaaaaaaaaaaaaaaaaaaaaaaaaaaaaaaaaa

SEQ ID NO: 20577 - RNA, 1974 nt, Artificial Sequence
  mRNA product Design i-3 (hSL-A100) comprising derived and/or modified sequence from LASV(G1442-SLE-2011;Clade IV)__AIT17181__SP-HsALB_NP(2-569) (opt5)
aggagaaagcuuaccaugaagugggugaccuucaucagccugcucuuucuguucuccucugccuacagcagcgccuccaaggaggugaaaucuuuccuguggacccagagccucagacgggaacuguccggcuacugcucuaacaucaaacuucaagucguuaaggacgcucaggcccugcuccacgggcuggauuuuagcgagguguccaaugugcagcgccuuaugagaaagcagcggcgcgacgauaacgaccugaaaagacuccgggaucugaaucaagcggucaacaaucugguggaacucaagucuacacagcaaaagagcguucugcgcgugggaacgcuuaccuccgacgaucugcucguccuggcugccgaccuugagaaacuuaagagcaaagugauuagaacagaacggccccucucugccggcguuuauauggggaaccuguccagccagcagcuggaucagcgcagagcucuccugaauaugaucggaaugucuggcgggauucagggaacccggacaggccgcgacggcguggucagagugugggaugugaagaacgccgaccuucugaauaaccaguucgggaccaugccuucccucacacuggcuugucuuaccaaacaaggacaggucgaucugaaugacguugugcaggcccucacggaccugggccugaucuacaccgcgaaguauccgaacgccagcgaucucgaccggcugacacaaucucaucccauucuuaauaugaucgauaccaagaaauccagccugaacaucuccggguacaauuuuucucucggagcugccgugaaggcuggcgccugcaugcuggacgggggaaacaugcuugagacaauuaaagucagcccucagaccauggauggcauccugaaguccauucucaaagugaagaaaacgcugggcauguucaucagcgacacacccggggagcgcaacccuuaugaaaauauucuguacaagaucugucucucuggagauggcuggcccuauauugcguccagaaccagcaucacagggcgggccugggagaacaccguuguggaccuggaaucugauggaaagccucagaaagcuggcagcaauaacuccaauaagucucuucagagcgccggguuugcugccggacugaccuacucccaacucaugacacugaaagacgccaugcugcagcuugauccgaacgcuaagacguggauggacaucgagggcagacccgaggacccugucgaaauugcgcucuaccagcccagcucuggcugcuauauccacuucuuucgcgagccuaccgaucugaaacaguucaagcaagacgccaaguacucccaugggauugaugugacagaccuguuugcugcccagcccggacucaccagcgccguuaucgaagcucugccgcggaauauggugauuacaugucagggcucugaugacaucaaaaagcugcuggagucccaggggagaaaagauaucaagcucauugacaucgcccugagcaaaaccgauucccgcaaguaugaaaacgcggucugggaccaauacaaggaucugugccacaugcauacgggaguggucguggagaaaaagaaacggggcgggaaggaggaaauuacaccucacugugcucuuauggacugcaucauguucgaugccgccguuucuggcggacucaauacccuggugcugagagcuguccucccccgcgacaugguguuucggaccagcacaccuagaguugugcugugaggacuaguuauaagacugacuagcccgaugggccucccaacgggcccuccuccccuccuugcaccgagauuaaucaaaggcucuuuucagagccaccaaaaaaaaaaaaaaaaaaaaaaaaaaaaaaaaaaaaaaaaaaaaaaaaaaaaaaaaaaaaaaaaaaaaaaaaaaaaaaaaaaaaaaaaaaaaaaaaaaaaa

SEQ ID NO: 20578 - RNA, 1974 nt, Artificial Sequence
  mRNA product Design i-3 (hSL-A100) comprising derived and/or modified sequence from LASV(G3010-SLE-2013;Clade IV)__AIT17345__SP-HsALB_NP(2-569) (opt5)
aggagaaagcuuaccaugaagugggugaccuucaucagccugcucuuucuguucuccucugccuacagcagcgccuccaaggagaucaaaucuuuccuguggacccagagccucagacgggaacuguccggcuacugcucuaacauuaaacuucaaguggucaaagacgcucaggcccugcuccacgggcuggauuuuagcgagguuuccaaugugcagcgccuuaugagaaaggaacggcgcgacgauaacgaccugaaaagacuccgggaucugaaucaggcggugaacaaucuggucgagcucaagucuacacaacaaaagagcauccugcgcgugggaacgcuuaccuccgacgaucugcucauucuggcugccgaccuugaaaaacuuaagagcaaaguuacaagaaccgagcggccccucucugccggcguguauauggggaaccuguccagccagcagcuggaucagcgcagagcucuccugucuaugaucggaauguccagcggcguccagggggcccgggcuggacgcgacggcgugguuagagugugggaugucaagaaugccgagcuucugaacaaucaguucggcacaaugccuucucucacccuggcgugucuuacaaaacaggggcaaguggaccugaacgaugugguccaggcccucaccgaccugggacugauuuacacggcuaaguauccgaauaccuccgaccucgaucggcugacacagagccaucccauccuuaacaugaucgacaccaagaaauccucucugaauauuagcggcuacaacuuuucccucggggccgcuguuaaggccggagcgugcaugcuggauggcgggaauaugcuugaaacaaucaaagugagcccucaaaccauggacggcauucugaagucuauccucaaagugaagaaagcccugggaauguucauuuccgagacgcccggcgaacgcaacccuuaugagaacauccuguacaagauuugucucagcggggauggauggcccuauaucgcuucuagaacaagcaucaccggccgggccugggagaauacagucguggaccuggaauccgaugggaagccucagaaagcuggaucuaacaauagcaacaagucccuucagagcgccggcuuuaccgccgggcugaccuacucucagcucaugacacugaaagacgcuaugcugcaacuugauccgaaugcgaagacguggauggacauugagggaagacccgaagauccuguugagguggcccucuaccagcccuccagcggcugcuauauccacuucuuucgcgaaccuaccgaccugaaacaguucaagcaggacgcuaaguacucucauggcauugaugucacagaccuguuugccgcccaacccgggcucaccuccgcugugaucgaugcccugccgcggaacaugguuauuacaugucagggaagcgacgauaucaaaaagcugcuggagucccagggcagaaaagacaucaagcucauugauaucgcgcugucuaaaaccgacagccgcaaguaugagaaugcugugugggaucaguacaaggaccugugccacaugcauacgggggucguggucgaaaagaagaaacggggaggcaaggaggaaauuacaccucacugugcccuuauggauugcaucauguucgacgccgcuguguccgggggccucaacaccucuguucugagagccgugcugccccgcgauauggucuuucggaccagcacaccuagagugguucucugaggacuaguuauaagacugacuagcccgaugggccucccaacgggcccuccuccccuccuugcaccgagauuaaucaaaggcucuuuucagagccaccaaaaaaaaaaaaaaaaaaaaaaaaaaaaaaaaaaaaaaaaaaaaaaaaaaaaaaaaaaaaaaaaaaaaaaaaaaaaaaaaaaaaaaaaaaaaaaaaaaaaa

SEQ ID NO: 20579 - RNA, 1974 nt, Artificial Sequence
  mRNA product Design i-3 (hSL-A100) comprising derived and/or modified sequence from LASV(G502-SLE-2009;Clade IV)__AIT17127__SP-HsALB_NP(2-569) (opt5)
aggagaaagcuuaccaugaagugggugaccuucaucagccugcucuuucuguucuccucugccuacagcagcgccuccaaggagaucaaaucuuuccuguggacccagagccucagacgggaacuguccggcuacugcucuaacauuaagcugcaaguggucaaagacgcucaggcccugcuccacgggcuggauuuuagcgagguuuccaaugugcagcgccuuaugagaaaggaacggcgcgacgauaacgaccugaaaagacuccgggaucugaaucaggcggugaacaaucuggucgagcucaagucuacacaacaaaagagcauccugcgcgugggaacgcuuaccuccgacgaucugcucauucuggcugccgaccuugaaaaacuuaagagcaaaguuaucagaacagagcggccccucucugccggcguguauauggggaaccuguccagccagcagcuggaucagcgcagagcucuccugucuaugauuggaauguccggcgggaaucagggaguccgggccggcaaggacggcgugguucgcgugugggaugucaaaaacgcugagcuucugaauaaccaguucgggaccaugccuagccucacacuggccugucuuaccaagcagggacaaguggaccugaaugaugcggugcaggcccucacagaccugggccugaucuacaccgcuaaguauccgaacacgucugaccucgauagacugacccagucccaucccauccuuaauaugauugacaccaaaaagagcucccugaacaucucuggguacaauuuuagccucggagccgcugucaaagccggcgcgugcaugcuggaugggggaaacaugcuugaaacaauuaagguuuccccucaaacaauggacggcauccugaaaagcauucucaaggugaaaaaggcccugggcauguucaucucugauacccccggggagcggaacccuuaugaaaauauucuguacaagaucugucucuccggagacggcuggcccuauaucgcuagccgcacgucuauuacagggagagccugggagaacaccguggucgaucuggagagcgacggaaaaccucagaaggcuggcuccaauaacucuaauaaaagccuucaguccgccggguuuacagccggacugaccuacagccagcucaugacccugaaggaugcuaugcugcaacuugacccgaacacaaaaacguggauggauaucgaaggccggcccgaggacccuguggaaauugcgcucuaccagcccucuuccggcugcuauauccacuucuuuagagagccuaccgaccugaagcaguucaagcaggaugccaaauacagccaugggauugacguuacagaucuguuugcugcccaacccggacucaccucugccgugaucgacgcucugccgcgcaauauggucaucacaugucagggcuccgaugacauucggaaacuucuggaaagccaggggagaaaggauaucaagcucauugacaucgcccugaacaaaaccgauucccgcaaguaugagaaugcggugugggaccaguacaaggaucugugccacaugcauacgggaguuguggucgagaaaaagaaacggggcgggaaggaagagauuacaccucacugugcucuuauggacugcaucauguucgaugccgccgugucuggcggacucaacaccagcguccugagagcugugcugccccgcgacaugguuuuucggaccuccacaccuagagugguccucugaggacuaguuauaagacugacuagcccgaugggccucccaacgggcccuccuccccuccuugcaccgagauuaaucaaaggcucuuuucagagccaccaaaaaaaaaaaaaaaaaaaaaaaaaaaaaaaaaaaaaaaaaaaaaaaaaaaaaaaaaaaaaaaaaaaaaaaaaaaaaaaaaaaaaaaaaaaaaaaaaaaaa

SEQ ID NO: 20580 - RNA, 1974 nt, Artificial Sequence
  mRNA product Design i-3 (hSL-A100) comprising derived and/or modified sequence from LASV(G733-SLE-2010;Clade IV)__AIT17155__SP-HsALB_NP(2-569) (opt5)
aggagaaagcuuaccaugaagugggugaccuucaucagccugcucuuucuguucuccucugccuacagcagcgccuccaaggagaucaaaucuuuccuguggacccagagccucagacgggaacuguccggcuacugcucuaacauuaagcugcaaguggucaaagacgcucaggcccugcuccacgggcuggauuuuagcgagguuuccaaugugcagcgccuuaugagaaaggaacggcgcgacgauaacgaccugaaaagacuccgggaucugaaucaggcggugaacaaucuggucgagcucaagucuacacaacaaaagagcgugcugcgcguuggaacgcuuaccuccgacgaacugcucgugcuggcugccgaucuugagaaacuuaagagcaaagucaucagaacagagcggccccucucugccggcguguauauggggaaccuguccagccagcagcuggaccagcgcagagcucuccugucuaugauuggaauguccggcgggaaucagggagcccggaccggccgcgauggcguugugagagucugggacgugaagaacgcugaacuucugaauaaccaguucgggacaaugccuagccucacccuggccugucuuacaaaacagggacaaguggaucugaaugacgcgguccaggcccucaccgaucugggccugaucuacacggcuaaguauccgaacaccucugaccucgaccggcugacacagucccaucccauucuuaauaugaucgauaccaagaaaagcucccugaacaucucuggguacaauuuuagccucggagccgcuguuaaggccggcgcgugcaugcuggacgggggaaacaugcuugagacaauuaaaguguccccucaaaccauggauggcauccucaagagcauucugaaagugaagaaagcccugggcauguucaucucugacacgcccggggaacgcaacccuuaugagaauauucuguacaagaucugucucuccggagauggcuggcccuauauugcuagcagaacaucuaucaccgggcgggccugggagaacacagucguggaccuggaaagcgauggaaagccucagaaagcuggcuccaauaacucuaauaagagccuucaguccgccggguuuaccgccggacugaccuacagccagcucaugacacugaaagacgcuaugcugcaacuugauccgaacgcgaagacguggauggacaucgagggcagacccgaagauccuguugagauugcccucuaccagcccucuuccggcugcuauauccacuucuuucgcgaaccuaccgaccugaaacaguucaagcaggacgcuaaguacagccaugggauugaugugacagaccuguuugccgcccaacccggacucaccucugcugucaucgaugcccugccgcggaauauggugauuacaugucagggcuccgacgauaucagaaaacuucuggagagccaggggcgcaaggacaucaaacucauugauaucgcgcuguccaagauugacucucggaaauaugagaacgcuguuugggaucaguacaaggaccugugccacaugcauaccggaguggucguggaaaagaaaaagagaggcgggaaagaggaaaucacgccucacugugcccuuauggauugcauuauguucgacgccgcugucagcggcggacucaauucccuggugcugcgcgccguucucccccgggauaugguguuuagaacaucuaccccucgcgucgugcugugaggacuaguuauaagacugacuagcccgaugggccucccaacgggcccuccuccccuccuugcaccgagauuaaucaaaggcucuuuucagagccaccaaaaaaaaaaaaaaaaaaaaaaaaaaaaaaaaaaaaaaaaaaaaaaaaaaaaaaaaaaaaaaaaaaaaaaaaaaaaaaaaaaaaaaaaaaaaaaaaaaaaa

SEQ ID NO: 20581 - RNA, 1974 nt, Artificial Sequence
  mRNA product Design i-3 (hSL-A100) comprising derived and/or modified sequence from MOPV/LASV reassortant(IGS-1;Clade IV)__AFY05578__SP-HsALB_NP(2-569) (opt5)
aggagaaagcuuaccaugaagugggugaccuucaucagccugcucuuucuguucuccucugccuacagcagcgccuccaaggagaucaaaucuuuccuguggacccagagccucagacgggaacuguccggcuacugcucuaacauuaaacuucaaguggucaaggacgcucaggcccugcuccacgggcuggauuuuagcgagguuuccaaugugcagcgccuuaugagaaaggaacggcgcgacgauaacgaccugaaaagacuccgggaucugaaucaggcggugaacaaucuggucgagcucaagucuacacaacaaaagagcauccugcgcgugggaacgcuuaccuccgacgaucugcucauucuggcugccgaccuugaaaaacugagaagcaagguuauccggacagagcgcccccucucugccggcguguauauggggaaccuguccagccagcagcuggaucagagacgggcucuccugaauaugauuggaaugucuggcgggaaccagggagcccgcgcuggcagagacggcgucgugcggguuugggaugugaaaaaugccgagcuucuguccaaccaguucgggaccaugccuagccucacacuggcgugucuuaccaagcagggacaagucgaccugaaugaugccgugcaggcucucacagaccugggccugaucuacaccgccaaauauccgaacacgucugaccucgaucgccugacccagucccaucccauccuuaauaugauugacacaaagaaaagcucccugaacaucucuggguacaauuuuagccucggagcugccgugaaggcgggcgccugcaugcuggaugggggaaacaugcuugaaaccauuaaggucuccccucaaacaauggacggcauccugaaaagcauucucaagguuaaaaaggcucugggcauguucaucucugauacccccggggagagaaacccuuaugaaaauauucuguacaaaaucugucucuccggagacggcuggcccuauaucgccagccggacgucuauuacagggagagcuugggagaacaccgugguggaucuggagagcgacggaaagccucagaaggccgauuccaauaacucuagcaaaucccuucagagcgccggcuuuacagcugggcugaccuacucucagcucaugacccugaaggacgcgaugcugcaacuugauccgaaugccaaaacauggauggacaucgaaggacgccccgaggacccugucgaaauugcucucuaccagcccuccagcggcugcuauauccacuucuuucgggagccuacggaucugaagcaguucaaacaggacgccaaguacucucauggcauugaugugaccgaccuguuugccacacaacccgggcucaccuccgcuguuaucgaugcccugccgagaaacauggugaucacaugucagggaagcgacgauauucgcaaacuucuggaaucccagggccggaaggacaucaagcucauugauaucgaccugucuaaaaccgauagcagaaaguaugagaaugcggucugggaccaguacaaagaucugugccacaugcauacgggggugguuguggagaagaagaaacgcggaggcaaggaagagauuacaccucacugugcucuuauggacugcaucauguucgacgccgccgucuccgggggccucaacaccucugugcugcgggcuguccugcccagagauaugguguuucgcaccagcacaccucggguugugcucugaggacuaguuauaagacugacuagcccgaugggccucccaacgggcccuccuccccuccuugcaccgagauuaaucaaaggcucuuuucagagccaccaaaaaaaaaaaaaaaaaaaaaaaaaaaaaaaaaaaaaaaaaaaaaaaaaaaaaaaaaaaaaaaaaaaaaaaaaaaaaaaaaaaaaaaaaaaaaaaaaaaaa

SEQ ID NO: 20582 - RNA, 1974 nt, Artificial Sequence
  mRNA product Design i-3 (hSL-A100) comprising derived and/or modified sequence from LASV(LM765-SLE-2012;Clade IV)__AIT17815__SP-HsALB_NP(2-569) (opt5)
aggagaaagcuuaccaugaagugggugaccuucaucagccugcucuuucuguucuccucugccuacagcagcgccuccaaggagaucaaaucuuuccuguggacccagagccucagacgggaacuguccggcuacugcucuaacauuaagcugcaaguggucaaagacgcucaggcccugcuccacgggcuggauuuuagcgagguuuccaaugugcagcgccuuaugagaaaggaacggcgcgacgauaacgaccugaaaagacuccgggaucugaaucaggcggugaacaaucuggucgagcucaagucuacacaacaaaagagcauccugcgcgugggaacgcuuaccuccgacgaucugcucauucuggcugccgaccuugaaaaacuuaagagcaaaguuacaagaaccgagcggccccucucugccggcguguauauggggaaccuguccagccagcagcuggaucagcgcagagcucuccuggacaugaucggaaugucuggcuccaaucagggggcccgggcuggacgcgauggcgucgugagaguuugggacgugaagaacgccgagcuucugaauaaccaguucggcacaaugccuagccucacccuggcgugucuuacaaaacaggggcaagucgaucugaaugacgccgugcaggcucucaccgaccugggacugauuuacacggccaaguauccgaacaccucugaucucgaccggcugacacagucccaucccauccuuaauaugaucgauaccaagaaaagcucccugaacauuucuggcuacaauuuuagccucggggcugccgugaaggcgggagccugcaugcuggacggcgggaacaugcuugaaacaaucaaagucuccccucaaaccauggauggcauucucaagagcauccugaaaguuaagaaagcucugggaauguucauuucugacgcccccggcgagcgcaacccuuaugaaaauauccuguacaagauuugucucuccggggauggauggcccuauaucgcuagcagaacgucuaucacaggccgggccugggagaacaccgugguggaccuggagagcgaugggaagccucagaaagccggauccaauggcucuaacaagagccuucaguccgcuggguuuacagcgggacugaccuacagccagcucaugacccugaaagacgccaugcugcaacuugauccgaaugcuaagacauggauggacauugaaggcagacccgaggacccugucgaaaucgcccucuaccagcccucuuccggcugcuauauucacuucuuucgcgagccuacggaucugaaacaguucaagcaggacgccaaguacagccaugggaucgaugugaccgaccuguuugcugcccaacccggacucacaucugcgguuauugaugcucugccgcggaacauggugaucaccugucagggcuccgacgauaucagaaaacuuuucgaaagccaggggcgcaaggacauuaaacugaucgauauugcccucuccaagacagacucucggaaauaugagaaugccgucugggaucaguacaaggaccugugccacaugcauaccggaaucgugguugagaagaaaaagagaggcgggaaagaagagauuacgccucacugugcucugauggauugcaucauguuugacgccgcugugagcggcggacuuaacacauccguccuccgcgccgugcugccccgggacauggucuucagaaccucuaccccucgcgugguucugugaggacuaguuauaagacugacuagcccgaugggccucccaacgggcccuccuccccuccuugcaccgagauuaaucaaaggcucuuuucagagccaccaaaaaaaaaaaaaaaaaaaaaaaaaaaaaaaaaaaaaaaaaaaaaaaaaaaaaaaaaaaaaaaaaaaaaaaaaaaaaaaaaaaaaaaaaaaaaaaaaaaaa

SEQ ID NO: 20583 - RNA, 1974 nt, Artificial Sequence
  mRNA product Design i-3 (hSL-A100) comprising derived and/or modified sequence from LASV(LM776-SLE-2012;Clade IV)__AIT17825__SP-HsALB_NP(2-569) (opt5)
aggagaaagcuuaccaugaagugggugaccuucaucagccugcucuuucuguucuccucugccuacagcagcgccuccaaggagaucaaaucuuuccuguggacccagagccucagacgggaacuguccucuuacugcagcaacauuaaacuucaaguggucaaggacgcucaggcccugcuccacggccuggauuuuuccgagguuucuaaugugcagcgccuuaugagaaaggaacggcgcgacgauaacgaccugaaaagacuccgggaucugaaucaggcggugaacaaucuggucgagcucaagagcacacaacagaaguccauccugcgcguggggacgcuuaccagcgacgaucugcucauucuggcugccgaccuugaaaaacugaagucuaaaguuacaagaaccgagcggccccucuccgccggaguguauaugggcaaccugagcucucagcagcuggaucaacgcagagcucuccuguccaugaucgggaugagcggaucuaaucagggcgcccgggcugggcgcgacggagucgugagaguuugggaugugaagaacgccgagcuucugaauaaccaguucggcacaaugccuucccucacccuggcgugucuuacaaaacagggccaagucgaccugaaugaugccgugcaggcucucaccgaccuggggcugauuuacacggccaaguauccgaacaccagcgaccucgaucggcugacacagucccaucccauccuuaauaugaucgacaccaagaaaucuagccugaacauuuccggauacaauuuuagccucggcgcugccgugaaggcgggggccugcaugcuggauggaggcaacaugcuugaaacaaucaaagucucuccucaaaccauggacgggauucugaaguccauccucaaaguuaagaaagcucugggaauguucauuagcgauacgcccggcgagcgcaacccuuaugaaaauauccuguacaagauuugucucucuggcgacggguggcccuauaucgccagcagaacauccaucaccggacgggcuugggagaacacagugguggaucuggagucugacggcaagccucagaaagccgggagcaauaacuccaauaagagccuucagucugccggauuuaccgcuggccugaccuacucccagcucaugacacugaaagaugcgaugcugcaacuugacccgaacgccaagacguggauggauauugaagggagacccgaggacccugucgaaguggcucucuaccagcccagcucuggaugcuauauccacuucuuucgcgagccuaccgaccugaaacaguucaagcaggaugccaaguacucccauggcauugacguuacagaucuguuugccgcucaacccggccucaccagcgccgugaucgacgcgcugccgcggaauauggucauuacaugucagggguccgaugacaucagaaaacuucuggaaucucagggacgcaaggauaucaaacucauugacaucgcucugagcaagaccgauucccggaaauaugagaacgccgugugggaccaguacaaggaucugugccacaugcauacgggcguuguggucgagaagaaaaagagagggggaaaagaagagauuacaccucacugugcccuuauggacugcaucauguucgaugcugccgugucuggcgggcucaauaccagcguccugcgcgcugugcugccccgggacaugguuuuuagaaccuccacaccucgcgugguccucugaggacuaguuauaagacugacuagcccgaugggccucccaacgggcccuccuccccuccuugcaccgagauuaaucaaaggcucuuuucagagccaccaaaaaaaaaaaaaaaaaaaaaaaaaaaaaaaaaaaaaaaaaaaaaaaaaaaaaaaaaaaaaaaaaaaaaaaaaaaaaaaaaaaaaaaaaaaaaaaaaaaaa

SEQ ID NO: 20584 - RNA, 1974 nt, Artificial Sequence
  mRNA product Design i-3 (hSL-A100) comprising derived and/or modified sequence from LASV(Mad39;Clade IV)__ANH09723__SP-HsALB_NP(2-569) (opt5)
aggagaaagcuuaccaugaagugggugaccuucaucagccugcucuuucuguucuccucugccuacagcagcgccuccaaggagaucaaaucuuuccuguggacccagagccucagacgggaacuguccggcuacugcucuaacauuaagcugcaaguggucaaagacgcucaggcccugcuccacgggcuggauuuuagcgagguuuccaaugugcagcgccuuaugagaaagcagcggcgcgacgauaacgaccugaaaagacuccgggaucugaaucaagcggugaacaaucuggucgaacucaagucuacacagcaaaagagcgugcugcgcguuggaacgcuuaccuccgacgaucugcucacacuggcugccgaccuugagaaacuuaagagcaaagugaccagaacagaacggccccucaccgccggcgucuauauggggaaccugucuucccagcagcuggaucagcgcagagcucuccugaauaugaucggaaugagcggcgggaaccagggagcccggacaggccgcgacggcgugguuagagugugggaugucaagaaugcugagcuucugaacaaucaguucgggaccaugccuucucucacgcuggccugucuuaccaaacaaggacagguggaccugaacgaugugguccaggcgcucacagaccugggccugauuuacaccgccaaguauccgaauacauccgaccucgaucggcugacccaaagccaucccauccuuaacaugauugacacgaauaagucuucccugaacaucagcggguacaacuuuucccucggagcugccguuaaagcuggcgccugcaugcuggaugggggaaauaugcuugagacaaucaaggugucuccucagaccauggacggcauucugaaaagcauccucaaggugaaaaagucccugggcauguucauuagcgauacacccggggaacgcaacccuuaugagaauauccuguacaaaauuugucucucuggagacggcuggcccuauaucgcguccagaaccagcauuaccgggcgggccugggaaaacacagucguggaucuggagucuggaggcaagccucagaaggcugggagcaauaacuccaauaaaucucuucagagcgccggauuugcugccggccugacguacucccaacucaugacccugaaggacgccaugcugcagcuugauccgaacgcuaaaacauggauggacaucgagggcagacccgaagauccuguugagaucgcgcucuaccagcccauuagcgggugcuauauccacuucuuucgcgaaccuaccgaccugaagcaguucaaacaagacgccaaguacucucauggaauugaugugacagaccuguuugcugcccagcccggccucaccuccgccgucaucgaggcucugccgcggaauauggugauuacgugucaggggagcgaugacaucagaaaacuuuucgaaucucagggacgcaaggauaucaagcugauugacaucgcccucuccaaaacagauagccggaaguaugagaacgcgguuugggaccaauacaaagaucugugccacaugcauaccggcguggucguggagaagaagaaaaagggcgggaaagaagagauuaccccucacugugcucugauggacugcaucauguuugaugccgccgucuccggaggccuuaauacacucgugcugagagcuguucugccccgcgacaugguguuccggaccucuacaccuaaggucgugcucugaggacuaguuauaagacugacuagcccgaugggccucccaacgggcccuccuccccuccuugcaccgagauuaaucaaaggcucuuuucagagccaccaaaaaaaaaaaaaaaaaaaaaaaaaaaaaaaaaaaaaaaaaaaaaaaaaaaaaaaaaaaaaaaaaaaaaaaaaaaaaaaaaaaaaaaaaaaaaaaaaaaaa

SEQ ID NO: 20585 - RNA, 1974 nt, Artificial Sequence
  mRNA product Design i-3 (hSL-A100) comprising derived and/or modified sequence from LASV(Z0947-SLE-2011;Clade IV)__AIT17841__SP-HsALB_NP(2-569) (opt5)
aggagaaagcuuaccaugaagugggugaccuucaucagccugcucuuucuguucuccucugccuacagcagcgccuccaaggagaucaaaucuuuccuguggacccagagccucagacgggaacuguccggcuacugcucuaacauuaagcugcaaguggucaaagacgcucaggcccugcuccacgggcuggauuuuagcgagguuuccaaugugcagcgccuuaugagaaaggaacggcgcgacgauaacgaccugaaaagacuccgggaucugaaucaggcggugaacaaucuggucgagcucaagucuacacaacaaaagagcauccugcgcgugggaacgcuuaccuccgacgaucugcucauucuggcugccgaccuugaaaaacuuaagagcaaaguuacaagaaccgagcggccccucucugccggcguguauauggggaaccuguccagccagcagcuggaucagcgcagagcucuccugaauaugaucggaaugucuggcuccaaccagggggcccggacaggacgcgacggcgucgugagaguuugggaugugaagaaugcugagcuucugaacaaucaguucggcaccaugccuagccucacacuggccugucuuaccaaacaggggcaagucgaccugaacgaugcggugcaggcccucacggaccugggacugauuuacaccgcuaaguauccgaauacaucugaccucgaucggcugacccagucccaucccauccuuaacaugaucgacacaaagaaaagcucccugaauauuucuggcuacaacuuuagccucggggccgcugugaaggccggagcgugcaugcuggauggcgggaacaugcuugaaaccaucaaagucuccccucaaacgauggacggcauucucaagagcauccugaaaguuaagaaagcccugggaauguucauuucugaugcucccggcgagcgcaauccuuaugaaaacauccuguacaagauuugucucuccggggacggauggcccuauaucgccagcagaacaucuaucaccggccgggcuugggagaauacagugguggaucuggagagcgacgggaagccucagaaagccggauccaacggcucuaauaagagccuucaguccgccggguuuaccgcuggacugaccuacagccagcucaugacacugaaagaugcgaugcugcaacuugacccgaacgccaagacguggauggauauugaaggcagacccgaggacccugucgaaaucgcucucuaccagcccucuuccggcugcuauauucacuucuuucgcgagccuaccgaccugaaacaguucaagcaggaugccaaguacagccaugggaucgacgugacagaucuguuugccgcucaacccggacucaccucugccguuauugacgcgcugccgcggaauauggugaucacaugucagggcuccgaugacaucagaaaacuuuucgaaagccaggggcgcaaggauauuaaacugaucgacauugcucucuccaagaccgauucucggaaauaugagaacgccgucugggaccaguacaaggaucugugccacaugcauacgggaaucgugguugagaagaaaaagagaggcgggaaagaagagauuacaccucacugugcccugauggacugcaucauguuugaugcugccgugagcggcggacuuaauaccuccguccuccgcgcugugcugccccgggacauggucuucagaaccucuacaccucgcgugguucugugaggacuaguuauaagacugacuagcccgaugggccucccaacgggcccuccuccccuccuugcaccgagauuaaucaaaggcucuuuucagagccaccaaaaaaaaaaaaaaaaaaaaaaaaaaaaaaaaaaaaaaaaaaaaaaaaaaaaaaaaaaaaaaaaaaaaaaaaaaaaaaaaaaaaaaaaaaaaaaaaaaaaa

SEQ ID NO: 20586 - RNA, 1950 nt, Artificial Sequence
  mRNA product Design i-3 (A100) comprising derived and/or modified sequence from LASV(Josiah;Clade IV)__NP_694869__SP-HsALB_NP(2-569) (opt1)
aggagaaagcuuaccaugaagugggugaccuucaucagccugcucuuccuguucuccagcgccuacuccagcgccuccaaggagaucaagagcuuccuguggacccagucccuccgccgggagcugagcggcuacugcuccaacaucaagcuccagguggucaaggacgcccaggcgcugcugcacgggcuggacuucagcgagguguccaacgugcagcgccucaugcggaaggagcgccgggacgacaacgaccugaagcgccugcgggaccucaaccaggccgucaacaaccugguggagcucaagagcacccagcagaaguccauccugcgcgugggcacccugaccagcgacgaccugcucauccuggccgccgaccuggagaagcucaaguccaaggucauccggaccgagcgcccccugagcgccgggguguacaugggcaaccuguccagccagcagcucgaccagcggcgcgcgcugcugaacaugaucgggauguccggcggcaaccagggggcccgggccggccgcgacggggugguccgggugugggacgugaagaacgccgagcuccugaacaaccaguucggcaccaugccgagccugacgcucgcgugccugaccaagcaggggcaggucgaccugaacgacgccgugcaggcccucaccgaccugggccugaucuacaccgccaaguaccccaacacguccgaccucgaccgccugacccagagccaccccauccugaacaugaucgacaccaagaaguccagccucaacaucagcggcuacaacuucucccugggggccgcggugaaggccggcgccugcaugcuggacgggggcaacaugcucgagaccaucaaggucagcccccagacgauggacggcauccugaaguccauccugaaggugaagaaggcccucgggauguucaucagcgacaccccgggcgagcggaaccccuacgagaacauccuguacaagaucugccuguccggggacggcuggcccuacaucgccagccgcaccuccaucaccgggcgggcgugggagaacacgguggucgaccucgagagcgacggcaagccccagaaggccgacuccaacaacagcuccaagagccugcaguccgccggcuucaccgccgggcugaccuacagccagcucaugacccugaaggacgccaugcugcagcuggacccgaacgcgaagacguggauggacaucgagggccgccccgaggaccccguggagaucgcccucuaccagcccuccagcgggugcuacauccacuucuuccgggagccgaccgaccugaagcaguucaagcaggacgccaaguacucccacggcaucgacgugaccgaccuguucgccacccagcccgggcucacgagcgccgucaucgacgcgcugccccgcaacauggugaucacgugccagggcuccgacgacauccgcaagcugcucgagagccagggccggaaggacaucaagcugaucgacaucgcccugagcaagaccgacucccgcaaguacgagaacgccgugugggaccaguacaaggaccucugccacaugcacaccggggucguggucgagaagaagaagcggggcgggaaggaggagaucaccccgcacugcgcccugauggacugcaucauguucgacgcggccgugagcggcgggcugaacaccuccgugcuccgcgccguccugccccgggacaugguguuccgcaccagcacgccccgggugguccugugaggacuaguuauaagacugacuagcccgaugggccucccaacgggcccuccuccccuccuugcaccgagauuaauaaaaaaaaaaaaaaaaaaaaaaaaaaaaaaaaaaaaaaaaaaaaaaaaaaaaaaaaaaaaaaaaaaaaaaaaaaaaaaaaaaaaaaaaaaaaaaaaaaaa

SEQ ID NO: 20587 - RNA, 1950 nt, Artificial Sequence
  mRNA product Design i-3 (A100) comprising derived and/or modified sequence from LASV(LP;Clade I)__AAF86702__SP-HsALB_NP(2-569) (opt1)
aggagaaagcuuaccaugaagugggugaccuucaucagccugcucuuccuguucuccagcgccuacuccagcaacuccaaggagaucaagagcuuccuguggacccagucccuccgccgggagcugagcggcuacugcuccaacaucaagcuccagguggucaaggacgcccaggcccugcugcacgggcuggacuucagcgagguguccaacgugcagcgccucaugcggaagcagaagcgcgacgacgcggaccugaagcggcugcgcgaccucaaccaggccgucaacaaccugguggagcucaagagcacccagcagaagaacgugcugcgggucggcacgcuguccagcgacgaccugaucacccucgccgccgaccuggagaagcugaaguccaaggugauccgcaccgagcggccccucagcuccgggguguacaugggcaaccugagcucccagcagcuggaccagcgccgggcccuccugagcaugaucgggauguccggcggcccgcaggggaaccgcaccggcggggacggcgucgugcgggugugggacgucaagaacgcggagcugcucaacaaccaguucgggacgaugcccagccugacccuggccugccucaccaagcagggccagguggaccugaacgacgccgugcaggcccugaccgaccucggccugaucuacacggcgaaguaccccaacuccagcgaccuggacaugcucacccagagccaccccauccuggggauggucgacaccaagaaguccagccugaacaucuccggcuacaacuucagccucggggccgccgugaaggccggcgccugcaugcuggacggcgggaacaugcuggagaccaucaagguguccccgcagacgauggacggcauccucaagagcauccugaaggucaagcgcucccuggggauguucaucagcgacacccccggcgagcggaaccccuacgagaacauccucuacaagaucugccuguccggggagggcuggcccuacaucgcgagccgcaccuccaucaccggccgggccugggagaacacgcugguggaccucgagagcgacaacaagccgcccaagcugaacuccgccgggagcaacaagucccugcaggccgccggccucaacgcggggcugaccuacagccagcugaugacccugaaggacugcaugcuccagcuggaccccuccagcaagaccuggaucgacaucgagggccgccccgaggacccgguggagaucgcccuguuccagcccuccagcgggugcuacauccacuucuuccgggagcccacggaccucaagcaguucaagcaggacgccaaguacagccacggcaucgacgucaccgaccuguucuccacccagcccggccugaccagcgccgugaucgaggcccucccgcgcaacauggugcugacgugccagggguccgacgacaucaagaagcugcucgagagccagggccggcgcgacaucaagcugaucgacaucucccugagcaaggcggacucccgcaaguucgagaacgccgucugggaccaguacaaggaccucugccacaugcacaccgggguggucguggagaagaagaagcggggcgggaaggaggagaucacgccccacugcgcccugcuggacugcaucauguucgacgccgccaccaccggcagccucaacaucaccacccugcgcgcggugcugccccgggacauggucuuccgcaccuccacgcccaagguggugcucugaggacuaguuauaagacugacuagcccgaugggccucccaacgggcccuccuccccuccuugcaccgagauuaauaaaaaaaaaaaaaaaaaaaaaaaaaaaaaaaaaaaaaaaaaaaaaaaaaaaaaaaaaaaaaaaaaaaaaaaaaaaaaaaaaaaaaaaaaaaaaaaaaaaa

SEQ ID NO: 20588 - RNA, 1950 nt, Artificial Sequence
  mRNA product Design i-3 (A100) comprising derived and/or modified sequence from LASV(803213;Clade II)__AAF86704__SP-HsALB_NP(2-569) (opt1)
aggagaaagcuuaccaugaagugggugaccuucaucagccugcucuuccuguucuccagcgccuacuccagcgccuccaaggaggugaaguccuuccuguggacccagagccuccgccgggagcugagcggcuacugcuccaacaucaagcugcaggucgugaaggacgcccaggcgcuccugcacgggcuggacuucagcgaggugaacaacguccagcgccucaugcggaagcagaagcgcgacgacggcgaccugaagcggcugcgcgaccucaaccaggccgugaacaaccugguggagcugaaguccacccagcagaaguccauccuccgggucgggacgcugaccagcgacgaccugcucacccuggccgccgaccuggagaagcucaagagcaaggugauccgcaccgagcggccccuguccagcggcguguacauggggaaccuguccacgcagcagcucgagcagcgccgggcccugcugaacaugaucggcauggucggcggggcgcagggcacccagccggggcgcgacggcguggugcgggucugggacgugaagaaccccgaccuccugaacaaccaguucgggaccaugcccagccugacccucgccugccugacgaagcagggccagguggaccugaacgacgccguccucgcccugaccgaccugggccucaucuacaccgcgaaguaccccaacuccagcgaccuggaccgccugucccagagccacccgauccucaacaugguggacaccaagaaguccagccugaacaucagcggguacaacuucucccugggcgccgccgugaaggccggggccugcaugcucgacggcggcaacaugcuggagacgaucaaggucacgccccagaccauggacgggauccucaagagcauccugaaggugaagcggucccugggcauguucgugagcgacacccccggggagcgcaaccccuacgagaacauccuguacaagaucugccucuccggcgacggguggccguacaucgcgagccggaccuccaucgucggccgcgccugggagaacaccaccguggaccuggagagcgacggcaagccccagaagguggggaccgccggcuccaacaagagccugcaguccgccggguuccccacgggccucaccuacagccagcugaugacccugaaggacuccaugaugcagcuggaccccagcgccaagaccuggaucgacaucgaggggcggccggaggaccccgucgagaucgcgcucuaccagcccauguccggcugcuacauccacuucuuccgcgagcccacggaccugaagcaguucaagcaggacgccaaguacagccacggcaucgacguggccgaccuguucccggcccagcccgggcucaccuccgccgucaucgaggcgcugccccggaacauggugcugaccugccagggcagcgacgacaucaagaagcuccuggacucccaggggcgccgcgacaucaagcugaucgacaucagccucagcaagguggacucccggaaguucgagaacgccgucugggaccagugcaaggaccugugccacaugcacaccggcgugguggucgagaagaagaagcgcgggggcaaggaggagaucacgccccacugcgcccugauggacugcaucauguucgacgccgccgugagcggcgggcucaacaucccggugcugcgggcgguccugccccgcgacaugguguuccggaccuccagccccaaggugguccucugaggacuaguuauaagacugacuagcccgaugggccucccaacgggcccuccuccccuccuugcaccgagauuaauaaaaaaaaaaaaaaaaaaaaaaaaaaaaaaaaaaaaaaaaaaaaaaaaaaaaaaaaaaaaaaaaaaaaaaaaaaaaaaaaaaaaaaaaaaaaaaaaaaaa

SEQ ID NO: 20589 - RNA, 1953 nt, Artificial Sequence
  mRNA product Design i-3 (A100) comprising derived and/or modified sequence from LASV(GA391;Clade III)__CAA36646__SP-HsALB_NP(2-570) (opt1)
aggagaaagcuuaccaugaagugggugaccuucaucagccugcucuuccuguucuccagcgccuacuccagcgccuccaaggaggugcgcagcuuccuguggacccagucccuccggcgcgagcugagcggcuacugcuccaacaucaagcugcaggucgugaaggacgcccaggcgcuccugcacgggcuggacuucagcgagguguccaacguccagcggcucaugcgcaagcagaagcgggacgacggcgaccugaagcgccugcgggaccucaaccaggccgugaacaaccugguggagcucaagagcacccagcagaaguccguccugcgcguggggacccugagcuccgacgaccugcucauccuggccgccgaccuggagaagcucaagagcaaggugacccggaccgagcgcccccuguccagcggcgucuacauggggaaccuguccagccagcagcucgaccagcggcgcgcccugcugaacaugaucggcaugaccggcguguccgggggcgggaagggcgcgagcgacgggaucgugcgggucugggacgugaagaacgccgagcuccugaacaaccaguucggcacgaugccgucccugacccucgccugccugaccaagcagggccagguggaccugaacgacgccguccaggcgcucaccgaccuggggcugaucuacacggccaaguaccccaacagcagcgaccucgaccgccugucccagagccaccccauccugaacaugaucgacaccaagaaguccagccucaacaucuccggcuacaacuucagccugggggccgccgugaaggccggcgcgugcaugcuggacggcgggaacaugcucgagaccaucaaggugagcccccagaccauggacggcauccucaaguccauccugaaggucaagaagucccuggggauguucgugagcgacacgccgggcgagcggaaccccuacgagaacauccuguacaagaucugccuguccggggacggcuggcccuacaucgccagccgcaccuccaucgugggccgggccugggagaacaccgucguggaccucgagcaggacaacaagccccagaagaucgggaacggcgggagcaacaagucccugcagagcgccggcuucgccgcggggcugaccuacucccagcucaugacgcugaaggacuucaagugcuucaaccugaucccgaacgccaagaccuggauggacaucgagggccgccccgaggaccccguggagaucgcccuguaccagcccagcuccggcugcuacguccacuucuuccgggagccgaccgaccucaagcaguucaagcaggacgccaaguacagccacgggaucgacgugaccgaccuguucgccgcgcagcccggccugacgagcgccgucaucgaggcccucccccgcaacauggugaucacgugccagggguccgaggacauccggaagcugcuggagagccagggccgccgcgacaucaagcucaucgacaucacccuguccaaggccgacagccggaaguucgagaacgccgugugggaccaguucaaggaccugugccacaugcacaccggggucgugguggagaagaagaagcgcggcggcaaggaggagaucacgccccacugcgcgcucauggacugcaucauguucgacgccgccgucuccgggggccuggacgccaaggugcugcgggugguccucccgcgcgacaugguguuccggaccagcacccccaaggugguccugugaggacuaguuauaagacugacuagcccgaugggccucccaacgggcccuccuccccuccuugcaccgagauuaauaaaaaaaaaaaaaaaaaaaaaaaaaaaaaaaaaaaaaaaaaaaaaaaaaaaaaaaaaaaaaaaaaaaaaaaaaaaaaaaaaaaaaaaaaaaaaaaaaaaa

SEQ ID NO: 20590 - RNA, 1950 nt, Artificial Sequence
  mRNA product Design i-3 (A100) comprising derived and/or modified sequence from LASV(AV;Clade V)__CCA30315__SP-HsALB_NP(2-569) (opt1)
aggagaaagcuuaccaugaagugggugaccuucaucagccugcucuuccuguucuccagcgccuacuccagcgccuccaaggaggugaaguccuuccuguggacccagagccuccgccgggagcugagcggcuacugcuccaacaucaagcugcaggucgugaaggacgcccaggcgcuccugcacgggcuggacuucagcgagguguccaacguccagcgccucaugcggaagcagcgccgggacgacagcgaccugaagcgccugcgggaccucaaccaggccgugaacaaccugguggagcugaaguccacccagcagaaguccguccuccgcgugggcacgcugagcagcgacgaccugcucacccuggccgccgaccuggagaagcucaaguccaaggugacccggaccgagcgcccccugagcuccggggucuacaugggcaaccugagcucccagcagcucgaccagcggcgcgcccugcugaaccucaucgggaugacgaacggcagccagggcucccaggcggggcgggacggcguggugcgcgucugggacgugaagaacgccgagcugcugaacaaccaguucgggaccaugccgagccucacccuggccugccugaccaagcagggccagguggaccucaacgacgucgugcaggcccugacggaccuggggcucaucuacaccgcgaaguaccccaacaccagcgaccuggaccggcugacccagucccaccccauccucaacaugaucgacacgaagaaguccagccugaacaucagcggcuacaacuucucccugggcgccgccgugaaggccggggccugcaugcucgacggcgggaacaugcuggagaccaucaaggucagcccccaguccauggacggcauccucaagagcauccugaaggugaagcgcgcgcugggcauguucguguccgacaccccgggggagcggaaccccuacgagaacauccuguacaagaucugccucagcggcgacggguggcccuacaucgccucccgcaccagcaucgucggccgggccugggagaacacggugguggaccuggagaccgacgggaagccccagaagaucggcuccggcaacagcaacaagucccugcagagcgccggguucuccgccggccucaccuacagccagcugaugacccugaaggacgcgaugcugcagcucgacccgaacgccaagacguggauggacaucgaggggcgccccgaggaccccgucgagguggcccuguaccagcccaucuccggcugcuacauccacuucuuccgggagccgaccgaccugaagcaguucaagcaggacgccaaguacagccacgggaucgacaucgccgaccucuucgcggcccagcccggccugaccagcgccgucaucgaggcccugccccgcaacauggugaucacgugccagggcuccgaggacaucaagaagcuccuggagagccaggggcgcaaggacaucaagcugaucgacaucgcccucuccaagaucgacagccggaaguucgagaacgcggugugggaccaguacaaggaccugugccacaugcacaccggcgucgugguggagaagaagaagcgcgggggcaaggaggagaucaccccgcacugcgcccugauggacugcaucauguucgacgccgccgucuccgggggccucaacacccuggugcugcgggcggugcucccccgcgacauggucuuccggaccagcacgccccgcguggugcugugaggacuaguuauaagacugacuagcccgaugggccucccaacgggcccuccuccccuccuugcaccgagauuaauaaaaaaaaaaaaaaaaaaaaaaaaaaaaaaaaaaaaaaaaaaaaaaaaaaaaaaaaaaaaaaaaaaaaaaaaaaaaaaaaaaaaaaaaaaaaaaaaaaaa

SEQ ID NO: 20591 - RNA, 1950 nt, Artificial Sequence
  mRNA product Design i-3 (A100) comprising derived and/or modified sequence from LASV(Togo/2016/7082;Clade VI)__AMR44578__SP-HsALB_NP(2-569) (opt1)
aggagaaagcuuaccaugaagugggugaccuucaucagccugcucuuccuguucuccagcgccuacuccagcaacuccaaggaggugaaguccuuccuguggacccagagccuccgccgggagcugagcggcuacugcuccaacaucaagcugcaggucgugaaggacgcccaggcccuccugcacgggcuggacuucagcgagguguccaacguccagcgccucaugcggaagcagaagcgcgacgacggcgaccugaagcggcugcgcgaccucaaccaggcggugaacaaccugguggagcucaagagcguccagcagaaguccauccugcggguggggacccugaccagcgacgaccugcucacccuggccgccgaccuggagaagcucaaguccaaggugacccgcaccgagcggccccugagcuccggcgucuacauggggaaccugagcucccagcagcucgaccagcgccgggcccugcugagcaugaucggcauguccggcgggaaccagaacagccagccgaagggcgacgggguggugcgcgucugggacgugaagaacgccgaccuccugaacaaccaguucggcacgaugcccucccugacccucgcgugccugaccaagcagggccagguggaccugaacgacgccguccaggcccucaccgaccuggggcugaucuacacggccaaguaccccaacagcagcgaccucgaccggcugucccagagccaccccauccugaacaugaucgacaccaagaaguccagccucaacaucuccggcuacaacuucagccugggggcggccaucaagaccggcgccugcaugcuggacgggggcaacaugcucgagaccaucaaggugacgccgcagaccauggacggcauccugaaguccauccugaaggugaagcgcagccucgggauguucaucuccgacacccccggcgagcggaaccccuacgagaacauccuguacaagaucugccugagcggggacggcuggcccuacaucgccucccgcaccgccaucaucgggcgggcgugggagaacacggucguggaccucgagagcgacuccaagccgcagaagaucggcagcaacggcuccaacaagagccugcaguccgccggguucgcccccggccugaccuacagccagcucaugacccugaaggacuccaugcugcagcuggaccccaacgccaagaccuggaucgacaucgaggggcgccccgaggacccgguggaggucgcccucuuccagcccaucagcggcugcuacauccacuucuuccgggagcccacggaccugaagcaguucaagcaggacgcgaaguacagccacgggaucgacgugaccgaccuguucgccgcccagcccggccucaccuccgccgugaucgaggcccugccgcgcaacaugguccugaccugccagggcagcgacgacaucaagaagcuccuggacucccaggggcggcgcgacaucaagcugaucgacgugagccucaacaagaucgacucccgcaaguucgagaacgcggucugggaccaguacaaggaccugugccacaugcacacgggcgugguggucgagaagaagaagaagggcgggaaggaggagaucacgccccacugcgcccugcucgacugcaucauguucgacgccgccgugagcgggggccugaacgccaccgugcugcgggcgguccucccccgcgacaugguguuccggaccuccagccccaaggugguccugugaggacuaguuauaagacugacuagcccgaugggccucccaacgggcccuccuccccuccuugcaccgagauuaauaaaaaaaaaaaaaaaaaaaaaaaaaaaaaaaaaaaaaaaaaaaaaaaaaaaaaaaaaaaaaaaaaaaaaaaaaaaaaaaaaaaaaaaaaaaaaaaaaaaa

SEQ ID NO: 20592 - RNA, 1950 nt, Artificial Sequence
  mRNA product Design i-3 (A100) comprising derived and/or modified sequence from LASV(KAK-428;Clade n.d. (VII))__ANH09741__SP-HsALB_NP(2-569) (opt1)
aggagaaagcuuaccaugaagugggugaccuucaucagccugcucuuccuguucuccagcgccuacuccagcaacuccaaggaggugaaguccuuccuguggacccagagccuccgccgggagcugagcggcuacugcaccaacaucaagcugcaggucgugaaggacgcccaggcccuccugcacgggcuggacuucuccgaggugagcaacguccagcgccucaugcggaagcagaagcgcgacgacaacgaccugaagcggcugcgcgaccucaaccaggcggugaacaaccugguggagcugaaguccguccagcagaaguccgugcucaaggugggcacgcugaacagcgacgaccugcucacccuggccgccgaccuggagaagcucaagagcaaggucgugcggaccgagcgcccccuguccagcgggguguacaugggcaaccuguccagccagcagcucgaccagcggcgcgcccugcugaacaugaucgggauggccggcggcucccaggggaaccagccgagccgggacggcgucgugcgcgugugggacgucaagaacgcggaccuccugaacaaccaguucgggaccaugcccucccugacgcucgccugccugaccaagcagggccagguggaccugaacgacgugguccucgcccugaccgaccuggggcucaucuacaccgccaaguaccccaacagcuccgaccuggaccggcugagccagaaccaccccgugcucaacaugaucgacgugaacaagagcucccugaacaucagcggcuacaacuucucccugggcgcggccgucaaggccggggccugcaugcucgacggcgggaacaugcuggagacgaucaagaucagcccgcagaccguggacggcauccugaaguccauccucaaggugaagcgcgcccugggcauguucgucagcgacacccccggggagcggaaccccuacgagaacauccuguacaaggugugccucuccggcaacggguggcccuacaucgcgagccgcaccuccaucgucggccgggccugggagaacacggugguggaccuggagagcaacaagaaccagccgaaggucgggaacaacggcuccaacaagaugcugcagagcuccggcuucgccaccgggcucaccuacagccagcugaugacccugcgcgacuccaugcugcagcucgaccccacggccaagaccuggaucgacaucgagggccggcccgaggaccccguggagcuggcccuguuccagccgagcuccgggugcuacauccacuucuuccgcgagcccaccgaccucaagcaguucaagcaggacgcgaaguacagccacggcaucgacgugaacgaccuguucuccgcccagcccgggcugaccagcgccguccucgaggcccugccccggaacauggugcugacgugccagggcagcgacgacauccgcaagcuccuggacucccaggaccgcaaggacaucaagcugaucgacaucagccucuccaaggccgacgcgcggaaguucgagaacgacgugugggaccaguucaaggaccugugccacaugcacaccggcaucgucguggagaagaagaagaagggcgggaagcaggagaugaccccgcacugcgcccugcucgacugcaucauguucgacgccgccgugagcgggggccugaacguccccacccugcgcgccgugcuccccacggacaugguguuccggaccaucaccaccaaggucgugcugugaggacuaguuauaagacugacuagcccgaugggccucccaacgggcccuccuccccuccuugcaccgagauuaauaaaaaaaaaaaaaaaaaaaaaaaaaaaaaaaaaaaaaaaaaaaaaaaaaaaaaaaaaaaaaaaaaaaaaaaaaaaaaaaaaaaaaaaaaaaaaaaaaaaa

SEQ ID NO: 20593 - RNA, 1950 nt, Artificial Sequence; identical to SEQ ID NO: 20587
  mRNA product Design i-3 (A100) comprising derived and/or modified sequence from LASV(Pinneo-NIG-1969;Clade I)__AIT17837__SP-HsALB_NP(2-569) (opt1)

SEQ ID NO: 20594 - RNA, 1950 nt, Artificial Sequence
  mRNA product Design i-3 (A100) comprising derived and/or modified sequence from LASV(ISTH0009-NIG-2011;Clade II)__AIT17405__SP-HsALB_NP(2-569) (opt1)
aggagaaagcuuaccaugaagugggugaccuucaucagccugcucuuccuguucuccagcgccuacuccagcguguccaaggaggucaagagcuuccuguggacccagucccuccgccgggagcugagcggcuacugcuccaacaucaagcuccagguggugaaggacgcccaggcccugcugcacgggcuggacuucagcgaggucuccaacgugcagcgccucaugcggaagcagaagcgcgacgacagcgaccugaagcggcugcgcgaccucaaccaggcggugaacaaccuggucgagcugaaguccacccagcagaaguccauccuccgggugggcacccugaccagcgacgaccugcucacccuggccgccgaccuggagaagcucaagagcaaggugauccgcaccgagcggccccuguccagcggggucuacaugggcaaccuguccacgcagcagcucgagcagcgccgggcccugcugaacaugaucgggauggugggcggcgcccaggggacccagccgggccgcgacggggugguccgggugugggacgugaagaaccccgaccuccugaacaaccaguucggcaccaugcccagccugacccucgcgugccugacgaagcaggggcaggucgaccugaacgacgccgugcucgcccugaccgaccugggccucaucuacaccgccaaguaccccaacuccagcgaccuggaccgccugucccagagccacccgauccucaacaugguggacaucaagaaguccagccugaacaucagcggcuacaacuucucccugggggcggccgucaaggccggcgccugcaugcucgacgggggcaacaugcuggagaccaucaaggugacgccccagaccauggacggcauccucaagagcauccugaaggugaagcggucccuggggauguucgucagcgacacccccggcgagcgcaaccccuacgagaacauccuguacaagaucugccucuccggggacggcuggccguacaucgccagccggaccuccaucguggggcgcgcgugggagaacacgaccguggaccuggagagcgacggcaagccccagaaggucggcuccgccgggagcaacaagucccugcagagcgccggcuuccccaccgggcucaccuacucccagcugaugacgcugaaggacagcaugaugcagcuggaccccuccgccaagaccuggaucgacaucgagggccggccggaggaccccguggagaucgcccucuaccagcccaugagcgggugcuacauccacuucuuccgcgagcccaccgaccugaagcaguucaagcaggacgcgaaguacucccacggcaucgacgucgccgaccuguucccggcccagcccggccucaccagcgccgugaucgaggcccugccccggaacauggugcugacgugccaggggagcgacgacaucaagcgccuccuggacucccagggccgccgggacaucaagcugaucgacaucgcgcucagcaaggccgacucccgccgguucgagaacgccgucugggaccagugcaaggaccugugccacaugcacaccggggugguggucgagaagaagaagcgcggcgggaaggaggagaucacgccccacugcgcccugauggacugcaucauguacgacgccgcggugagcggcggccucaacaucccggugcugcgggccguccugccccgcgacaugguguuccggaccuccagccccaaggugguccucugaggacuaguuauaagacugacuagcccgaugggccucccaacgggcccuccuccccuccuugcaccgagauuaauaaaaaaaaaaaaaaaaaaaaaaaaaaaaaaaaaaaaaaaaaaaaaaaaaaaaaaaaaaaaaaaaaaaaaaaaaaaaaaaaaaaaaaaaaaaaaaaaaaaa

SEQ ID NO: 20595 - RNA, 1950 nt, Artificial Sequence
  mRNA product Design i-3 (A100) comprising derived and/or modified sequence from LASV(ISTH2010-NIG-2012;Clade II)__AIT17483__SP-HsALB_NP(2-569) (opt1)
aggagaaagcuuaccaugaagugggugaccuucaucagccugcucuuccuguucuccagcgccuacuccagcgccuccaaggaggugaaguccuuccuguggacccagagccuccgccgggagcugagcggcuacugcuccaacaucaagcugcaggucgugaaggacgcccaggcgcuccugcacgggcuggacuucagcgagguguccaacguccagcgccucaugcggaagcagaagcgcgacgacagcgaccugaagcggcugcgcgaccucaaccaggccgugaacaaccugguggagcugaaguccacccagcagaaguccauccuccgggucggcacgcugaccagcgacgaccugcucacccuggccgccgaccuggagaagcucaagagcaaggugauccgcaccgagcggccccuguccagcgggguguacaugggcaaccuguccacgcagcagcucgagcagcgccgggcccugcugaaccucaucgggauggucggcggcgcgcaggggacccagccgggccgcgacgggguggugcgggucugggacgugaagaaccccgaccugcugaacaaccaguucggcaccaugcccagccucacccuggccugccugacgaagcagggccagguggaccucaacgacgccguccuggcccugaccgaccucgggcugaucuacaccgcgaaguaccccaacuccagcgaccuggaccgccucucccagagccacccgauccugaacaugguggacaccaagaaguccagccugaacaucagcggcuucaacuucucccucggggccgccgugaaggccggcgccugcaugcuggacgggggcaacaugcuggagacgaucaaggucacgccccagaccauggacggcauccucaagagcauccugaaggugaagaagucccuggggauguucgugagcgacacccccggcgagcggaaccccuacgagaacauccucuacaagaucugccuguccggggacggcuggccguacaucgcgagccgcaccuccaucgucgggcgggccugggagaacaccaccguggaccuggagagcgacggcaagccccacaaggugggcaccgccggguccaacaagagccuccaguccgccggcuuccccacggggcugaccuacagccagcugaugacccugaaggacuccaugaugcagcucgaccccagcgccaagaccuggaucgacaucgagggccgcccggaggaccccgucgagaucgcgcuguaccagcccauguccgggugcuacauccacuucuuccgggagcccacggaccugaagcaguucaagcaggacgccaaguacagccacggcaucgacguggccgaccucuucccggcccagcccggccugaccuccgccgucaucgaggcgcugccccgcaacauggugcugaccugccaggggagcgacgacaucaagcggcuccuggacagccagggccgccgcgacaucaagcucaucgacaucgcccuguccaaggccgacagccggcgcuucgagaacgccgugugggaccagugcaaggaccugugccacaugcacaccggggucgugguggagaagaagaagcggggcgggaaggaggagaucacgccccacugcgcccucauggacugcaucauguacgacgcggccgucuccggcggccugaacaucccggugcugcgcgccgugcucccccgggacauggucuuccgcaccagcucccccaagguggugcugugaggacuaguuauaagacugacuagcccgaugggccucccaacgggcccuccuccccuccuugcaccgagauuaauaaaaaaaaaaaaaaaaaaaaaaaaaaaaaaaaaaaaaaaaaaaaaaaaaaaaaaaaaaaaaaaaaaaaaaaaaaaaaaaaaaaaaaaaaaaaaaaaaaaa

SEQ ID NO: 20596 - RNA, 1950 nt, Artificial Sequence
  mRNA product Design i-3 (A100) comprising derived and/or modified sequence from LASV(Lassa virus/H.sapiens-wt/NGA/2015/ISTH_0543;Clade II)__AVO03640__SP-HsALB_NP(2-569) (opt1)
aggagaaagcuuaccaugaagugggugaccuucaucagccugcucuuccuguucuccagcgccuacuccagcgccuccaaggaggugaaguccuuccuguggacccagagccuccgccgggagcugagcggcuacugcuccaacaucaagcugcaggucgugaaggacgcccaggcgcuccugcacgggcuggacuucagcgagguguccaacguccagcgccucaugcggaagcagaagcgcgacgacagcgaccugaagcggcugcgcgaccucaaccaggccgugaacaaccugguggagcugaaguccacccagcagaaguccauccuccgggucggcacgcugaccagcgacgaccugcucacccuggccgccgaccuggagaagcucaagagcaaggugauccgcaccgagcggccccuguccagcgggguguacaugggcaaccuguccacgcagcagcucgagcagcgccgggcccugcugaacaugaucgggauggucggcggcgcgcaggggacccagccgggccgcgacgggguggugcgggucugggacgugaagaaccccgaccuccugaacaaccaguucggcaccaugcccagccugacccucgccugccugacgaagcagggccagguggaccugaacgacgccguccucgcccugaccgaccuggggcucaucuacaccgcgaaguaccccaacuccagcgaccuggaccgccugucccagagccacccgauccucaacaugguggacaccaagaaguccagccugaacaucagcggcuacaacuucucccugggggccgccgugaaggccggcgccugcaugcucgacgggggcaacaugcuggagacgaucaaggucacgccccagaccauggacggcauccucaagagcauccugaaggugaagaagucccuggggauguucgugagcgacacccccggcgagcggaaccccuacgagaacauccuguacaagaucugccucuccggggacggcuggccguacaucgcgagccgcaccuccaucgucgggcgggccugggagaacaccaccguggaccuggagagcgacggcaagccccagaaggugggcuccgccgggagcaacaagucccugcagagcgccggcuuccccaccgggcucacguacucccagcugaugacccugaaggacagcaugaugcagcuggaccccuccgccaagaccuggaucgacaucgagggccgcccggaggaccccgucgagaucgcgcucuaccagcccaugagcgggugcuacauccacuucuuccgggagcccaccgaccugaagcaguucaagcaggacgccaaguacucccacggcaucgacguggccgaccuguucccggcccagcccggccucacgagcgccgucaucgaggcgcugccccgcaacauggugcugaccugccaggggagcgacgacaucaagcggcuccuggacucccagggccgcaaggacaucaagcugaucgacaucgcccucagcaaggccgacucccgccgguucgagaacgccgugugggaccagugcaaggaccugugccacaugcacaccggggucgugguggagaagaagaagcgcggcgggaaggaggagaucacgccccacugcgcccugauggacugcaucauguacgacgcggccgucagcggcggccucaacaucccggugcugcgggccgugcugccccgcgacauggucuuccggaccuccagccccaagguggugcucugaggacuaguuauaagacugacuagcccgaugggccucccaacgggcccuccuccccuccuugcaccgagauuaauaaaaaaaaaaaaaaaaaaaaaaaaaaaaaaaaaaaaaaaaaaaaaaaaaaaaaaaaaaaaaaaaaaaaaaaaaaaaaaaaaaaaaaaaaaaaaaaaaaaa

SEQ ID NO: 20597 - RNA, 1950 nt, Artificial Sequence
  mRNA product Design i-3 (A100) comprising derived and/or modified sequence from LASV(Lassa virus/H.sapiens-wt/NGA/2016/ISTH_0009;Clade II)__AVO03572__SP-HsALB_NP(2-569) (opt1)
aggagaaagcuuaccaugaagugggugaccuucaucagccugcucuuccuguucuccagcgccuacuccagcgccuccaaggaggugaaguccuuccuguggacccagagccuccgccgggagcugagcggcuacugcuccaacaucaagcugcaggucgugaaggacgcccaggcgcuccugcacgggcuggacuucagcgagguguccaacguccagcgccucaugcggaagcagaagcgcgacgacagcgaccugaagcggcugcgcgaccucaaccaggccgugaacaaccugguggagcugaaguccacccagcagaaguccauccuccgggucggcacgcugaccagcgacgaccugcucacccuggccgccgaccuggagaagcucaagagcaaggugauccgcaccgagcggccccuguccagcgggguguacaugggcaaccuguccacgcagcagcucgagcagcgccgggcccugcugaacaugaucgggauggucggcggcgcgcaggggacccagccgggccgcgacgggguggugcgggucugggacgugaagaaccccgaccuccugaacaaccaguucggcaccaugcccagccugacccucgccugccugacgaagcagggccagguggaccugaacgacgccguccucgcccugaccgaccuggggcucaucuacaccgcgaaguaccccaacuccagcgaccuggaccgccugucccagagccacccgauccucaacaugguggacaccaagaaguccagccugaacaucagcggcuacaacuucucccugggggccgccgugaaggccggcgccugcaugcucgacgggggcaacaugcuggagacgaucaaggucacgccccagaccauggacggcauccucaagagcauccugaaggugaagaagucccuggggauguucgugagcgacacccccggcgagcggaaccccuacgagaacauccuguacaagaucugccucuccggggacggcuggccguacaucgcgagccgcaccuccaucgucgggcgggccugggagaacaccaccguggaccuggagagcgacggcaagccccagaaggugggcuccgccgggagcaacaagucccugcagagcgccggcuuccccaccgggcucacguacucccagcugaugacccugaaggacagcaugaugcagcuggaccccuccgccaagaccuggaucgacaucgagggccgcccggaggaccccgucgagaucgcgcucuaccagcccaugagcgggugcuacauccacuucuuccgggagcccaccgaccugaagcaguucaagcaggacgccaaguacucccacggcaucgacguggccgaccuguucccggcccagcccggccucacgagcgccgucaucgaggcgcugccccgcaacauggugcugaccugccaggggagcgacgacaucaagcggcuccuggacucccagggccgccgcgacaucaagcugaucgacaucgcccucagcaaggccgacucccggcgcuucgagaacgccgugugggaccagugcaaggaccugugccacaugcacaccggggucgugguggagaagaagaagcggggcgggaaggaggagaucacgccccacugcgcccugauggacugcaucauguacgacgcggccgucagcggcggccucaacaucccggugcugcgcgccgugcugccccgggacauggucuuccgcaccuccagccccaagguggugcucugaggacuaguuauaagacugacuagcccgaugggccucccaacgggcccuccuccccuccuugcaccgagauuaauaaaaaaaaaaaaaaaaaaaaaaaaaaaaaaaaaaaaaaaaaaaaaaaaaaaaaaaaaaaaaaaaaaaaaaaaaaaaaaaaaaaaaaaaaaaaaaaaaaaa

SEQ ID NO: 20598 - RNA, 1950 nt, Artificial Sequence
  mRNA product Design i-3 (A100) comprising derived and/or modified sequence from LASV(Lassa virus/H.sapiens-wt/NGA/2016/ISTH_0017;Clade II)__AVO03568__SP-HsALB_NP(2-569) (opt1)
aggagaaagcuuaccaugaagugggugaccuucaucagccugcucuuccuguucuccagcgccuacuccagcgccuccaaggaggugaaguccuuccuguggacccagagccuccgccgggagcugagcggcuacugcuccagcaucaagcugcaggucgugaaggacgcccaggcgcuccugcacgggcuggacuucuccgaggugagcaacguccagcgccucaugcggaagcagaagcgcgacgacuccgaccugaagcggcugcgcgaccucaaccaggccgugaacaaccugguggagcucaagagcacccagcagaaguccauccugcgggucggcacgcugaccagcgacgaccugcucacccuggccgccgaccuggagaagcucaaguccaaggugauccgcaccgagcggccccugagcuccgggguguacaugggcaaccugagcacgcagcagcucgagcagcgccgggcccugcugaacaugaucgggauggcgggcggcgcccaggggacccagccgggccgcgacggggucgugcgggugugggacgucaagaaccccgaccuccugaacaaccaguucggcaccaugcccucccugacccucgccugccugacgaagcagggccagguggaccugaacgacgccgugcucgcgcugaccgaccuggggcucaucuacaccgccaaguaccccaacagcuccgaccuggaccgccugagccagagccacccgauccucaacauggucgacaccaagaaguccagccugaacaucuccggcuacaacuucagccugggggccgccgugaaggccggcgcgugcaugcucgacgggggcaacaugcuggagacgaucaaggugacgccccagaccauggacggcauccugaaguccauccucaaggucaagcggagccuggggauguucguguccgacgcccccggcgagcgcaaccccuacgagaacauccuguacaagaucugccucagcggggacggcuggccguacaucgccucccggaccagcaucguggggcgcgccugggagaacaccaccgucgaccuggaguccgacggcaagccccagaaggugggcgccaccgggagcaacaagucccugcagagcgcgggcuuccccaccgggcucacguacucccagcugaugacccugaaggacagcaugaugcagcuggaccccuccgccaagaccuggaucgacaucgagggccggccggaggaccccguggaggucgcccucuaccagcccgugagcgggugcuacauccacuucuuccgcgagcccaccgaccugaagcaguucaagcaggacgccaaguacucccacggcaucgacgucgccgaccuguucccggcgcagcccggccucacgagcgccgugaucgaggcccugccccggaacauggugcugaccugccaggggagcgacgacaucaagaagcuccuggacucccagggccgcaaggacaucaagcugaucgacaucgcccucagcaaggccgacucccgccgguucgagaacgcggucugggaccagugcaaggaccugugccacaugcacaccggggugguggucgagaagaagaagcgcggcgggaaggaggagaucacgccccacugcgcccugauggacugcaucauguacgacgccgccgugagcggcggccucaacaucccggugcugcgggcgguccugccccgcgacaugguguuccggaccuccagccccaaggugguccucugaggacuaguuauaagacugacuagcccgaugggccucccaacgggcccuccuccccuccuugcaccgagauuaauaaaaaaaaaaaaaaaaaaaaaaaaaaaaaaaaaaaaaaaaaaaaaaaaaaaaaaaaaaaaaaaaaaaaaaaaaaaaaaaaaaaaaaaaaaaaaaaaaaaa

SEQ ID NO: 20599 - RNA, 1950 nt, Artificial Sequence
  mRNA product Design i-3 (A100) comprising derived and/or modified sequence from LASV(Lassa virus/H.sapiens-wt/NGA/2018/ISTH_0959;Clade II)__AVV65100__SP-HsALB_NP(2-569) (opt1)
aggagaaagcuuaccaugaagugggugaccuucaucagccugcucuuccuguucuccagcgccuacuccagcgccuccaaggaggugaaguccuuccuguggacccagagccuccgccgggagcugagcggcuacugcuccaacaucaagcugcaggucgugaaggacgcccaggcgcuccugcacgggcuggacuucagcgagguguccaacguccagcgccucaugcggaagcagaagcgcgacgacagcgaccugaagcggcugcgcgaccucaaccaggccgugaacaaccugguggagcugaaguccacccagcagaaguccauccuccgggucggcacccugaccagcgacgaccugcucacccuggccgccgaccuggagaagcucaagagcaaggugauccgcaccgagcggccccuguccagcgggguguacaugggcaaccuguccacgcagcagcucgagcagcgccgggcccugcugaaccucaucgggauggucggcggcgcgcaggggacccagccgggccgcgacgggguggugcgggucugggacgugaagaaccccgaccugcugaacaaccaguucggcaccaugcccagccucacccuggccugccugacgaagcagggccagguggaccucaacgacgucgugcuggcccugaccgaccucgggcugaucuacaccgccaaguaccccaacuccagcgaccuggaccgccucucccagagccacccgauccugaacaugguggacaccaagaaguccagccugaacaucagcggcuucaacuucucccucggggcggccgucaaggccggcgccugcaugcuggacgggggcaacaugcuggagacgaucaaggugacgccccagaccauggacggcauccucaagagcauccugaaggugaagaagucccuggggauguucgucagcgacacccccggcgagcggaaccccuacgagaacauccucuacaagaucugccuguccggggacggcuggccguacaucgccagccgcaccuccaucguggggcgggcgugggagaacaccaccguggaccuggagagcgacggcaagccccacaaggucggcaccgccggguccaacaagagccuccaguccgccggcuuccccacggggcugaccuacagccagcugaugacccugaaggacuccaugaugcagcucgaccccagcgccaagaccuggaucgacaucgagggccgcccggaggaccccguggagaucgcccuguaccagcccauguccgggugcuacauccacuucuuccgggagcccacggaccugaagcaguucaagcaggacgcgaaguacagccacggcaucgacgucgccgaccucuucccggcccagcccggccugaccuccgccgugaucgaggcccugccccgcaacauggugcugaccugccaggggagcgacgacaucaagcggcuccuggacagccagggccgcaaggacaucaagcucaucgacaucgcgcuguccaagaccgacagccgccgguucgagaacgccgucugggaccagugcaaggaccugugccacaugcacacgggggugguggucgagaagaagaagcgcggcgggaaggaggagaucacgccccacugcgcccucauggacugcaucauguacgacgccgccguguccggcggccugaacaucccggugcugcgggcgguccucccccgcgacaugguguuccggaccagcucccccaaggugguccugugaggacuaguuauaagacugacuagcccgaugggccucccaacgggcccuccuccccuccuugcaccgagauuaauaaaaaaaaaaaaaaaaaaaaaaaaaaaaaaaaaaaaaaaaaaaaaaaaaaaaaaaaaaaaaaaaaaaaaaaaaaaaaaaaaaaaaaaaaaaaaaaaaaaa

SEQ ID NO: 20600 - RNA, 1950 nt, Artificial Sequence
  mRNA product Design i-3 (A100) comprising derived and/or modified sequence from LASV(LASV003-NIG-2008;Clade II)__AIT17581__SP-HsALB_NP(2-569) (opt1)
aggagaaagcuuaccaugaagugggugaccuucaucagccugcucuuccuguucuccagcgccuacuccagcgccuccaaggaggugaaguccuuccuguggacccagagccuccgccgggagcugagcggcuacugcuccagcaucaagcugcaggucgugaaggacgcccaggcgcuccugcacgggcuggacuucuccgaggugagcaacguccagcgccucaugcggaagcagaagcgcgacgacuccgaccugaagcggcugcgcgaccucaaccaggccgugaacaaccugguggagcucaagagcacccagcagaaguccguccugcgggugggcacccugaccagcgacgaccugcucacccuggccgccgaccuggagaagcucaaguccaaggugauccgcaccgagcggccccugagcuccggggucuacaugggcaaccugagcgcccagcagcucgagcagcgccggacgcugcugaacaugaucgggauggugggcggcgcgcaggggacccagccgggccgcgacggggugguccgggugugggacgugaagaaccccgaccuccugaacaaccaguucggcaccaugcccucccugacccucgccugccugacgaagcaggggcaggucgaccugaacgacguggugcucgcccugaccgaccugggccucaucuacaccgccaaguaccccaacagcuccgaccuggaccgccugagccagagccacccgauccucuccauggucgacaccaagaaguccagccugaacaucagcggcuacaacuucucccugggggcggccgugaaggccggcgccugcaugcucgacgggggcaacaugcuggagacgaucaaggugacgccccagaccauggacggcauccucaagagcauccugaaggucaagaagucccuggggauguucgugagcgacacccccggcgagcggaaccccuacgagaacauccuguacaagaucugccucuccggggacggcuggccguacaucgccagccgcaccuccaucguggggcgggcgugggagaacaccaccgucgaccuggagagcgacggcaagccccagaaggugggcaccgccggguccaacaagagccugcaguccgccggcuuccccacggggcucaccuacagccagcugaugacccugaaggacuccaugaugcagcuggaccccagcgccaagaccuggaucgacaucgagggccgcccggaggaccccgucgagaucgcccucuaccagcccauguccgggugcuacauccacuucuuccgggagcccacggaccugaagcaguucaagcaggacgcgaaguacagccacggcaucgacgugaccgaccuguucccggcccagcccggccucaccagcgccgugaucgaggcccugccccgcaacaugguccugaccugccagggguccgacgacaucaagcggcuccuggacagccagggccgccgcgacaucaagcugaucgacaucgcccucuccaaggcggacagccggcgcuucgagaacgccgugugggaccagugcaaggaccugugccacaugcacacggggguggucguggagaagaagaagcggggcgggaaggaggagaucacgccccacugcgcccugauggacugcaucauguacgacgccgccguguccggcggccucaacaucccgguccugcgcgcggugcugccccgggacaugguguuccgcaccagcucccccaaggucgugcucugaggacuaguuauaagacugacuagcccgaugggccucccaacgggcccuccuccccuccuugcaccgagauuaauaaaaaaaaaaaaaaaaaaaaaaaaaaaaaaaaaaaaaaaaaaaaaaaaaaaaaaaaaaaaaaaaaaaaaaaaaaaaaaaaaaaaaaaaaaaaaaaaaaaa

SEQ ID NO: 20601 - RNA, 1950 nt, Artificial Sequence
  mRNA product Design i-3 (A100) comprising derived and/or modified sequence from LASV(LASV035-NIG-2009;Clade II)__AIT17589__SP-HsALB_NP(2-569) (opt1)
aggagaaagcuuaccaugaagugggugaccuucaucagccugcucuuccuguucuccagcgccuacuccagcgccuccaaggaggugaaguccuuccuguggacccagagccuccgccgggagcugagcggcuacugcuccagcaucaagcugcaggucgugaaggacgcccaggcgcuccugcacgggcuggacuucuccgaggugagcaacguccagcgccucaugcggaagcagaagcgcgacgacuccgaccugaagcggcugcgcgaccucaaccaggccgugaacaaccugguggagcucaagagcacccagcagaaguccauccugcgggucggcacgcugaccagcgacgaccugcucacccuggccgccgaccuggagaagcucaaguccaaggugauccgcaccgagcggccccugagcuccgggguguacaugggcaaccugagcgcccagcagcucgagcagcgccgggcgcugcugaacaugaucgggauggucggcggcgcccaggggacgcagccgggccgcgacgggguggugcgggucugggacgugaagaaccccgaccuccugaacaaccaguucggcaccaugcccucccugacccucgccugccugaccaagcagggccagguggaccugaacgacgccguccucgcgcugacggaccuggggcucaucuacaccgccaaguaccccaacagcuccgaccuggaccgccugagccagagccacccgauccucaacaugguggacaccaagaaguccagccugaacaucuccggcuacaacuucagccugggggccgccgugaaggccggcgcgugcaugcucgacgggggcaacaugcuggagaccaucaaggucacgccccagaccauggacggcauccugaaguccauccucaaggugaagcggagccuggggauguucguguccgacacccccggcgagcgcaaccccuacgagaacauccuguacaagaucugccucagcggggacggcuggccguacaucgccucccggaccagcaucgucgggcgcgccugggagaacacgaccguggaccuggaguccgacggcaagccccagaaggugggcaccaccgggagcaacaagucccugcagagcgccggcuuccccacggggcucaccuacucccagcugaugacccugaaggacagcaugaugcagcuggaccccuccgccaagaccuggaucgacaucgagggccggccggaggaccccgucgagaucgcgcucuaccagcccaugagcgggugcuacauccacuucuuccgcgagcccacggaccugaagcaguucaagcaggacgccaaguacucccacggcaucgacguggccgaccuguucccggcccagcccggccucaccagcgccgucaucgaggcgcugccccggaacauggugcugaccugccaggggagcgacgacaucaagaagcuccuggacucccagggccgccgcgacaucaagcugaucgacaucgcccucagcaaggccgacucccggaaguucgagaacgccgugugggaccagugcaaggaccugugccacaugcacaccggggucgugguggagaagaagaagcgcggcgggaaggaggagaucacgccccacugcgcccugauggacugcaucauguacgacgcggccgucagcggcggccucaacaucccggugcugcgggccgugcugccccgcgacauggucuuccggaccuccagccccaagguggugcucugaggacuaguuauaagacugacuagcccgaugggccucccaacgggcccuccuccccuccuugcaccgagauuaauaaaaaaaaaaaaaaaaaaaaaaaaaaaaaaaaaaaaaaaaaaaaaaaaaaaaaaaaaaaaaaaaaaaaaaaaaaaaaaaaaaaaaaaaaaaaaaaaaaaa

SEQ ID NO: 20602 - RNA, 1950 nt, Artificial Sequence
  mRNA product Design i-3 (A100) comprising derived and/or modified sequence from LASV(LASV1000-NIG-2009;Clade II)__AIT17783__SP-HsALB_NP(2-569) (opt1)
aggagaaagcuuaccaugaagugggugaccuucaucagccugcucuuccuguucuccagcgccuacuccagcgccuccaaggaggugaaguccuuccuguggacccagagccuccgccgggagcugagcggcuacugcuccaacaucaagcugcaggucgugaaggacgcccaggcgcuccugcacgggcuggacuucagcgagguguccaacguccagcgccucaugcggaagcagaagcgcgacgacagcgaccugaagcggcugcgcgaccucaaccaggccgugaacaaccugguggagcugaaguccacccagcagaaguccauccuccgggucggcacgcugaccagcgacgaccugcucacccuggccgccgaccuggagaagcucaagagcaaggugauccgcaccgagcggccccuguccagcgggguguacaugggcaaccuguccacgcagcagcucgagcagcgccgggcccugcugaacaugaucgggauggucggcggcgcgcaggggacccagccgggccgcgacgggguggugcgggucugggacgugaagaaccccgaccuccugaacaaccaguucggcaccaugcccagccugacccucgccugccugacgaagcagggccagguggaccugaacgacgucgugcucgcccugaccgaccuggggcucaucuacaccgccaaguaccccaacuccagcgaccuggaccgccugucccagagccacccgauccucaacaugguggacaccaagaaguccagccugaacaucagcggcuacaacuucucccugggggcggccgucaaggccggcgccugcaugcucgacgggggcaacaugcuggagacgaucaaggugacgccccagaccauggacggcauccucaagagcauccugaaggugaagaagucccuggggauguucgucagcgacacccccggcgagcggaaccccuacgagaacauccuguacaagaucugccucuccggggacggcuggccguacaucgccagccgcaccuccaucguggggcgggcgugggagaacaccaccguggaccuggagagcgacggcaagccccagaaggucggcaccgccggguccaacaagagccugcaguccgccggcuuccccacggggcucaccuacagccagcugaugacccugaaggacuccaugaugcagcuggaccccagcgccaagaccuggaucgacaucgagggccgcccggaggaccccguggagaucgcccucuaccagcccgucuccgggugcuacauccacuucuuccgggagcccacggaccugaagcaguucaagcaggacgcgaaguacagccacggcaucgacguggccgaccuguucccggcccagcccggccucaccuccgccgugaucgaggcccugccccgcaacaugguccugaccugccaggggagcgacgacaucaagcggcuccuggacagccagggccgccgcgacaucaagcugaucgacaucgcgcucuccaaggccgacagccggcgcuucgagaacgccgugugggaccagugcaaggaccugugccacaugcacaccgggguggucguggagaagaagaagcggggcgggaaggaggagaucacgccccacugcgcccugauggacugcaucauguacgacgccgcgguguccggcggccucaacaucccgguccugcgcgccgugcugccccgggacaugguguuccgcaccagcucccccaaggucgugcucugaggacuaguuauaagacugacuagcccgaugggccucccaacgggcccuccuccccuccuugcaccgagauuaauaaaaaaaaaaaaaaaaaaaaaaaaaaaaaaaaaaaaaaaaaaaaaaaaaaaaaaaaaaaaaaaaaaaaaaaaaaaaaaaaaaaaaaaaaaaaaaaaaaaa

SEQ ID NO: 20603 - RNA, 1950 nt, Artificial Sequence
  mRNA product Design i-3 (A100) comprising derived and/or modified sequence from LASV(LASV221-NIG-2010;Clade II)__AIT17625__SP-HsALB_NP(2-569) (opt1)
aggagaaagcuuaccaugaagugggugaccuucaucagccugcucuuccuguucuccagcgccuacuccagcgccuccaaggaggugaaguccuuccuguggacccagagccuccgccgggagcugagcggcuacugcuccagcaucaagcugcaggucgugaaggacgcccaggcgcuccugcacgggcuggacuucuccgaggugagcaacguccagcgccucaugcggaagcagcgccgggacgacuccgaccugaagcgccugcgggaccucaaccaggccgugaacaaccugguggagcucaagagcacccagcagaaguccauccugcgcgucggcacgcugaccagcgacgaccugcucacccuggccgccgaccuggagaagcucaaguccaaggugauccggaccgagcgcccccugagcuccgggguguacaugggcaaccugagcacgcagcagcucgagcagcggcgcgcccugcugaacaugaucgggauggucggcggcgcgcaggggacccagccgggccgggacgggguggugcgcgucugggacgugaagaaccccgaccuccugaacaaccaguucggcaccaugcccucccugacccucgccugccugacgaagcagggccagguggaccugaacgacgccguccucgcccugaccgaccuggggcucaucuacaccgcgaaguaccccaacagcuccgaccuggaccggcugagccagagccacccgauccucaacaugguggacaccaagaaguccagccugaacaucuccggcuacaacuucagccugggggccgccgugaaggccggcgccugcaugcucgacgggggcaacaugcuggagacgaucaaggucacgccccagaccguggacggcauccugaaguccauccucaaggugaagcgcagccuggggauguucgucuccgacacccccggcgagcggaaccccuacgagaacauccuguacaagaucugccucagcggggacggcuggccguacaucgcgucccgcaccagcaucguggggcgggccugggagaacaccaccguggaccuggaguccgacggcaagccccagaaggucggcaccgccgggagcaacaagucccugcagagcgccggcuuccccacggggcucaccuacucccagcugaugacccugaaggacagcaugaugcagcuggaccccuccgccaagaccuggaucgacaucgagggccgcccggaggaccccguggagaucgcgcucuaccagcccaugagcgggugcuacauccacuucuuccgggagcccacggaccugaagcaguucaagcaggacgccaaguacucccacggcaucgacgucgccgaccuguucccggcccagcccggccucaccagcgccgugaucgaggcgcugccccgcaacauggugcugaccugccaggggagcgacgacaucaagcgccuccuggacucccagggccggcgcgacaucaagcugaucgacaucgcccucagcaaggccgacucccggaaguucgagaacgccgucugggaccagugcaaggaccugugccacaugcacaccggggugguggucgagaagaagaagcgcggcgggaaggaggagaucacgccccacugcgcccugauggacugcaucauguacgacgcggccgugagcggcggccucaacaucccggugcugcgggccguccugccccgcgacaugguguuccggaccuccagccccaaggugguccucugaggacuaguuauaagacugacuagcccgaugggccucccaacgggcccuccuccccuccuugcaccgagauuaauaaaaaaaaaaaaaaaaaaaaaaaaaaaaaaaaaaaaaaaaaaaaaaaaaaaaaaaaaaaaaaaaaaaaaaaaaaaaaaaaaaaaaaaaaaaaaaaaaaaa

SEQ ID NO: 20604 - RNA, 1950 nt, Artificial Sequence
  mRNA product Design i-3 (A100) comprising derived and/or modified sequence from LASV(LASV237-NIG-2010;Clade II)__AIT17639__SP-HsALB_NP(2-569) (opt1)
aggagaaagcuuaccaugaagugggugaccuucaucagccugcucuuccuguucuccagcgccuacuccagcgccuccaaggaggugaaguccuuccuguggacccagagccuccgccgggagcugagcggcuacugcuccaacaucaagcugcaggucgugaaggacgcccaggcgcuccugcacgggcuggacuucagcgagguguccaacguccagcgccucaugcggaagcagaagcgcgacgacagcgaccugaagcggcugcgcgaccucaaccaggccgugaacaaccugguggagcugaaguccacccagcagaaguccauccuccgggucggcacccugaccagcgacgaccugcucacccuggccgccgaccuggagaagcucaagagcaaggugauccgcaccgagcggccccuguccagcgggguguacaugggcaaccuguccacgcagcagcucgagcagcgccgggcccugcugaacaugaucgggauggucggcggcgcgcaggggacccagccgggccgcgacgggguggugcgggucugggacgugaagaaccccgaccuccugaacaaccaguucggcaccaugcccagccugacccucgccugccugacgaagcagggccagguggaccugaacgacgccguccucgcccugaccgaccuggggcucaucuacaccgcgaaguaccccaacuccagcgaccuggaccgccugucccagagccacccgauccucaacaugguggacaucaagaaguccagccugaacaucagcggcuacaacuucucccugggggccgccgugaaggccggcgccugcaugcucgacgggggcaacaugcuggagaccaucaaggucacgccccagaccauggacggcauccucaagagcauccugaaggugaagcggucccuggggauguucgugagcgacacccccggcgagcgcaaccccuacgagaacauccuguacaagaucugccucuccggggacggcuggccguacaucgcgagccggaccuccaucgucgggcgcgccugggagaacacgaccguggaccuggagagcgacggcaagccccagaaggugggcuccgccgggagcaacaagucccugcagagcgccggcuuccccaccgggcucaccuacucccagcugaugacgcugaaggacagcaugaugcagcuggaccccuccgccaagaccuggaucgacaucgagggccggccggaggaccccgucgagaucgcgcucuaccagcccaugagcgggugcuacauccacuucuuccgcgagcccaccgaccugaagcaguucaagcaggacgccaaguacucccacggcaucgacguggccgaccuguucccggcccagcccggccucaccagcgccgucaucgaggcgcugccccggaacauggugcugacgugccaggggagcgacgacaucaagcgccuccuggacucccagggccgccgggacaucaagcugaucgacaucgcccucagcaaggccgacucccgccgguucgagaacgccgugugggaccagugcaaggaccugugccacaugcacaccggggucgugguggagaagaagaagcgcggcgggaaggaggagaucacgccccacugcgcccugauggacugcaucauguacgacgcggccgucagcggcggccucaacaucccggugcugcgggccgugcugccccgcgacauggucuuccggaccuccagccccaagguggugcucugaggacuaguuauaagacugacuagcccgaugggccucccaacgggcccuccuccccuccuugcaccgagauuaauaaaaaaaaaaaaaaaaaaaaaaaaaaaaaaaaaaaaaaaaaaaaaaaaaaaaaaaaaaaaaaaaaaaaaaaaaaaaaaaaaaaaaaaaaaaaaaaaaaaa

SEQ ID NO: 20605 - RNA, 1950 nt, Artificial Sequence
  mRNA product Design i-3 (A100) comprising derived and/or modified sequence from LASV(LASV253-NIG-2011;Clade II)__AIT17671__SP-HsALB_NP(2-569) (opt1)
aggagaaagcuuaccaugaagugggugaccuucaucagccugcucuuccuguucuccagcgccuacuccagcgccuccaaggaggugaaguccuuccuguggacccagagccuccgccgggagcugagcggcuacugcuccagcaucaagcugcaggucgugaaggacgcccaggcgcuccugcacgggcuggacuucuccgaggugagcaacguccagcgccucaugcggaagcagaagcgcgacgacuccgaccugaagcggcugcgcgaccucaaccaggccgugaacaaccugguggagcucaagagcacccagcagaaguccguccugcgggugggcacccugaccagcgacgaccugcucacccuggccgccgaccuggagaagcucaaguccaaggugauccgcaccgagcggccccugagcuccggggucuacaugggcaaccugagcacgcagcagcucgagcagcgccgggcccugcugaacaugaucgggauggugggcggcgcgcaggggacccagccgggccgcgacggggugguccgggugugggacgugaagaaccccgaccuccugaacaaccaguucggcaccaugcccucccugacccucgccugccugacgaagcaggggcaggucgaccugaacgacguggugcucgcccugaccgaccugggccucaucuacaccgccaaguaccccaacagcuccgaccuggaccgccugagccagagccacccgauccucaacauggucgacaccaagaaguccagccugaacaucuccggcuacaacuucagccugggggcggccgugaaggccggcgccugcaugcucgacgggggcaacaugcuggagacgaucaaggugacgccccagaccauggacggcauccugaaguccauccucaaggucaagaagucccuggggauguucgugagcgacacccccggcgagcggaaccccuacgagaacauccuguacaagaucugccucagcggggacggcuggccguacaucgccucccgcaccagcaucguggggcgggcgugggagaacaccaccgucgaccuggaguccgacggcaagccccagaaggugggcaccgccgggagcaacaagucccugcagagcgccggcuuccccacggggcucaccuacucccagcugaugacccugaaggacagcaugaugcagcuggaccccuccgccaagaccuggaucgacaucgagggccgcccggaggaccccgucgagaucgcccucuaccagcccaugagcgggugcuacauccacuucuuccgggagcccacggaccugaagcaguucaagcaggacgcgaaguacucccacggcaucgacgugaccgaccuguucccggcccagcccggccucaccagcgccgugaucgaggcccugccccgcaacaugguccugaccugccaggggagcgacgacaucaagcggcuccuggacucccagggccgccgcgacaucaagcugaucgacaucgcccucagcaaggcggacucccggcgcuucgagaacgccgugugggaccagugcaaggaccugugccacaugcacacggggguggucguggagaagaagaagcggggcgggaaggaggagaucacgccccacugcgcccugauggacugcaucauguacgacgccgccgugagcggcggccucaacaucccgguccugcgcgcggugcugccccgggacaugguguuccgcaccuccagccccaaggucgugcucugaggacuaguuauaagacugacuagcccgaugggccucccaacgggcccuccuccccuccuugcaccgagauuaauaaaaaaaaaaaaaaaaaaaaaaaaaaaaaaaaaaaaaaaaaaaaaaaaaaaaaaaaaaaaaaaaaaaaaaaaaaaaaaaaaaaaaaaaaaaaaaaaaaaa

SEQ ID NO: 20606 - RNA, 1950 nt, Artificial Sequence
  mRNA product Design i-3 (A100) comprising derived and/or modified sequence from LASV(LASV254-NIG-2011;Clade II)__AIT17675__SP-HsALB_NP(2-569) (opt1)
aggagaaagcuuaccaugaagugggugaccuucaucagccugcucuuccuguucuccagcgccuacuccagcgccuccaaggaggugaaguccuuccuguggacccagagccuccgccgggagcugagcggcuacugcuccagcaucaagcugcaggucgugaaggacgcccaggcgcuccugcacgggcuggacuucuccgaggugagcaacguccagcgccucaugcggaagcagaagcgcgacgacuccgaccugaagcggcugcgcgaccucaaccaggccgugaacaaccugguggagcucaagagcacccagcagaaguccguccugcgggugggcacgcugaccagcgacgaccugcucacccuggccgccgaccuggagaagcucaaguccaaggugauccgcaccgagcggccccugagcuccggggucuacaugggcaaccugagcacgcagcagcucgagcagcgccgggcccugcugaacaugaucgggauggugggcggcgcgcaggggacccagccgggccgcgacggggugguccgggugugggacgugaagaaccccgaccuccugaacaaccaguucggcaccaugcccucccugacccucgccugccugacgaagcaggggcaggucgaccugaacgacgccgugcucgcccugaccgaccugggccucaucuacaccgcgaaguaccccaacagcuccgaccuggaccgccugagccagagccacccgauccucaacaugguggacaccaagaaguccagccugaacaucuccggcuacaacuucagccugggggccgccgucaaggccggcgccugcaugcucgacgggggcaacaugcuggagacgaucaaggugacgccccagaccauggacggcauccugaaguccauccucaaggugaagaagucccuggggauguucgucagcgacacccccggcgagcggaaccccuacgagaacauccuguacaagaucugccucagcggggacggcuggccguacaucgcgucccgcaccagcaucguggggcgggccugggagaacaccaucguggaccuggaguccgacggcaagccccagaaggucggcaccgccgggagcaacaagucccugcagagcgccggcuuccccaccgggcucacguacucccagcugaugacccugaaggacagcaugaugcagcuggaccccuccgccaagaccuggaucgacaucgagggccgcccggaggaccccguggagaucgcgcucuaccagcccaugagcgggugcuacauccacuucuuccgggagcccaccgaccugaagcaguucaagcaggacgccaaguacucccacggcaucgacgucgccgaccuguucccggcccagcccggccucacgagcgccgugaucgaggcgcugccccgcaacauggugcugaccugccaggggagcgacgacaucaagcggcuccuggacucccagggccgccgcgacaucaagcugaucgacaucgcccucagcaaggccgacucccggcgcuucgagaacgccgucugggaccagugcaaggaccugugccacaugcacaccggggugguggucgagaagaagaagcggggcgggaaggaggagaucacgccccacugcgcccugauggacugcaucauguacgacgcggccgugagcggcggccucaacaucccggugcugcgcgccguccugccccgggacaugguguuccgcaccuccagccccaaggugguccucugaggacuaguuauaagacugacuagcccgaugggccucccaacgggcccuccuccccuccuugcaccgagauuaauaaaaaaaaaaaaaaaaaaaaaaaaaaaaaaaaaaaaaaaaaaaaaaaaaaaaaaaaaaaaaaaaaaaaaaaaaaaaaaaaaaaaaaaaaaaaaaaaaaaa

SEQ ID NO: 20607 - RNA, 1950 nt, Artificial Sequence
  mRNA product Design i-3 (A100) comprising derived and/or modified sequence from LASV(Nig08-04;Clade II)__ADU56611__SP-HsALB_NP(2-569) (opt1)
aggagaaagcuuaccaugaagugggugaccuucaucagccugcucuuccuguucuccagcgccuacuccagcgccuccaaggaggugaaguccuuccuguggacccagagccuccgccgggagcugagcggcuacugcuccaacaucaagcugcaggucgugaaggacgcccaggcgcuccugcacgggcuggacuucagcgagguguccaacguccagcgccucaugcggaagcagaagcgcgacgacggcgaccugaagcggcugcgcgaccucaaccaggccgugaacaaccugguggagcucaagagcacccagcagaaguccguccugcggguggggacccugaccagcgacgaccugcucacccuggccgccgaccuggagaagcucaaguccaaggugauccgcaccgagcggccccugagcuccggcgucuacauggggaaccugagcacgcagcagcucgagcagcgcaaggcccugcuguccaugaucggcauggugggcggggcgcagggcacccagccggggcgggacggcgugguccgcgugugggacgugaagaaccccgaccuccugaacaaccaguucgggaccaugcccagccugacccucgccugccugacgaagcagggccaggucgaccugaacgacgccgugcucgcccugaccgaccugggccucaucuacaccgcgaaguaccccaacuccagcgaccuggaccggcugucccagagccacccgauccucaacaugguggacaccaagaaguccagccugaacaucagcggguacaacuucucccugggcgccgccgucaaggccggggccugcaugcucgacggcggcaacaugcuggagacgaucaaggugacgccccagaccauggacgggauccucaagagcauccugaaggugaagcgcucccugggcauguucgucagcgacacccccggggagcggaaccccuacgagaacauccuguacaagaucugccucuccggcgacggguggccguacaucgcgagccgcaccuccaucgugggccgggccugggagaacaccaccguggaccuggagagcgacggcaagccccagaaggucgggaccgccggcuccaacaagagccugcaguccgccggguuccccacgggccucaccuacagccagcugaugacccugaaggacuccaugaugcagcuggaccccagcgccaagaccuggaucgacaucgaggggcgcccggaggaccccguggagaucgcgcucuaccagcccauguccggcugcuacauccacuucuuccgggagcccacggaccugaagcaguucaagcaggacgccaaguacagccacggcaucgacgucaccgaccuguucuccgcccagccggggcucaccagcgccgugaucgaggcccugccccgcaacauggugcugaccugccagggcagcgacgacaucaagaagcuccuggacucccaggggcggcgcgacaucaagcugaucgacaucagccucaacaaggcggacucccgccgguucgagaacgccgucugggaccagugcaaggaccugugccacaugcacacgggcgugguggucgagaagaagaagcgcgggggcaaggaggagaucacgccccacugcgcccugauggacugcaucauguucgacgccgccgugagcggcgggcucaacauccccauccugcgggcggugcugccgcgcgacauggucuuccggaccuccagccccaagguggugcucugaggacuaguuauaagacugacuagcccgaugggccucccaacgggcccuccuccccuccuugcaccgagauuaauaaaaaaaaaaaaaaaaaaaaaaaaaaaaaaaaaaaaaaaaaaaaaaaaaaaaaaaaaaaaaaaaaaaaaaaaaaaaaaaaaaaaaaaaaaaaaaaaaaaa

SEQ ID NO: 20608 - RNA, 1953 nt, Artificial Sequence
  mRNA product Design i-3 (A100) comprising derived and/or modified sequence from LASV(GA391;Clade III)__AAA46284__SP-HsALB_NP(2-570) (opt1)
aggagaaagcuuaccaugaagugggugaccuucaucagccugcucuuccuguucuccagcgccuacuccagcgccuccaaggaggugcgcagcugccuguggacccagucccuccggcgcgagcugagcggcuacugcuccaacaucaagcugcaggucgugaaggacgcccaggcgcuccugcacgggcuggacuucagcgagguguccaacguccagcggcucaugcgcaagcagaagcgggacgacggcgaccugaagcgccugcgggaccucaaccaggccgugaacaaccugguggagcugaaguccacccagcagaaguccguccuccgcguggggacgcugagcuccgacgaccugcucauccuggccgccgaccuggagaagcucaagagcaaggugacccggaccgagcgcccccuguccagcggcgucuacauggggaaccuguccagccagcagcucgaccagcggcgcgcccugcugaacaugaucggcaugaccggcguguccgggggcgggaagggcgcgagcaacgggaucgugcgggucugggacgugaagaacgccgagcuccugaacaaccaguucggcacgaugccgucccugacccucgccugccugaccaagcagggccagguggaccugaacgacgccguccaggcgcucaccgaccuggggcugaucuacacggccaaguaccccaacagcagcgaccucgaccgccugucccagagccaccccauccugaacaugaucgacaccaagaaguccagccucaacaucuccggcuacaacuucagccugggggccgccgugaaggccggcgcgugcaugcuggacggcgggaacaugcucgagaccaucaaggugagcccccagaccauggacggcauccucaagagcauccugaaggucaagaagucccuggggauguucgugagcgacacgccgggcgagcggaaccccuacgagaacauccuguacaagaucugccuguccggggacggcuggagcuacaucgccucccgcaccagcaucgugggccgggccugggagaacaccgucguggaccucgagcaggacaacaagccccagaagaucgggaacggcggguccaacaagagccugcaguccgccggcuucgccgcggggcugaucuacagccagcucaugacccugaaggacuucaagugcuucaaccugauccccaacgccaagacguggauggacaucgagggccgcccggaggaccccguggagaucgcccuguaccagcccuccagcggcugcuacguccacuucuuccgggagcccaccgaccucaagcaguucaagcaggacgccaaguacagccacgggcgcgacgugaccgaccuguucgccgcgcagccgggccugaccuccgccgucaucgaggcccucccccggaacauggugaucacgugccaggggagcgaggacauccgcaagcugcuggagucccagggccgccgggacaucaagcucaucgacaucacccugagcaaggccgacucccgcaaguucgagaacgccgugugggaccaguucaaggaccugugccacaugcacaccggggucgugguggagaagaagaagcggggcggcaaggaggagaucacgccccacugcgcgcucauggacugcaucauguucgacgccgccgucagcgggggccuggacgccaaggugcugcgcgugguccucccccgggacaugguguuccgcaccuccaccccgaaggugguccugugaggacuaguuauaagacugacuagcccgaugggccucccaacgggcccuccuccccuccuugcaccgagauuaauaaaaaaaaaaaaaaaaaaaaaaaaaaaaaaaaaaaaaaaaaaaaaaaaaaaaaaaaaaaaaaaaaaaaaaaaaaaaaaaaaaaaaaaaaaaaaaaaaaaa

SEQ ID NO: 20609 - RNA, 1950 nt, Artificial Sequence
  mRNA product Design i-3 (A100) comprising derived and/or modified sequence from LASV(Nig08-A19;Clade III)__ADU56619__SP-HsALB_NP(2-569) (opt1)
aggagaaagcuuaccaugaagugggugaccuucaucagccugcucuuccuguucuccagcgccuacuccagcgccuccaaggaggugaaguccuuccuguggacccagucccuccgccgggagcugagcggcuacugcuccaacaucaagcugcaggucgugaaggacgcccaggcgcuccugcacgggcuggacuucagcgagguguccaacguccagcgccucaugcggaagcagaagcgcgacgacggcgaccugaagcggcugcgcgaccucaaccaggccgugaacaaccugguggagcucaagagcacccagcagaaguccguccugcggguggggacccugagcuccgacgaccugcucgugcuggccgccgaccuggagaagcucaagagcaaggucgugcgcaccgagcggccccuguccagcggcaucuacauggggaaccuguccagccagcagcucgaccagcgcaaggcccugcugaacaugaucggcaugaccggcgggaacggcgggcggaacaccacguccgacggcaucgugcgcgucugggacgugaagaacgcggagcuccugaacaaccaguucgggaccaugccgagccugacccucgccugccugaccaagcagggccagguggaccugaacgacgccguccaggcccucacggaccugggccugaucuacaccgcgaaguaccccaacuccagcgaccucgaccggcuggcccagagccaccccauccugaacaugaucgacaccaagaaguccagccucaacaucuccggguacaacuucagccugggcgccgccgugaaggccggggcgugcaugcuggacggcggcaacaugcucgagaccaucaaggugagcccccagacgauggacgggauccucaagagcauccugaaggucaagcgcucccugggcauguucaucagcgacaccccgggggagcggaaccccuacgagaacauccuguacaagaucugccuguccggcgacggguggcccuacaucgccagccgcaccuccaucgugggccgggccugggagaacaccguggucgaccucgagagcgacaacaagccccagaagacgggcaacgggggcuccaacaagagccugcaguccgccggguucgccgcgggccugaccuacagccagcucaugacccugaaggacuccaugcugcagcuggacccgaacgccaagaccuggauggacaucgaggggcgccccgaggaccccguggagaucgcccucuaccagcccagcuccggcugcuacauccacuucuuccgggagccgacggaccugaagcaguucaagcaggacgccaaguacagccacggcaucgacgugaccgaccuguucgccgcgcagcccgggcucaccagcgccgucaucgaggcccugccccgcaacauggugaucacgugccagggcuccgaggacauccggaagcugcucgagagccaggggcgccgcgacaucaagcugaucgacaucucccugagcaaggucgacucccggaaguucgagaacgccgugugggaccaguucaaggaccucugccacaugcacaccggcaucguggucgagaagaagaagcgcgggggcaaggaggagaucacgccccacugcgcccugauggacugcaucauguucgacgcggccgugagcggcgggguggacgccaagguccugcgggccgugcucccgcgcgacaugguguuccggaccuccacccccaaggucgugcugugaggacuaguuauaagacugacuagcccgaugggccucccaacgggcccuccuccccuccuugcaccgagauuaauaaaaaaaaaaaaaaaaaaaaaaaaaaaaaaaaaaaaaaaaaaaaaaaaaaaaaaaaaaaaaaaaaaaaaaaaaaaaaaaaaaaaaaaaaaaaaaaaaaaa

SEQ ID NO: 20610 - RNA, 1950 nt, Artificial Sequence
  mRNA product Design i-3 (A100) comprising derived and/or modified sequence from LASV(G1180-SLE-2010;Clade IV)__AIT17169__SP-HsALB_NP(2-569) (opt1)
aggagaaagcuuaccaugaagugggugaccuucaucagccugcucuuccuguucuccagcgccuacuccagcgccuccaaggagaucaagagcuuccuguggacccagucccuccgccgggagcugagcggcuacugcuccaacaucaagcuccagguggucaaggacgcccaggcgcugcugcacgggcuggacuucagcgagguguccaacgugcagcgccucaugcggaaggagcgccgggacgacaacgaccugaagcgccugcgggaccucaaccaggccgucaacaaccugguggagcucaagagcacccagcagaaguccauccugcgcgugggcacccugaccagcgacgaccugcucauccuggccgccgaccuggagaagcucaaguccaaggucauccggaccgagcgcccccugagcgccgggguguacaugggcaaccuguccagccagcagcucgaccagcggcgcgcgcugcuguccaugaucgggaugagcuccggcaaccagcgggcccaggccggccgcgacggggugguccgggugugggacgugaagaacgucgagcuccugaacaaccaguucggcaccaugccgagccugacgcucgccugccugaccaagcagggccagguggaccugaacgacgcggugcaggcccucaccgaccuggggcugaucuacaccgccaaguaccccaacacguccgaccucgaccgccugacccagagccaccccauccugaacaugaucgacaccaagaaguccagccucaacaucagcggguacaacuucucccugggcgccgccgucaaggcgggcgccugcaugcuggacgggggcaacaugcucgagaccaucaaggugagcccccagacgauggacgggauccugaaguccauccugaaggugaagaaggcccucggcauguucaucagcgacaccccgggcgagcggaaccccuacgagaacauccuguacaagaucugccuguccggggacggcuggcccuacaucgccagccgcaccuccaucaccgggcgggccugggagaacacggucguggaccucgagagcgacggcaagccccagaaggcgggguccaacaacagcaacaagucccugcagagcgugggcuucaccgccggccugaccuacucccagcucaugacccugaaggacgccaugcugcagcuggacccgaacgccaagacguggauggacaucgaggggcgccccgaggaccccgucgagaucgcccucuaccagcccagcuccggcugcuacauccacuucuuccgggagccgaccgaccugaagcaguucaagcaggacgcgaaguacagccacgggaucgacgugaccgaccuguucgccgcccagcccggccucaccuccgccgugaucgacgcccugccccgcaacauggucaucacgugccaggggagcgacgacauccgcaagcugcucgagagccagggccggaaggacaucaagcugaucgacaucgcgcuguccaagaccgacagccgcaaguacgagaacgccgugugggaccaguacaaggaccucugccacaugcacaccggcgucgugguggagaagaagaagcgcgggggcaaggaggagaucacgccccacugcgcccugauggacugcaucauguucgacgccgcggucuccgggggccugaacaccagcgugcuccgggccgugcugccgcgggacauggucuuccgcaccuccacgccccggguggugcugugaggacuaguuauaagacugacuagcccgaugggccucccaacgggcccuccuccccuccuugcaccgagauuaauaaaaaaaaaaaaaaaaaaaaaaaaaaaaaaaaaaaaaaaaaaaaaaaaaaaaaaaaaaaaaaaaaaaaaaaaaaaaaaaaaaaaaaaaaaaaaaaaaaaa

SEQ ID NO: 20611 - RNA, 1950 nt, Artificial Sequence
  mRNA product Design i-3 (A100) comprising derived and/or modified sequence from LASV(G1442-SLE-2011;Clade IV)__AIT17181__SP-HsALB_NP(2-569) (opt1)
aggagaaagcuuaccaugaagugggugaccuucaucagccugcucuuccuguucuccagcgccuacuccagcgccuccaaggaggugaaguccuuccuguggacccagagccuccgccgggagcugagcggcuacugcuccaacaucaagcugcaggucgugaaggacgcccaggcgcuccugcacgggcuggacuucagcgagguguccaacguccagcgccucaugcggaagcagcgccgggacgacaacgaccugaagcgccugcgggaccucaaccaggccgugaacaaccugguggagcucaagagcacccagcagaaguccguccugcgcgugggcacccugaccagcgacgaccugcucgugcuggccgccgaccuggagaagcucaaguccaaggucauccggaccgagcgcccccugagcgccgggguguacaugggcaaccuguccagccagcagcucgaccagcggcgcgcgcugcugaacaugaucgggauguccggcggcauccaggggacccggacgggccgcgacggggugguccgggugugggacgugaagaacgccgaccuccugaacaaccaguucggcaccaugccgagccugacccucgccugccugaccaagcaggggcaggucgaccugaacgacguggugcaggcccucacggaccugggccugaucuacaccgcgaaguaccccaacgccuccgaccucgaccgccugacccagagccaccccauccugaacaugaucgacaccaagaaguccagccucaacaucagcggcuacaacuucucccugggggccgccgucaaggccggcgcgugcaugcuggacgggggcaacaugcucgagacgaucaaggugagcccccagaccauggacggcauccugaaguccauccugaaggugaagaagacccucgggauguucaucagcgacaccccgggcgagcggaaccccuacgagaacauccuguacaagaucugccuguccggggacggcuggcccuacaucgccagccgcacguccaucaccgggcgggccugggagaacaccgucguggaccucgagagcgacggcaagccccagaaggccggcuccaacaacagcaacaagucccugcagagcgccggguucgcggccggccugaccuacucccagcucaugacgcugaaggacgccaugcugcagcuggacccgaacgccaagaccuggauggacaucgaggggcgccccgaggaccccguggagaucgcccucuaccagcccagcuccggcugcuacauccacuucuuccgggagccgaccgaccugaagcaguucaagcaggacgcgaaguacagccacgggaucgacgucaccgaccuguucgccgcccagcccggccucacguccgccgugaucgaggcccugccccgcaacauggucaucacgugccagggcagcgacgacaucaagaagcugcucgagucccaggggcgcaaggacaucaagcugaucgacaucgcgcugagcaagaccgacagccggaaguacgagaacgccgugugggaccaguacaaggaccucugccacaugcacaccggcguggucguggagaagaagaagcgcgggggcaaggaggagaucaccccgcacugcgcccugauggacugcaucauguucgacgccgcgguguccgggggccugaacacccucguccugcgggccgugcugccccgcgacaugguguuccggaccagcacgccccgcgucgugcucugaggacuaguuauaagacugacuagcccgaugggccucccaacgggcccuccuccccuccuugcaccgagauuaauaaaaaaaaaaaaaaaaaaaaaaaaaaaaaaaaaaaaaaaaaaaaaaaaaaaaaaaaaaaaaaaaaaaaaaaaaaaaaaaaaaaaaaaaaaaaaaaaaaaa

SEQ ID NO: 20612 - RNA, 1950 nt, Artificial Sequence
  mRNA product Design i-3 (A100) comprising derived and/or modified sequence from LASV(G3010-SLE-2013;Clade IV)__AIT17345__SP-HsALB_NP(2-569) (opt1)
aggagaaagcuuaccaugaagugggugaccuucaucagccugcucuuccuguucuccagcgccuacuccagcgccuccaaggagaucaagagcuuccuguggacccagucccuccgccgggagcugagcggcuacugcuccaacaucaagcuccagguggucaaggacgcccaggcgcugcugcacgggcuggacuucagcgagguguccaacgugcagcgccucaugcggaaggagcgccgggacgacaacgaccugaagcgccugcgggaccucaaccaggccgucaacaaccugguggagcucaagagcacccagcagaaguccauccugcgcgugggcacccugaccagcgacgaccugcucauccuggccgccgaccuggagaagcucaaguccaaggucacccggaccgagcgcccccugagcgccgggguguacaugggcaaccuguccagccagcagcucgaccagcggcgcgcgcugcuguccaugaucgggaugagcuccggcgugcagggcgcccgggccgggcgcgacggcgucgugcgggugugggacgucaagaacgccgagcuccugaacaaccaguucgggacgaugccgagccugacccucgcgugccugaccaagcagggccagguggaccugaacgacgugguccaggcccucaccgaccuggggcugaucuacacggccaaguaccccaacaccuccgaccucgaccgccugacccagagccaccccauccugaacaugaucgacaccaagaaguccagccucaacaucagcggcuacaacuucucccugggcgccgccgugaaggcgggggccugcaugcuggacggcgggaacaugcucgagacgaucaaggugagcccccagaccauggacggcauccugaaguccauccugaaggucaagaaggcccucggcauguucaucagcgagaccccgggggagcggaaccccuacgagaacauccuguacaagaucugccuguccggcgacggguggcccuacaucgccagccgcaccuccaucacgggccgggccugggagaacaccgugguggaccucgagagcgacgggaagccccagaaggcgggcuccaacaacagcaacaagucccugcagagcgccggcuucaccgccgggcugaccuacucccagcucaugacgcugaaggacgccaugcugcagcuggacccgaacgccaagaccuggauggacaucgagggccgccccgaggaccccgucgagguggcgcucuaccagcccagcuccgggugcuacauccacuucuuccgggagccgaccgaccugaagcaguucaagcaggacgccaaguacagccacggcaucgacgugaccgaccuguucgccgcccagcccgggcucacguccgccgucaucgacgcgcugccccgcaacauggugaucacgugccagggcagcgacgacaucaagaagcugcucgagagccagggccgcaaggacaucaagcugaucgacaucgcccuguccaagaccgacagccggaaguacgagaacgccgucugggaccaguacaaggaccucugccacaugcacaccggggugguggucgagaagaagaagcgcggcgggaaggaggagaucaccccgcacugcgcccugauggacugcaucauguucgacgcggccguguccggcgggcugaacaccagcgugcuccgggccguccugccccgcgacaugguguuccggaccuccacgccccgcgugguccugugaggacuaguuauaagacugacuagcccgaugggccucccaacgggcccuccuccccuccuugcaccgagauuaauaaaaaaaaaaaaaaaaaaaaaaaaaaaaaaaaaaaaaaaaaaaaaaaaaaaaaaaaaaaaaaaaaaaaaaaaaaaaaaaaaaaaaaaaaaaaaaaaaaaa

SEQ ID NO: 20613 - RNA, 1950 nt, Artificial Sequence
  mRNA product Design i-3 (A100) comprising derived and/or modified sequence from LASV(G502-SLE-2009;Clade IV)__AIT17127__SP-HsALB_NP(2-569) (opt1)
aggagaaagcuuaccaugaagugggugaccuucaucagccugcucuuccuguucuccagcgccuacuccagcgccuccaaggagaucaagagcuuccuguggacccagucccuccgccgggagcugagcggcuacugcuccaacaucaagcuccagguggucaaggacgcccaggcgcugcugcacgggcuggacuucagcgagguguccaacgugcagcgccucaugcggaaggagcgccgggacgacaacgaccugaagcgccugcgggaccucaaccaggccgucaacaaccugguggagcucaagagcacccagcagaaguccauccugcgcgugggcacccugaccagcgacgaccugcucauccuggccgccgaccuggagaagcucaaguccaaggucauccggaccgagcgcccccugagcgccgggguguacaugggcaaccuguccagccagcagcucgaccagcggcgcgcgcugcuguccaugaucgggaugagcggcggcaaccagggggugcgggccggcaaggacggggucgugcgcgugugggacgucaagaacgccgagcuccugaacaaccaguucggcaccaugccgucccugacgcucgccugccugaccaagcagggccagguggaccugaacgacgcggugcaggcccucaccgaccuggggcugaucuacaccgccaaguaccccaacacgagcgaccucgaccggcugacccagucccaccccauccugaacaugaucgacaccaagaaguccagccucaacaucuccggcuacaacuucagccugggggccgccgucaaggcgggcgccugcaugcuggacgggggcaacaugcucgagaccaucaaggugagcccccagacgauggacggcauccucaagagcauccugaaggugaagaaggcccuggggauguucaucuccgacaccccgggcgagcgcaaccccuacgagaacauccuguacaagaucugccugagcggggacggcuggcccuacaucgccucccggaccagcaucaccgggcgcgccugggagaacacggucguggaccucgaguccgacggcaagccccagaaggcgggcagcaacaacuccaacaagagccugcaguccgccggguucaccgccggccugaccuacagccagcucaugacccugaaggacgccaugcugcagcuggacccgaacacgaagaccuggauggacaucgaggggcggcccgaggaccccguggagaucgcccucuaccagcccuccagcggcugcuacauccacuucuuccgcgagccgaccgaccugaagcaguucaagcaggacgcgaaguacucccacgggaucgacgucaccgaccuguucgccgcccagcccggccucacgagcgccgugaucgacgcccugccccggaacauggugaucacgugccagggcuccgacgacauccgcaagcugcucgagagccaggggcgcaaggacaucaagcugaucgacaucgcgcugaacaagaccgacagccggaaguacgagaacgccgucugggaccaguacaaggaccucugccacaugcacaccggcguggucguggagaagaagaagcgcgggggcaaggaggagaucaccccgcacugcgcccugauggacugcaucauguucgacgccgcgguguccgggggccugaacaccagcguccuccgggccgugcugccccgcgacaugguguuccggaccuccacgccccgcgucgugcugugaggacuaguuauaagacugacuagcccgaugggccucccaacgggcccuccuccccuccuugcaccgagauuaauaaaaaaaaaaaaaaaaaaaaaaaaaaaaaaaaaaaaaaaaaaaaaaaaaaaaaaaaaaaaaaaaaaaaaaaaaaaaaaaaaaaaaaaaaaaaaaaaaaaa

SEQ ID NO: 20614 - RNA, 1950 nt, Artificial Sequence
  mRNA product Design i-3 (A100) comprising derived and/or modified sequence from LASV(G733-SLE-2010;Clade IV)__AIT17155__SP-HsALB_NP(2-569) (opt1)
aggagaaagcuuaccaugaagugggugaccuucaucagccugcucuuccuguucuccagcgccuacuccagcgccuccaaggagaucaagagcuuccuguggacccagucccuccgccgggagcugagcggcuacugcuccaacaucaagcuccagguggucaaggacgcccaggcgcugcugcacgggcuggacuucagcgagguguccaacgugcagcgccucaugcggaaggagcgccgggacgacaacgaccugaagcgccugcgggaccucaaccaggccgucaacaaccugguggagcucaagagcacccagcagaaguccgugcugcgcgucggcacccugaccagcgacgagcugcucgugcuggccgccgaccuggagaagcucaaguccaaggugauccggaccgagcgcccccugagcgccggggucuacaugggcaaccuguccagccagcagcucgaccagcggcgcgcgcugcuguccaugaucgggaugagcggcggcaaccagggggcccggaccggccgcgacgggguggugcgggucugggacgugaagaacgccgagcuccugaacaaccaguucggcaccaugccgucccugacccucgccugccugaccaagcagggccagguggaccugaacgacgcgguccaggcccucaccgaccuggggcugaucuacacggccaaguaccccaacaccagcgaccucgaccgccugacccagucccaccccauccugaacaugaucgacaccaagaaguccagccucaacaucuccggcuacaacuucagccugggggccgccgugaaggcgggcgccugcaugcuggacgggggcaacaugcucgagacgaucaaggugagcccccagaccauggacggcauccucaagagcauccugaaggucaagaaggcccuggggauguucaucuccgacaccccgggcgagcggaaccccuacgagaacauccuguacaagaucugccugagcggggacggcuggcccuacaucgccucccgcaccagcaucacggggcgggccugggagaacaccgugguggaccucgaguccgacggcaagccccagaaggcgggcagcaacaacuccaacaagagccugcaguccgccggguucaccgccggccugaccuacagccagcucaugacgcugaaggacgccaugcugcagcuggacccgaacgccaagaccuggauggacaucgaggggcgccccgaggaccccgucgagaucgcgcucuaccagcccuccagcggcugcuacauccacuucuuccgggagccgaccgaccugaagcaguucaagcaggacgccaaguacucccacgggaucgacgugaccgaccuguucgccgcccagcccggccucacgagcgccgugaucgacgcgcugccccgcaacauggucaucacgugccagggcuccgacgacauccgcaagcugcucgagagccaggggcggaaggacaucaagcugaucgacaucgcccugagcaagaucgacucccgcaaguacgagaacgccgugugggaccaguacaaggaccucugccacaugcacaccggcgucgugguggagaagaagaagcgcgggggcaaggaggagaucacgccccacugcgcccugauggacugcaucauguucgacgcggccgucagcgggggccugaacucccucgugcugcgggccgugcugccgcgggacauggucuuccgcaccagcacgccccggguggugcucugaggacuaguuauaagacugacuagcccgaugggccucccaacgggcccuccuccccuccuugcaccgagauuaauaaaaaaaaaaaaaaaaaaaaaaaaaaaaaaaaaaaaaaaaaaaaaaaaaaaaaaaaaaaaaaaaaaaaaaaaaaaaaaaaaaaaaaaaaaaaaaaaaaaa

SEQ ID NO: 20615 - RNA, 1950 nt, Artificial Sequence
  mRNA product Design i-3 (A100) comprising derived and/or modified sequence from MOPV/LASV reassortant(IGS-1;Clade IV)__AFY05578__SP-HsALB_NP(2-569) (opt1)
aggagaaagcuuaccaugaagugggugaccuucaucagccugcucuuccuguucuccagcgccuacuccagcgccuccaaggagaucaagagcuuccuguggacccagucccuccgccgggagcugagcggcuacugcuccaacaucaagcuccagguggucaaggacgcccaggcgcugcugcacgggcuggacuucagcgagguguccaacgugcagcgccucaugcggaaggagcgccgggacgacaacgaccugaagcgccugcgggaccucaaccaggccgucaacaaccugguggagcucaagagcacccagcagaaguccauccugcgcgugggcacccugaccagcgacgaccugcucauccuggccgccgaccuggagaagcuccgguccaaggucauccgcaccgagcggccccugagcgccgggguguacaugggcaaccuguccagccagcagcucgaccagcgccgggcgcugcugaacaugaucgggauguccggcggcaaccagggggcccgcgccggccgggacggggugguccgcgugugggacgugaagaacgccgagcuccugagcaaccaguucggcaccaugccgucccugacgcucgcgugccugaccaagcaggggcaggucgaccugaacgacgccgugcaggcccucaccgaccugggccugaucuacaccgccaaguaccccaacacgagcgaccucgaccggcugacccagucccaccccauccugaacaugaucgacaccaagaaguccagccucaacaucuccggcuacaacuucagccugggggccgcggugaaggccggcgccugcaugcuggacgggggcaacaugcucgagaccaucaaggucagcccccagacgauggacggcauccucaagagcauccugaaggugaagaaggcccuggggauguucaucuccgacaccccgggcgagcgcaaccccuacgagaacauccuguacaagaucugccugagcggggacggcuggcccuacaucgccucccggaccagcaucaccgggcgcgcgugggagaacacgguggucgaccucgaguccgacggcaagccccagaaggccgacagcaacaacuccagcaagucccugcagagcgccggcuucaccgccgggcugaccuacucccagcucaugacccugaaggacgccaugcugcagcuggacccgaacgcgaagacguggauggacaucgagggccggcccgaggaccccguggagaucgcccucuaccagcccagcuccgggugcuacauccacuucuuccgcgagccgaccgaccugaagcaguucaagcaggacgccaaguacagccacggcaucgacgugaccgaccuguucgccacccagcccgggcucacguccgccgucaucgacgcgcugccccgcaacauggugaucacgugccagggcagcgacgacauccggaagcugcucgagagccagggccgcaaggacaucaagcugaucgacaucgaccuguccaagaccgacagccggaaguacgagaacgccgugugggaccaguacaaggaccucugccacaugcacaccggggucguggucgagaagaagaagcgcggcgggaaggaggagaucaccccgcacugcgcccugauggacugcaucauguucgacgccgcgguguccggcgggcugaacaccagcgugcuccgggccguccugccccgcgacaugguguuccggaccuccacgccccgcgugguccugugaggacuaguuauaagacugacuagcccgaugggccucccaacgggcccuccuccccuccuugcaccgagauuaauaaaaaaaaaaaaaaaaaaaaaaaaaaaaaaaaaaaaaaaaaaaaaaaaaaaaaaaaaaaaaaaaaaaaaaaaaaaaaaaaaaaaaaaaaaaaaaaaaaaa

SEQ ID NO: 20616 - RNA, 1950 nt, Artificial Sequence
  mRNA product Design i-3 (A100) comprising derived and/or modified sequence from LASV(LM765-SLE-2012;Clade IV)__AIT17815__SP-HsALB_NP(2-569) (opt1)
aggagaaagcuuaccaugaagugggugaccuucaucagccugcucuuccuguucuccagcgccuacuccagcgccuccaaggagaucaagagcuuccuguggacccagucccuccgccgggagcugagcggcuacugcuccaacaucaagcuccagguggucaaggacgcccaggcgcugcugcacgggcuggacuucagcgagguguccaacgugcagcgccucaugcggaaggagcgccgggacgacaacgaccugaagcgccugcgggaccucaaccaggccgucaacaaccugguggagcucaagagcacccagcagaaguccauccugcgcgugggcacccugaccagcgacgaccugcucauccuggccgccgaccuggagaagcucaaguccaaggucacccggaccgagcgcccccugagcgccgggguguacaugggcaaccuguccagccagcagcucgaccagcggcgcgcgcugcuggacaugaucgggauguccggcagcaaccagggcgcccgggccgggcgcgacggcgugguccgggugugggacgugaagaacgccgagcuccugaacaaccaguucgggacgaugccgucccugacccucgcgugccugaccaagcagggccaggucgaccugaacgacgccgugcaggcccucaccgaccuggggcugaucuacacggccaaguaccccaacaccagcgaccucgaccgccugacccagucccaccccauccugaacaugaucgacaccaagaaguccagccucaacaucuccggcuacaacuucagccugggcgccgcggugaaggccggggccugcaugcuggacggcgggaacaugcucgagacgaucaaggucagcccccagaccauggacggcauccucaagagcauccugaaggugaagaaggcccugggcauguucaucuccgacgccccgggggagcggaaccccuacgagaacauccuguacaagaucugccugagcggcgacggguggcccuacaucgcgucccgcaccagcaucaccggccgggccugggagaacacgguggucgaccucgaguccgacgggaagccccagaaggccggcagcaacggcuccaacaagagccugcaguccgccggguucaccgccggccugaccuacagccagcucaugacccugaaggacgcgaugcugcagcuggacccgaacgccaagacguggauggacaucgaggggcgccccgaggaccccguggagaucgcccucuaccagcccuccagcggcugcuacauccacuucuuccgggagccgaccgaccugaagcaguucaagcaggacgccaaguacucccacgggaucgacgugaccgaccuguucgccgcgcagcccggccucaccagcgccgucaucgacgcccugccccgcaacauggugaucacgugccagggcuccgacgacauccgcaagcuguucgagagccaggggcggaaggacaucaagcucaucgacaucgcccugagcaagaccgacucccgcaaguacgagaacgcggugugggaccaguacaaggaccugugccacaugcacaccggcaucgucguggagaagaagaagcgcgggggcaaggaggagaucacgccccacugcgcccucauggacugcaucauguucgacgccgccgucagcgggggccugaacaccuccgugcugcgggccgugcucccgcgggacauggucuuccgcaccagcacgccccggguggugcugugaggacuaguuauaagacugacuagcccgaugggccucccaacgggcccuccuccccuccuugcaccgagauuaauaaaaaaaaaaaaaaaaaaaaaaaaaaaaaaaaaaaaaaaaaaaaaaaaaaaaaaaaaaaaaaaaaaaaaaaaaaaaaaaaaaaaaaaaaaaaaaaaaaaa

SEQ ID NO: 20617 - RNA, 1950 nt, Artificial Sequence
  mRNA product Design i-3 (A100) comprising derived and/or modified sequence from LASV(LM776-SLE-2012;Clade IV)__AIT17825__SP-HsALB_NP(2-569) (opt1)
aggagaaagcuuaccaugaagugggugaccuucaucagccugcucuuccuguucuccagcgccuacuccagcgccuccaaggagaucaagagcuuccuguggacccagucccuccgccgggagcugagcuccuacugcagcaacaucaagcuccagguggucaaggacgcccaggcgcugcugcacggccuggacuucuccgaggugagcaacgugcagcgccucaugcggaaggagcgccgggacgacaacgaccugaagcgccugcgggaccucaaccaggccgucaacaaccugguggagcugaaguccacccagcagaaguccauccuccgcguggggacccugaccuccgacgaccugcucauccuggccgccgaccuggagaagcucaagagcaaggucacccggaccgagcgcccccuguccgccggcguguacauggggaaccugagcucccagcagcucgaccagcggcgcgcgcugcugagcaugaucggcauguccgggagcaaccagggcgcccgggccggccgcgacggggugguccgggugugggacgugaagaacgccgagcuccugaacaaccaguucggcacgaugccgucccugacccucgcgugccugaccaagcaggggcaggucgaccugaacgacgccgugcaggcccucaccgaccugggccugaucuacacggccaaguaccccaacaccagcgaccucgaccgccugacccagagccaccccauccugaacaugaucgacaccaagaaguccagccucaacaucuccggguacaacuucagccugggcgccgcggugaaggccggcgccugcaugcuggacgggggcaacaugcucgagacgaucaaggucagcccccagaccauggacgggauccucaagagcauccugaaggugaagaaggcccugggcauguucaucuccgacaccccgggcgagcggaaccccuacgagaacauccuguacaagaucugccugagcggggacggcuggcccuacaucgccucccgcaccagcaucacggggcgggcgugggagaacaccguggucgaccucgaguccgacggcaagccccagaaggccgggagcaacaacuccaacaagagccugcaguccgccggcuucaccgccggccugaccuacagccagcucaugacgcugaaggacgccaugcugcagcuggacccgaacgcgaagaccuggauggacaucgaggggcgccccgaggaccccguggagguggcccucuaccagcccuccagcggcugcuacauccacuucuuccgggagccgaccgaccugaagcaguucaagcaggacgccaaguacucccacgggaucgacgucaccgaccuguucgccgcccagcccggccucacgagcgcggugaucgacgcccugccccgcaacauggugaucacgugccaggggagcgacgacauccgcaagcugcucgagucccagggccggaaggacaucaagcugaucgacaucgcccugagcaagaccgacucccgcaaguacgagaacgccgucugggaccaguacaaggaccucugccacaugcacaccggcguggucguggagaagaagaagcgcgggggcaaggaggagaucaccccgcacugcgcgcugauggacugcaucauguucgacgccgccgugagcgggggccugaacaccuccguccuccgggccgugcugccccgggacaugguguuccgcaccagcacgccccgggucgugcugugaggacuaguuauaagacugacuagcccgaugggccucccaacgggcccuccuccccuccuugcaccgagauuaauaaaaaaaaaaaaaaaaaaaaaaaaaaaaaaaaaaaaaaaaaaaaaaaaaaaaaaaaaaaaaaaaaaaaaaaaaaaaaaaaaaaaaaaaaaaaaaaaaaaa

SEQ ID NO: 20618 - RNA, 1950 nt, Artificial Sequence
  mRNA product Design i-3 (A100) comprising derived and/or modified sequence from LASV(Mad39;Clade IV)__ANH09723__SP-HsALB_NP(2-569) (opt1)
aggagaaagcuuaccaugaagugggugaccuucaucagccugcucuuccuguucuccagcgccuacuccagcgccuccaaggagaucaagagcuuccuguggacccagucccuccgccgggagcugagcggcuacugcuccaacaucaagcuccagguggucaaggacgcccaggcgcugcugcacgggcuggacuucagcgagguguccaacgugcagcgccucaugcggaagcagcgccgggacgacaacgaccugaagcgccugcgggaccucaaccaggccgucaacaaccugguggagcugaaguccacccagcagaaguccgugcuccgcgucggcacgcugaccagcgacgaccugcucacccuggccgccgaccuggagaagcucaaguccaaggugacccggacggagcgcccccugaccgccgggguguacaugggcaaccugagcucccagcagcucgaccagcggcgcgcgcugcugaacaugaucgggaugagcggcggcaaccagggggcccggaccggccgcgacggggucgugcgggugugggacgucaagaacgccgagcuccugaacaaccaguucggcaccaugccgucccugacgcucgccugccugaccaagcagggccagguggaccugaacgacgugguccaggcgcucaccgaccuggggcugaucuacaccgccaaguaccccaacacgagcgaccucgaccgccugacccagucccaccccauccugaacaugaucgacaccaacaagagcucccucaacaucagcggcuacaacuucagccugggggccgccgugaaggccggcgcgugcaugcuggacgggggcaacaugcucgagaccaucaaggugagcccccagacgauggacggcauccucaagagcauccugaaggucaagaagucccuggggauguucaucagcgacaccccgggcgagcggaaccccuacgagaacauccuguacaagaucugccuguccggggacggcuggcccuacaucgccagccgcaccuccaucaccgggcgggccugggagaacacggugguggaccucgagagcggcggcaagccccagaaggccggguccaacaacagcaacaagucccugcagagcgccggcuucgcggccgggcugaccuacucccagcucaugacccugaaggacgccaugcugcagcuggacccgaacgccaagaccuggauggacaucgagggccgccccgaggaccccgucgagaucgcccucuaccagcccaucagcgggugcuacauccacuucuuccgggagccgacggaccugaagcaguucaagcaggacgcgaaguacucccacggcaucgacgugaccgaccuguucgccgcccagcccggccucaccagcgccgugaucgaggcccugccccgcaacauggucaucacgugccagggguccgacgacauccgcaagcuguucgagagccagggccggaaggacaucaagcucaucgacaucgcgcuguccaagaccgacagccgcaaguacgagaacgccgugugggaccaguacaaggaccugugccacaugcacaccggggucgugguggagaagaagaagaagggcgggaaggaggagaucacgccccacugcgcccucauggacugcaucauguucgacgccgcggucagcggcggccugaacacccuggugcuccgggccgugcugccgcgcgacauggucuuccggaccuccacccccaagguggugcugugaggacuaguuauaagacugacuagcccgaugggccucccaacgggcccuccuccccuccuugcaccgagauuaauaaaaaaaaaaaaaaaaaaaaaaaaaaaaaaaaaaaaaaaaaaaaaaaaaaaaaaaaaaaaaaaaaaaaaaaaaaaaaaaaaaaaaaaaaaaaaaaaaaaa

SEQ ID NO: 20619 - RNA, 1950 nt, Artificial Sequence
  mRNA product Design i-3 (A100) comprising derived and/or modified sequence from LASV(Z0947-SLE-2011;Clade IV)__AIT17841__SP-HsALB_NP(2-569) (opt1)
aggagaaagcuuaccaugaagugggugaccuucaucagccugcucuuccuguucuccagcgccuacuccagcgccuccaaggagaucaagagcuuccuguggacccagucccuccgccgggagcugagcggcuacugcuccaacaucaagcuccagguggucaaggacgcccaggcgcugcugcacgggcuggacuucagcgagguguccaacgugcagcgccucaugcggaaggagcgccgggacgacaacgaccugaagcgccugcgggaccucaaccaggccgucaacaaccugguggagcucaagagcacccagcagaaguccauccugcgcgugggcacccugaccagcgacgaccugcucauccuggccgccgaccuggagaagcucaaguccaaggucacccggaccgagcgcccccugagcgccgggguguacaugggcaaccuguccagccagcagcucgaccagcggcgcgcgcugcugaacaugaucgggauguccggcagcaaccagggcgcccggacggggcgcgacggcgugguccgggugugggacgugaagaacgccgagcuccugaacaaccaguucgggaccaugccgucccugacccucgccugccugaccaagcagggccaggucgaccugaacgacgcggugcaggcccucacggaccuggggcugaucuacaccgccaaguaccccaacaccagcgaccucgaccgccugacccagucccaccccauccugaacaugaucgacacgaagaaguccagccucaacaucuccggcuacaacuucagccugggcgccgccgugaaggcgggggccugcaugcuggacggcgggaacaugcucgagaccaucaaggucagcccccagaccauggacggcauccucaagagcauccugaaggugaagaaggcccugggcauguucaucuccgacgccccgggggagcggaaccccuacgagaacauccuguacaagaucugccugagcggcgacggguggcccuacaucgccucccgcaccagcaucacgggccgggcgugggagaacaccguggucgaccucgaguccgacgggaagccccagaaggccggcagcaacggcuccaacaagagccugcaguccgccggguucaccgccggccugaccuacagccagcucaugacgcugaaggacgccaugcugcagcuggacccgaacgcgaagaccuggauggacaucgaggggcgccccgaggaccccguggagaucgcccucuaccagcccuccagcggcugcuacauccacuucuuccgggagccgaccgaccugaagcaguucaagcaggacgccaaguacucccacgggaucgacgugaccgaccuguucgccgcccagcccggccucacgagcgcggucaucgacgcccugccccgcaacauggugaucacgugccagggcuccgacgacauccgcaagcuguucgagagccaggggcggaaggacaucaagcucaucgacaucgcccugagcaagaccgacucccgcaaguacgagaacgccgugugggaccaguacaaggaccugugccacaugcacaccggcaucgucguggagaagaagaagcgcgggggcaaggaggagaucaccccgcacugcgcgcucauggacugcaucauguucgacgccgccgucagcgggggccugaacaccuccgugcugcgggccgugcucccccgggacauggucuuccgcaccagcacgccccggguggugcugugaggacuaguuauaagacugacuagcccgaugggccucccaacgggcccuccuccccuccuugcaccgagauuaauaaaaaaaaaaaaaaaaaaaaaaaaaaaaaaaaaaaaaaaaaaaaaaaaaaaaaaaaaaaaaaaaaaaaaaaaaaaaaaaaaaaaaaaaaaaaaaaaaaaa

SEQ ID NO: 20620 - RNA, 1950 nt, Artificial Sequence
  mRNA product Design i-3 (A100) comprising derived and/or modified sequence from LASV(Josiah;Clade IV)__NP_694869__SP-HsALB_NP(2-569) (opt4)
aggagaaagcuuaccaugaagugggugaccuucaucagccugcuguuccuguucagcagcgccuacagcagcgccagcaaggagaucaagagcuuccuguggacccagagccugagaagagagcugagcggcuacugcagcaacaucaagcugcagguggugaaggacgcccaggcccugcugcacggccuggacuucagcgaggugagcaacgugcagagacugaugagaaaggagagaagagacgacaacgaccugaagagacugagagaccugaaccaggccgugaacaaccugguggagcugaagagcacccagcagaagagcauccugagagugggcacccugaccagcgacgaccugcugauccuggccgccgaccuggagaagcugaagagcaaggugaucagaaccgagagaccccugagcgccggcguguacaugggcaaccugagcagccagcagcuggaccagagaagagcccugcugaacaugaucggcaugagcggcggcaaccagggcgccagagccggcagagacggcguggugagagugugggacgugaagaacgccgagcugcugaacaaccaguucggcaccaugcccagccugacccuggccugccugaccaagcagggccagguggaccugaacgacgccgugcaggcccugaccgaccugggccugaucuacaccgccaaguaccccaacaccagcgaccuggacagacugacccagagccaccccauccugaacaugaucgacaccaagaagagcagccugaacaucagcggcuacaacuucagccugggcgccgccgugaaggccggcgccugcaugcuggacggcggcaacaugcuggagaccaucaaggugagcccccagaccauggacggcauccugaagagcauccugaaggugaagaaggcccugggcauguucaucagcgacacccccggcgagagaaaccccuacgagaacauccuguacaagaucugccugagcggcgacggcuggcccuacaucgccagcagaaccagcaucaccggcagagccugggagaacaccgugguggaccuggagagcgacggcaagccccagaaggccgacagcaacaacagcagcaagagccugcagagcgccggcuucaccgccggccugaccuacagccagcugaugacccugaaggacgccaugcugcagcuggaccccaacgccaagaccuggauggacaucgagggcagacccgaggaccccguggagaucgcccuguaccagcccagcagcggcugcuacauccacuucuucagagagcccaccgaccugaagcaguucaagcaggacgccaaguacagccacggcaucgacgugaccgaccuguucgccacccagcccggccugaccagcgccgugaucgacgcccugcccagaaacauggugaucaccugccagggcagcgacgacaucagaaagcugcuggagagccagggcagaaaggacaucaagcugaucgacaucgcccugagcaagaccgacagcagaaaguacgagaacgccgugugggaccaguacaaggaccugugccacaugcacaccggcguggugguggagaagaagaagagaggcggcaaggaggagaucaccccccacugcgcccugauggacugcaucauguucgacgccgccgugagcggcggccugaacaccagcgugcugagagccgugcugcccagagacaugguguucagaaccagcacccccagaguggugcugugaggacuaguuauaagacugacuagcccgaugggccucccaacgggcccuccuccccuccuugcaccgagauuaauaaaaaaaaaaaaaaaaaaaaaaaaaaaaaaaaaaaaaaaaaaaaaaaaaaaaaaaaaaaaaaaaaaaaaaaaaaaaaaaaaaaaaaaaaaaaaaaaaaaa

SEQ ID NO: 20621 - RNA, 1950 nt, Artificial Sequence
  mRNA product Design i-3 (A100) comprising derived and/or modified sequence from LASV(LP;Clade I)__AAF86702__SP-HsALB_NP(2-569) (opt4)
aggagaaagcuuaccaugaagugggugaccuucaucagccugcuguuccuguucagcagcgccuacagcagcaacagcaaggagaucaagagcuuccuguggacccagagccugagaagagagcugagcggcuacugcagcaacaucaagcugcagguggugaaggacgcccaggcccugcugcacggccuggacuucagcgaggugagcaacgugcagagacugaugagaaagcagaagagagacgacgccgaccugaagagacugagagaccugaaccaggccgugaacaaccugguggagcugaagagcacccagcagaagaacgugcugagagugggcacccugagcagcgacgaccugaucacccuggccgccgaccuggagaagcugaagagcaaggugaucagaaccgagagaccccugagcagcggcguguacaugggcaaccugagcagccagcagcuggaccagagaagagcccugcugagcaugaucggcaugagcggcggcccccagggcaacagaaccggcggcgacggcguggugagagugugggacgugaagaacgccgagcugcugaacaaccaguucggcaccaugcccagccugacccuggccugccugaccaagcagggccagguggaccugaacgacgccgugcaggcccugaccgaccugggccugaucuacaccgccaaguaccccaacagcagcgaccuggacaugcugacccagagccaccccauccugggcaugguggacaccaagaagagcagccugaacaucagcggcuacaacuucagccugggcgccgccgugaaggccggcgccugcaugcuggacggcggcaacaugcuggagaccaucaaggugagcccccagaccauggacggcauccugaagagcauccugaaggugaagagaagccugggcauguucaucagcgacacccccggcgagagaaaccccuacgagaacauccuguacaagaucugccugagcggcgagggcuggcccuacaucgccagcagaaccagcaucaccggcagagccugggagaacacccugguggaccuggagagcgacaacaagccccccaagcugaacagcgccggcagcaacaagagccugcaggccgccggccugaacgccggccugaccuacagccagcugaugacccugaaggacugcaugcugcagcuggaccccagcagcaagaccuggaucgacaucgagggcagacccgaggaccccguggagaucgcccuguuccagcccagcagcggcugcuacauccacuucuucagagagcccaccgaccugaagcaguucaagcaggacgccaaguacagccacggcaucgacgugaccgaccuguucagcacccagcccggccugaccagcgccgugaucgaggcccugcccagaaacauggugcugaccugccagggcagcgacgacaucaagaagcugcuggagagccagggcagaagagacaucaagcugaucgacaucagccugagcaaggccgacagcagaaaguucgagaacgccgugugggaccaguacaaggaccugugccacaugcacaccggcguggugguggagaagaagaagagaggcggcaaggaggagaucaccccccacugcgcccugcuggacugcaucauguucgacgccgccaccaccggcagccugaacaucaccacccugagagccgugcugcccagagacaugguguucagaaccagcacccccaagguggugcugugaggacuaguuauaagacugacuagcccgaugggccucccaacgggcccuccuccccuccuugcaccgagauuaauaaaaaaaaaaaaaaaaaaaaaaaaaaaaaaaaaaaaaaaaaaaaaaaaaaaaaaaaaaaaaaaaaaaaaaaaaaaaaaaaaaaaaaaaaaaaaaaaaaaa

SEQ ID NO: 20622 - RNA, 1950 nt, Artificial Sequence
  mRNA product Design i-3 (A100) comprising derived and/or modified sequence from LASV(803213;Clade II)__AAF86704__SP-HsALB_NP(2-569) (opt4)
aggagaaagcuuaccaugaagugggugaccuucaucagccugcuguuccuguucagcagcgccuacagcagcgccagcaaggaggugaagagcuuccuguggacccagagccugagaagagagcugagcggcuacugcagcaacaucaagcugcagguggugaaggacgcccaggcccugcugcacggccuggacuucagcgaggugaacaacgugcagagacugaugagaaagcagaagagagacgacggcgaccugaagagacugagagaccugaaccaggccgugaacaaccugguggagcugaagagcacccagcagaagagcauccugagagugggcacccugaccagcgacgaccugcugacccuggccgccgaccuggagaagcugaagagcaaggugaucagaaccgagagaccccugagcagcggcguguacaugggcaaccugagcacccagcagcuggagcagagaagagcccugcugaacaugaucggcauggugggcggcgcccagggcacccagcccggcagagacggcguggugagagugugggacgugaagaaccccgaccugcugaacaaccaguucggcaccaugcccagccugacccuggccugccugaccaagcagggccagguggaccugaacgacgccgugcuggcccugaccgaccugggccugaucuacaccgccaaguaccccaacagcagcgaccuggacagacugagccagagccaccccauccugaacaugguggacaccaagaagagcagccugaacaucagcggcuacaacuucagccugggcgccgccgugaaggccggcgccugcaugcuggacggcggcaacaugcuggagaccaucaaggugaccccccagaccauggacggcauccugaagagcauccugaaggugaagagaagccugggcauguucgugagcgacacccccggcgagagaaaccccuacgagaacauccuguacaagaucugccugagcggcgacggcuggcccuacaucgccagcagaaccagcaucgugggcagagccugggagaacaccaccguggaccuggagagcgacggcaagccccagaaggugggcaccgccggcagcaacaagagccugcagagcgccggcuuccccaccggccugaccuacagccagcugaugacccugaaggacagcaugaugcagcuggaccccagcgccaagaccuggaucgacaucgagggcagacccgaggaccccguggagaucgcccuguaccagcccaugagcggcugcuacauccacuucuucagagagcccaccgaccugaagcaguucaagcaggacgccaaguacagccacggcaucgacguggccgaccuguuccccgcccagcccggccugaccagcgccgugaucgaggcccugcccagaaacauggugcugaccugccagggcagcgacgacaucaagaagcugcuggacagccagggcagaagagacaucaagcugaucgacaucagccugagcaagguggacagcagaaaguucgagaacgccgugugggaccagugcaaggaccugugccacaugcacaccggcguggugguggagaagaagaagagaggcggcaaggaggagaucaccccccacugcgcccugauggacugcaucauguucgacgccgccgugagcggcggccugaacauccccgugcugagagccgugcugcccagagacaugguguucagaaccagcagccccaagguggugcugugaggacuaguuauaagacugacuagcccgaugggccucccaacgggcccuccuccccuccuugcaccgagauuaauaaaaaaaaaaaaaaaaaaaaaaaaaaaaaaaaaaaaaaaaaaaaaaaaaaaaaaaaaaaaaaaaaaaaaaaaaaaaaaaaaaaaaaaaaaaaaaaaaaaa

SEQ ID NO: 20623 - RNA, 1953 nt, Artificial Sequence
  mRNA product Design i-3 (A100) comprising derived and/or modified sequence from LASV(GA391;Clade III)__CAA36646__SP-HsALB_NP(2-570) (opt4)
aggagaaagcuuaccaugaagugggugaccuucaucagccugcuguuccuguucagcagcgccuacagcagcgccagcaaggaggugagaagcuuccuguggacccagagccugagaagagagcugagcggcuacugcagcaacaucaagcugcagguggugaaggacgcccaggcccugcugcacggccuggacuucagcgaggugagcaacgugcagagacugaugagaaagcagaagagagacgacggcgaccugaagagacugagagaccugaaccaggccgugaacaaccugguggagcugaagagcacccagcagaagagcgugcugagagugggcacccugagcagcgacgaccugcugauccuggccgccgaccuggagaagcugaagagcaaggugaccagaaccgagagaccccugagcagcggcguguacaugggcaaccugagcagccagcagcuggaccagagaagagcccugcugaacaugaucggcaugaccggcgugagcggcggcggcaagggcgccagcgacggcaucgugagagugugggacgugaagaacgccgagcugcugaacaaccaguucggcaccaugcccagccugacccuggccugccugaccaagcagggccagguggaccugaacgacgccgugcaggcccugaccgaccugggccugaucuacaccgccaaguaccccaacagcagcgaccuggacagacugagccagagccaccccauccugaacaugaucgacaccaagaagagcagccugaacaucagcggcuacaacuucagccugggcgccgccgugaaggccggcgccugcaugcuggacggcggcaacaugcuggagaccaucaaggugagcccccagaccauggacggcauccugaagagcauccugaaggugaagaagagccugggcauguucgugagcgacacccccggcgagagaaaccccuacgagaacauccuguacaagaucugccugagcggcgacggcuggcccuacaucgccagcagaaccagcaucgugggcagagccugggagaacaccgugguggaccuggagcaggacaacaagccccagaagaucggcaacggcggcagcaacaagagccugcagagcgccggcuucgccgccggccugaccuacagccagcugaugacccugaaggacuucaagugcuucaaccugauccccaacgccaagaccuggauggacaucgagggcagacccgaggaccccguggagaucgcccuguaccagcccagcagcggcugcuacgugcacuucuucagagagcccaccgaccugaagcaguucaagcaggacgccaaguacagccacggcaucgacgugaccgaccuguucgccgcccagcccggccugaccagcgccgugaucgaggcccugcccagaaacauggugaucaccugccagggcagcgaggacaucagaaagcugcuggagagccagggcagaagagacaucaagcugaucgacaucacccugagcaaggccgacagcagaaaguucgagaacgccgugugggaccaguucaaggaccugugccacaugcacaccggcguggugguggagaagaagaagagaggcggcaaggaggagaucaccccccacugcgcccugauggacugcaucauguucgacgccgccgugagcggcggccuggacgccaaggugcugagaguggugcugcccagagacaugguguucagaaccagcacccccaagguggugcugugaggacuaguuauaagacugacuagcccgaugggccucccaacgggcccuccuccccuccuugcaccgagauuaauaaaaaaaaaaaaaaaaaaaaaaaaaaaaaaaaaaaaaaaaaaaaaaaaaaaaaaaaaaaaaaaaaaaaaaaaaaaaaaaaaaaaaaaaaaaaaaaaaaaa

SEQ ID NO: 20624 - RNA, 1950 nt, Artificial Sequence
  mRNA product Design i-3 (A100) comprising derived and/or modified sequence from LASV(AV;Clade V)__CCA30315__SP-HsALB_NP(2-569) (opt4)
aggagaaagcuuaccaugaagugggugaccuucaucagccugcuguuccuguucagcagcgccuacagcagcgccagcaaggaggugaagagcuuccuguggacccagagccugagaagagagcugagcggcuacugcagcaacaucaagcugcagguggugaaggacgcccaggcccugcugcacggccuggacuucagcgaggugagcaacgugcagagacugaugagaaagcagagaagagacgacagcgaccugaagagacugagagaccugaaccaggccgugaacaaccugguggagcugaagagcacccagcagaagagcgugcugagagugggcacccugagcagcgacgaccugcugacccuggccgccgaccuggagaagcugaagagcaaggugaccagaaccgagagaccccugagcagcggcguguacaugggcaaccugagcagccagcagcuggaccagagaagagcccugcugaaccugaucggcaugaccaacggcagccagggcagccaggccggcagagacggcguggugagagugugggacgugaagaacgccgagcugcugaacaaccaguucggcaccaugcccagccugacccuggccugccugaccaagcagggccagguggaccugaacgacguggugcaggcccugaccgaccugggccugaucuacaccgccaaguaccccaacaccagcgaccuggacagacugacccagagccaccccauccugaacaugaucgacaccaagaagagcagccugaacaucagcggcuacaacuucagccugggcgccgccgugaaggccggcgccugcaugcuggacggcggcaacaugcuggagaccaucaaggugagcccccagagcauggacggcauccugaagagcauccugaaggugaagagagcccugggcauguucgugagcgacacccccggcgagagaaaccccuacgagaacauccuguacaagaucugccugagcggcgacggcuggcccuacaucgccagcagaaccagcaucgugggcagagccugggagaacaccgugguggaccuggagaccgacggcaagccccagaagaucggcagcggcaacagcaacaagagccugcagagcgccggcuucagcgccggccugaccuacagccagcugaugacccugaaggacgccaugcugcagcuggaccccaacgccaagaccuggauggacaucgagggcagacccgaggaccccguggagguggcccuguaccagcccaucagcggcugcuacauccacuucuucagagagcccaccgaccugaagcaguucaagcaggacgccaaguacagccacggcaucgacaucgccgaccuguucgccgcccagcccggccugaccagcgccgugaucgaggcccugcccagaaacauggugaucaccugccagggcagcgaggacaucaagaagcugcuggagagccagggcagaaaggacaucaagcugaucgacaucgcccugagcaagaucgacagcagaaaguucgagaacgccgugugggaccaguacaaggaccugugccacaugcacaccggcguggugguggagaagaagaagagaggcggcaaggaggagaucaccccccacugcgcccugauggacugcaucauguucgacgccgccgugagcggcggccugaacacccuggugcugagagccgugcugcccagagacaugguguucagaaccagcacccccagaguggugcugugaggacuaguuauaagacugacuagcccgaugggccucccaacgggcccuccuccccuccuugcaccgagauuaauaaaaaaaaaaaaaaaaaaaaaaaaaaaaaaaaaaaaaaaaaaaaaaaaaaaaaaaaaaaaaaaaaaaaaaaaaaaaaaaaaaaaaaaaaaaaaaaaaaaa

SEQ ID NO: 20625 - RNA, 1950 nt, Artificial Sequence
  mRNA product Design i-3 (A100) comprising derived and/or modified sequence from LASV(Togo/2016/7082;Clade VI)__AMR44578__SP-HsALB_NP(2-569) (opt4)
aggagaaagcuuaccaugaagugggugaccuucaucagccugcuguuccuguucagcagcgccuacagcagcaacagcaaggaggugaagagcuuccuguggacccagagccugagaagagagcugagcggcuacugcagcaacaucaagcugcagguggugaaggacgcccaggcccugcugcacggccuggacuucagcgaggugagcaacgugcagagacugaugagaaagcagaagagagacgacggcgaccugaagagacugagagaccugaaccaggccgugaacaaccugguggagcugaagagcgugcagcagaagagcauccugagagugggcacccugaccagcgacgaccugcugacccuggccgccgaccuggagaagcugaagagcaaggugaccagaaccgagagaccccugagcagcggcguguacaugggcaaccugagcagccagcagcuggaccagagaagagcccugcugagcaugaucggcaugagcggcggcaaccagaacagccagcccaagggcgacggcguggugagagugugggacgugaagaacgccgaccugcugaacaaccaguucggcaccaugcccagccugacccuggccugccugaccaagcagggccagguggaccugaacgacgccgugcaggcccugaccgaccugggccugaucuacaccgccaaguaccccaacagcagcgaccuggacagacugagccagagccaccccauccugaacaugaucgacaccaagaagagcagccugaacaucagcggcuacaacuucagccugggcgccgccaucaagaccggcgccugcaugcuggacggcggcaacaugcuggagaccaucaaggugaccccccagaccauggacggcauccugaagagcauccugaaggugaagagaagccugggcauguucaucagcgacacccccggcgagagaaaccccuacgagaacauccuguacaagaucugccugagcggcgacggcuggcccuacaucgccagcagaaccgccaucaucggcagagccugggagaacaccgugguggaccuggagagcgacagcaagccccagaagaucggcagcaacggcagcaacaagagccugcagagcgccggcuucgcccccggccugaccuacagccagcugaugacccugaaggacagcaugcugcagcuggaccccaacgccaagaccuggaucgacaucgagggcagacccgaggaccccguggagguggcccuguuccagcccaucagcggcugcuacauccacuucuucagagagcccaccgaccugaagcaguucaagcaggacgccaaguacagccacggcaucgacgugaccgaccuguucgccgcccagcccggccugaccagcgccgugaucgaggcccugcccagaaacauggugcugaccugccagggcagcgacgacaucaagaagcugcuggacagccagggcagaagagacaucaagcugaucgacgugagccugaacaagaucgacagcagaaaguucgagaacgccgugugggaccaguacaaggaccugugccacaugcacaccggcguggugguggagaagaagaagaagggcggcaaggaggagaucaccccccacugcgcccugcuggacugcaucauguucgacgccgccgugagcggcggccugaacgccaccgugcugagagccgugcugcccagagacaugguguucagaaccagcagccccaagguggugcugugaggacuaguuauaagacugacuagcccgaugggccucccaacgggcccuccuccccuccuugcaccgagauuaauaaaaaaaaaaaaaaaaaaaaaaaaaaaaaaaaaaaaaaaaaaaaaaaaaaaaaaaaaaaaaaaaaaaaaaaaaaaaaaaaaaaaaaaaaaaaaaaaaaaa

SEQ ID NO: 20626 - RNA, 1950 nt, Artificial Sequence
  mRNA product Design i-3 (A100) comprising derived and/or modified sequence from LASV(KAK-428;Clade n.d. (VII))__ANH09741__SP-HsALB_NP(2-569) (opt4)
aggagaaagcuuaccaugaagugggugaccuucaucagccugcuguuccuguucagcagcgccuacagcagcaacagcaaggaggugaagagcuuccuguggacccagagccugagaagagagcugagcggcuacugcaccaacaucaagcugcagguggugaaggacgcccaggcccugcugcacggccuggacuucagcgaggugagcaacgugcagagacugaugagaaagcagaagagagacgacaacgaccugaagagacugagagaccugaaccaggccgugaacaaccugguggagcugaagagcgugcagcagaagagcgugcugaaggugggcacccugaacagcgacgaccugcugacccuggccgccgaccuggagaagcugaagagcaagguggugagaaccgagagaccccugagcagcggcguguacaugggcaaccugagcagccagcagcuggaccagagaagagcccugcugaacaugaucggcauggccggcggcagccagggcaaccagcccagcagagacggcguggugagagugugggacgugaagaacgccgaccugcugaacaaccaguucggcaccaugcccagccugacccuggccugccugaccaagcagggccagguggaccugaacgacguggugcuggcccugaccgaccugggccugaucuacaccgccaaguaccccaacagcagcgaccuggacagacugagccagaaccaccccgugcugaacaugaucgacgugaacaagagcagccugaacaucagcggcuacaacuucagccugggcgccgccgugaaggccggcgccugcaugcuggacggcggcaacaugcuggagaccaucaagaucagcccccagaccguggacggcauccugaagagcauccugaaggugaagagagcccugggcauguucgugagcgacacccccggcgagagaaaccccuacgagaacauccuguacaaggugugccugagcggcaacggcuggcccuacaucgccagcagaaccagcaucgugggcagagccugggagaacaccgugguggaccuggagagcaacaagaaccagcccaaggugggcaacaacggcagcaacaagaugcugcagagcagcggcuucgccaccggccugaccuacagccagcugaugacccugagagacagcaugcugcagcuggaccccaccgccaagaccuggaucgacaucgagggcagacccgaggaccccguggagcuggcccuguuccagcccagcagcggcugcuacauccacuucuucagagagcccaccgaccugaagcaguucaagcaggacgccaaguacagccacggcaucgacgugaacgaccuguucagcgcccagcccggccugaccagcgccgugcuggaggcccugcccagaaacauggugcugaccugccagggcagcgacgacaucagaaagcugcuggacagccaggacagaaaggacaucaagcugaucgacaucagccugagcaaggccgacgccagaaaguucgagaacgacgugugggaccaguucaaggaccugugccacaugcacaccggcaucgugguggagaagaagaagaagggcggcaagcaggagaugaccccccacugcgcccugcuggacugcaucauguucgacgccgccgugagcggcggccugaacgugcccacccugagagccgugcugcccaccgacaugguguucagaaccaucaccaccaagguggugcugugaggacuaguuauaagacugacuagcccgaugggccucccaacgggcccuccuccccuccuugcaccgagauuaauaaaaaaaaaaaaaaaaaaaaaaaaaaaaaaaaaaaaaaaaaaaaaaaaaaaaaaaaaaaaaaaaaaaaaaaaaaaaaaaaaaaaaaaaaaaaaaaaaaaa

SEQ ID NO: 20627 - RNA, 1950 nt, Artificial Sequence; identical to SEQ ID NO: 20621
  mRNA product Design i-3 (A100) comprising derived and/or modified sequence from LASV(Pinneo-NIG-1969;Clade I)__AIT17837__SP-HsALB_NP(2-569) (opt4)

SEQ ID NO: 20628 - RNA, 1950 nt, Artificial Sequence
  mRNA product Design i-3 (A100) comprising derived and/or modified sequence from LASV(ISTH0009-NIG-2011;Clade II)__AIT17405__SP-HsALB_NP(2-569) (opt4)
aggagaaagcuuaccaugaagugggugaccuucaucagccugcuguuccuguucagcagcgccuacagcagcgugagcaaggaggugaagagcuuccuguggacccagagccugagaagagagcugagcggcuacugcagcaacaucaagcugcagguggugaaggacgcccaggcccugcugcacggccuggacuucagcgaggugagcaacgugcagagacugaugagaaagcagaagagagacgacagcgaccugaagagacugagagaccugaaccaggccgugaacaaccugguggagcugaagagcacccagcagaagagcauccugagagugggcacccugaccagcgacgaccugcugacccuggccgccgaccuggagaagcugaagagcaaggugaucagaaccgagagaccccugagcagcggcguguacaugggcaaccugagcacccagcagcuggagcagagaagagcccugcugaacaugaucggcauggugggcggcgcccagggcacccagcccggcagagacggcguggugagagugugggacgugaagaaccccgaccugcugaacaaccaguucggcaccaugcccagccugacccuggccugccugaccaagcagggccagguggaccugaacgacgccgugcuggcccugaccgaccugggccugaucuacaccgccaaguaccccaacagcagcgaccuggacagacugagccagagccaccccauccugaacaugguggacaucaagaagagcagccugaacaucagcggcuacaacuucagccugggcgccgccgugaaggccggcgccugcaugcuggacggcggcaacaugcuggagaccaucaaggugaccccccagaccauggacggcauccugaagagcauccugaaggugaagagaagccugggcauguucgugagcgacacccccggcgagagaaaccccuacgagaacauccuguacaagaucugccugagcggcgacggcuggcccuacaucgccagcagaaccagcaucgugggcagagccugggagaacaccaccguggaccuggagagcgacggcaagccccagaaggugggcagcgccggcagcaacaagagccugcagagcgccggcuuccccaccggccugaccuacagccagcugaugacccugaaggacagcaugaugcagcuggaccccagcgccaagaccuggaucgacaucgagggcagacccgaggaccccguggagaucgcccuguaccagcccaugagcggcugcuacauccacuucuucagagagcccaccgaccugaagcaguucaagcaggacgccaaguacagccacggcaucgacguggccgaccuguuccccgcccagcccggccugaccagcgccgugaucgaggcccugcccagaaacauggugcugaccugccagggcagcgacgacaucaagagacugcuggacagccagggcagaagagacaucaagcugaucgacaucgcccugagcaaggccgacagcagaagauucgagaacgccgugugggaccagugcaaggaccugugccacaugcacaccggcguggugguggagaagaagaagagaggcggcaaggaggagaucaccccccacugcgcccugauggacugcaucauguacgacgccgccgugagcggcggccugaacauccccgugcugagagccgugcugcccagagacaugguguucagaaccagcagccccaagguggugcugugaggacuaguuauaagacugacuagcccgaugggccucccaacgggcccuccuccccuccuugcaccgagauuaauaaaaaaaaaaaaaaaaaaaaaaaaaaaaaaaaaaaaaaaaaaaaaaaaaaaaaaaaaaaaaaaaaaaaaaaaaaaaaaaaaaaaaaaaaaaaaaaaaaaa

SEQ ID NO: 20629 - RNA, 1950 nt, Artificial Sequence
  mRNA product Design i-3 (A100) comprising derived and/or modified sequence from LASV(ISTH2010-NIG-2012;Clade II)__AIT17483__SP-HsALB_NP(2-569) (opt4)
aggagaaagcuuaccaugaagugggugaccuucaucagccugcuguuccuguucagcagcgccuacagcagcgccagcaaggaggugaagagcuuccuguggacccagagccugagaagagagcugagcggcuacugcagcaacaucaagcugcagguggugaaggacgcccaggcccugcugcacggccuggacuucagcgaggugagcaacgugcagagacugaugagaaagcagaagagagacgacagcgaccugaagagacugagagaccugaaccaggccgugaacaaccugguggagcugaagagcacccagcagaagagcauccugagagugggcacccugaccagcgacgaccugcugacccuggccgccgaccuggagaagcugaagagcaaggugaucagaaccgagagaccccugagcagcggcguguacaugggcaaccugagcacccagcagcuggagcagagaagagcccugcugaaccugaucggcauggugggcggcgcccagggcacccagcccggcagagacggcguggugagagugugggacgugaagaaccccgaccugcugaacaaccaguucggcaccaugcccagccugacccuggccugccugaccaagcagggccagguggaccugaacgacgccgugcuggcccugaccgaccugggccugaucuacaccgccaaguaccccaacagcagcgaccuggacagacugagccagagccaccccauccugaacaugguggacaccaagaagagcagccugaacaucagcggcuucaacuucagccugggcgccgccgugaaggccggcgccugcaugcuggacggcggcaacaugcuggagaccaucaaggugaccccccagaccauggacggcauccugaagagcauccugaaggugaagaagagccugggcauguucgugagcgacacccccggcgagagaaaccccuacgagaacauccuguacaagaucugccugagcggcgacggcuggcccuacaucgccagcagaaccagcaucgugggcagagccugggagaacaccaccguggaccuggagagcgacggcaagccccacaaggugggcaccgccggcagcaacaagagccugcagagcgccggcuuccccaccggccugaccuacagccagcugaugacccugaaggacagcaugaugcagcuggaccccagcgccaagaccuggaucgacaucgagggcagacccgaggaccccguggagaucgcccuguaccagcccaugagcggcugcuacauccacuucuucagagagcccaccgaccugaagcaguucaagcaggacgccaaguacagccacggcaucgacguggccgaccuguuccccgcccagcccggccugaccagcgccgugaucgaggcccugcccagaaacauggugcugaccugccagggcagcgacgacaucaagagacugcuggacagccagggcagaagagacaucaagcugaucgacaucgcccugagcaaggccgacagcagaagauucgagaacgccgugugggaccagugcaaggaccugugccacaugcacaccggcguggugguggagaagaagaagagaggcggcaaggaggagaucaccccccacugcgcccugauggacugcaucauguacgacgccgccgugagcggcggccugaacauccccgugcugagagccgugcugcccagagacaugguguucagaaccagcagccccaagguggugcugugaggacuaguuauaagacugacuagcccgaugggccucccaacgggcccuccuccccuccuugcaccgagauuaauaaaaaaaaaaaaaaaaaaaaaaaaaaaaaaaaaaaaaaaaaaaaaaaaaaaaaaaaaaaaaaaaaaaaaaaaaaaaaaaaaaaaaaaaaaaaaaaaaaaa

SEQ ID NO: 20630 - RNA, 1950 nt, Artificial Sequence
  mRNA product Design i-3 (A100) comprising derived and/or modified sequence from LASV(Lassa virus/H.sapiens-wt/NGA/2015/ISTH_0543;Clade II)__AVO03640__SP-HsALB_NP(2-569) (opt4)
aggagaaagcuuaccaugaagugggugaccuucaucagccugcuguuccuguucagcagcgccuacagcagcgccagcaaggaggugaagagcuuccuguggacccagagccugagaagagagcugagcggcuacugcagcaacaucaagcugcagguggugaaggacgcccaggcccugcugcacggccuggacuucagcgaggugagcaacgugcagagacugaugagaaagcagaagagagacgacagcgaccugaagagacugagagaccugaaccaggccgugaacaaccugguggagcugaagagcacccagcagaagagcauccugagagugggcacccugaccagcgacgaccugcugacccuggccgccgaccuggagaagcugaagagcaaggugaucagaaccgagagaccccugagcagcggcguguacaugggcaaccugagcacccagcagcuggagcagagaagagcccugcugaacaugaucggcauggugggcggcgcccagggcacccagcccggcagagacggcguggugagagugugggacgugaagaaccccgaccugcugaacaaccaguucggcaccaugcccagccugacccuggccugccugaccaagcagggccagguggaccugaacgacgccgugcuggcccugaccgaccugggccugaucuacaccgccaaguaccccaacagcagcgaccuggacagacugagccagagccaccccauccugaacaugguggacaccaagaagagcagccugaacaucagcggcuacaacuucagccugggcgccgccgugaaggccggcgccugcaugcuggacggcggcaacaugcuggagaccaucaaggugaccccccagaccauggacggcauccugaagagcauccugaaggugaagaagagccugggcauguucgugagcgacacccccggcgagagaaaccccuacgagaacauccuguacaagaucugccugagcggcgacggcuggcccuacaucgccagcagaaccagcaucgugggcagagccugggagaacaccaccguggaccuggagagcgacggcaagccccagaaggugggcagcgccggcagcaacaagagccugcagagcgccggcuuccccaccggccugaccuacagccagcugaugacccugaaggacagcaugaugcagcuggaccccagcgccaagaccuggaucgacaucgagggcagacccgaggaccccguggagaucgcccuguaccagcccaugagcggcugcuacauccacuucuucagagagcccaccgaccugaagcaguucaagcaggacgccaaguacagccacggcaucgacguggccgaccuguuccccgcccagcccggccugaccagcgccgugaucgaggcccugcccagaaacauggugcugaccugccagggcagcgacgacaucaagagacugcuggacagccagggcagaaaggacaucaagcugaucgacaucgcccugagcaaggccgacagcagaagauucgagaacgccgugugggaccagugcaaggaccugugccacaugcacaccggcguggugguggagaagaagaagagaggcggcaaggaggagaucaccccccacugcgcccugauggacugcaucauguacgacgccgccgugagcggcggccugaacauccccgugcugagagccgugcugcccagagacaugguguucagaaccagcagccccaagguggugcugugaggacuaguuauaagacugacuagcccgaugggccucccaacgggcccuccuccccuccuugcaccgagauuaauaaaaaaaaaaaaaaaaaaaaaaaaaaaaaaaaaaaaaaaaaaaaaaaaaaaaaaaaaaaaaaaaaaaaaaaaaaaaaaaaaaaaaaaaaaaaaaaaaaaa

SEQ ID NO: 20631 - RNA, 1950 nt, Artificial Sequence
  mRNA product Design i-3 (A100) comprising derived and/or modified sequence from LASV(Lassa virus/H.sapiens-wt/NGA/2016/ISTH_0009;Clade II)__AVO03572__SP-HsALB_NP(2-569) (opt4)
aggagaaagcuuaccaugaagugggugaccuucaucagccugcuguuccuguucagcagcgccuacagcagcgccagcaaggaggugaagagcuuccuguggacccagagccugagaagagagcugagcggcuacugcagcaacaucaagcugcagguggugaaggacgcccaggcccugcugcacggccuggacuucagcgaggugagcaacgugcagagacugaugagaaagcagaagagagacgacagcgaccugaagagacugagagaccugaaccaggccgugaacaaccugguggagcugaagagcacccagcagaagagcauccugagagugggcacccugaccagcgacgaccugcugacccuggccgccgaccuggagaagcugaagagcaaggugaucagaaccgagagaccccugagcagcggcguguacaugggcaaccugagcacccagcagcuggagcagagaagagcccugcugaacaugaucggcauggugggcggcgcccagggcacccagcccggcagagacggcguggugagagugugggacgugaagaaccccgaccugcugaacaaccaguucggcaccaugcccagccugacccuggccugccugaccaagcagggccagguggaccugaacgacgccgugcuggcccugaccgaccugggccugaucuacaccgccaaguaccccaacagcagcgaccuggacagacugagccagagccaccccauccugaacaugguggacaccaagaagagcagccugaacaucagcggcuacaacuucagccugggcgccgccgugaaggccggcgccugcaugcuggacggcggcaacaugcuggagaccaucaaggugaccccccagaccauggacggcauccugaagagcauccugaaggugaagaagagccugggcauguucgugagcgacacccccggcgagagaaaccccuacgagaacauccuguacaagaucugccugagcggcgacggcuggcccuacaucgccagcagaaccagcaucgugggcagagccugggagaacaccaccguggaccuggagagcgacggcaagccccagaaggugggcagcgccggcagcaacaagagccugcagagcgccggcuuccccaccggccugaccuacagccagcugaugacccugaaggacagcaugaugcagcuggaccccagcgccaagaccuggaucgacaucgagggcagacccgaggaccccguggagaucgcccuguaccagcccaugagcggcugcuacauccacuucuucagagagcccaccgaccugaagcaguucaagcaggacgccaaguacagccacggcaucgacguggccgaccuguuccccgcccagcccggccugaccagcgccgugaucgaggcccugcccagaaacauggugcugaccugccagggcagcgacgacaucaagagacugcuggacagccagggcagaagagacaucaagcugaucgacaucgcccugagcaaggccgacagcagaagauucgagaacgccgugugggaccagugcaaggaccugugccacaugcacaccggcguggugguggagaagaagaagagaggcggcaaggaggagaucaccccccacugcgcccugauggacugcaucauguacgacgccgccgugagcggcggccugaacauccccgugcugagagccgugcugcccagagacaugguguucagaaccagcagccccaagguggugcugugaggacuaguuauaagacugacuagcccgaugggccucccaacgggcccuccuccccuccuugcaccgagauuaauaaaaaaaaaaaaaaaaaaaaaaaaaaaaaaaaaaaaaaaaaaaaaaaaaaaaaaaaaaaaaaaaaaaaaaaaaaaaaaaaaaaaaaaaaaaaaaaaaaaa

SEQ ID NO: 20632 - RNA, 1950 nt, Artificial Sequence
  mRNA product Design i-3 (A100) comprising derived and/or modified sequence from LASV(Lassa virus/H.sapiens-wt/NGA/2016/ISTH_0017;Clade II)__AVO03568__SP-HsALB_NP(2-569) (opt4)
aggagaaagcuuaccaugaagugggugaccuucaucagccugcuguuccuguucagcagcgccuacagcagcgccagcaaggaggugaagagcuuccuguggacccagagccugagaagagagcugagcggcuacugcagcagcaucaagcugcagguggugaaggacgcccaggcccugcugcacggccuggacuucagcgaggugagcaacgugcagagacugaugagaaagcagaagagagacgacagcgaccugaagagacugagagaccugaaccaggccgugaacaaccugguggagcugaagagcacccagcagaagagcauccugagagugggcacccugaccagcgacgaccugcugacccuggccgccgaccuggagaagcugaagagcaaggugaucagaaccgagagaccccugagcagcggcguguacaugggcaaccugagcacccagcagcuggagcagagaagagcccugcugaacaugaucggcauggccggcggcgcccagggcacccagcccggcagagacggcguggugagagugugggacgugaagaaccccgaccugcugaacaaccaguucggcaccaugcccagccugacccuggccugccugaccaagcagggccagguggaccugaacgacgccgugcuggcccugaccgaccugggccugaucuacaccgccaaguaccccaacagcagcgaccuggacagacugagccagagccaccccauccugaacaugguggacaccaagaagagcagccugaacaucagcggcuacaacuucagccugggcgccgccgugaaggccggcgccugcaugcuggacggcggcaacaugcuggagaccaucaaggugaccccccagaccauggacggcauccugaagagcauccugaaggugaagagaagccugggcauguucgugagcgacgcccccggcgagagaaaccccuacgagaacauccuguacaagaucugccugagcggcgacggcuggcccuacaucgccagcagaaccagcaucgugggcagagccugggagaacaccaccguggaccuggagagcgacggcaagccccagaaggugggcgccaccggcagcaacaagagccugcagagcgccggcuuccccaccggccugaccuacagccagcugaugacccugaaggacagcaugaugcagcuggaccccagcgccaagaccuggaucgacaucgagggcagacccgaggaccccguggagguggcccuguaccagcccgugagcggcugcuacauccacuucuucagagagcccaccgaccugaagcaguucaagcaggacgccaaguacagccacggcaucgacguggccgaccuguuccccgcccagcccggccugaccagcgccgugaucgaggcccugcccagaaacauggugcugaccugccagggcagcgacgacaucaagaagcugcuggacagccagggcagaaaggacaucaagcugaucgacaucgcccugagcaaggccgacagcagaagauucgagaacgccgugugggaccagugcaaggaccugugccacaugcacaccggcguggugguggagaagaagaagagaggcggcaaggaggagaucaccccccacugcgcccugauggacugcaucauguacgacgccgccgugagcggcggccugaacauccccgugcugagagccgugcugcccagagacaugguguucagaaccagcagccccaagguggugcugugaggacuaguuauaagacugacuagcccgaugggccucccaacgggcccuccuccccuccuugcaccgagauuaauaaaaaaaaaaaaaaaaaaaaaaaaaaaaaaaaaaaaaaaaaaaaaaaaaaaaaaaaaaaaaaaaaaaaaaaaaaaaaaaaaaaaaaaaaaaaaaaaaaaa

SEQ ID NO: 20633 - RNA, 1950 nt, Artificial Sequence
  mRNA product Design i-3 (A100) comprising derived and/or modified sequence from LASV(Lassa virus/H.sapiens-wt/NGA/2018/ISTH_0959;Clade II)__AVV65100__SP-HsALB_NP(2-569) (opt4)
aggagaaagcuuaccaugaagugggugaccuucaucagccugcuguuccuguucagcagcgccuacagcagcgccagcaaggaggugaagagcuuccuguggacccagagccugagaagagagcugagcggcuacugcagcaacaucaagcugcagguggugaaggacgcccaggcccugcugcacggccuggacuucagcgaggugagcaacgugcagagacugaugagaaagcagaagagagacgacagcgaccugaagagacugagagaccugaaccaggccgugaacaaccugguggagcugaagagcacccagcagaagagcauccugagagugggcacccugaccagcgacgaccugcugacccuggccgccgaccuggagaagcugaagagcaaggugaucagaaccgagagaccccugagcagcggcguguacaugggcaaccugagcacccagcagcuggagcagagaagagcccugcugaaccugaucggcauggugggcggcgcccagggcacccagcccggcagagacggcguggugagagugugggacgugaagaaccccgaccugcugaacaaccaguucggcaccaugcccagccugacccuggccugccugaccaagcagggccagguggaccugaacgacguggugcuggcccugaccgaccugggccugaucuacaccgccaaguaccccaacagcagcgaccuggacagacugagccagagccaccccauccugaacaugguggacaccaagaagagcagccugaacaucagcggcuucaacuucagccugggcgccgccgugaaggccggcgccugcaugcuggacggcggcaacaugcuggagaccaucaaggugaccccccagaccauggacggcauccugaagagcauccugaaggugaagaagagccugggcauguucgugagcgacacccccggcgagagaaaccccuacgagaacauccuguacaagaucugccugagcggcgacggcuggcccuacaucgccagcagaaccagcaucgugggcagagccugggagaacaccaccguggaccuggagagcgacggcaagccccacaaggugggcaccgccggcagcaacaagagccugcagagcgccggcuuccccaccggccugaccuacagccagcugaugacccugaaggacagcaugaugcagcuggaccccagcgccaagaccuggaucgacaucgagggcagacccgaggaccccguggagaucgcccuguaccagcccaugagcggcugcuacauccacuucuucagagagcccaccgaccugaagcaguucaagcaggacgccaaguacagccacggcaucgacguggccgaccuguuccccgcccagcccggccugaccagcgccgugaucgaggcccugcccagaaacauggugcugaccugccagggcagcgacgacaucaagagacugcuggacagccagggcagaaaggacaucaagcugaucgacaucgcccugagcaagaccgacagcagaagauucgagaacgccgugugggaccagugcaaggaccugugccacaugcacaccggcguggugguggagaagaagaagagaggcggcaaggaggagaucaccccccacugcgcccugauggacugcaucauguacgacgccgccgugagcggcggccugaacauccccgugcugagagccgugcugcccagagacaugguguucagaaccagcagccccaagguggugcugugaggacuaguuauaagacugacuagcccgaugggccucccaacgggcccuccuccccuccuugcaccgagauuaauaaaaaaaaaaaaaaaaaaaaaaaaaaaaaaaaaaaaaaaaaaaaaaaaaaaaaaaaaaaaaaaaaaaaaaaaaaaaaaaaaaaaaaaaaaaaaaaaaaaa

SEQ ID NO: 20634 - RNA, 1950 nt, Artificial Sequence
  mRNA product Design i-3 (A100) comprising derived and/or modified sequence from LASV(LASV003-NIG-2008;Clade II)__AIT17581__SP-HsALB_NP(2-569) (opt4)
aggagaaagcuuaccaugaagugggugaccuucaucagccugcuguuccuguucagcagcgccuacagcagcgccagcaaggaggugaagagcuuccuguggacccagagccugagaagagagcugagcggcuacugcagcagcaucaagcugcagguggugaaggacgcccaggcccugcugcacggccuggacuucagcgaggugagcaacgugcagagacugaugagaaagcagaagagagacgacagcgaccugaagagacugagagaccugaaccaggccgugaacaaccugguggagcugaagagcacccagcagaagagcgugcugagagugggcacccugaccagcgacgaccugcugacccuggccgccgaccuggagaagcugaagagcaaggugaucagaaccgagagaccccugagcagcggcguguacaugggcaaccugagcgcccagcagcuggagcagagaagaacccugcugaacaugaucggcauggugggcggcgcccagggcacccagcccggcagagacggcguggugagagugugggacgugaagaaccccgaccugcugaacaaccaguucggcaccaugcccagccugacccuggccugccugaccaagcagggccagguggaccugaacgacguggugcuggcccugaccgaccugggccugaucuacaccgccaaguaccccaacagcagcgaccuggacagacugagccagagccaccccauccugagcaugguggacaccaagaagagcagccugaacaucagcggcuacaacuucagccugggcgccgccgugaaggccggcgccugcaugcuggacggcggcaacaugcuggagaccaucaaggugaccccccagaccauggacggcauccugaagagcauccugaaggugaagaagagccugggcauguucgugagcgacacccccggcgagagaaaccccuacgagaacauccuguacaagaucugccugagcggcgacggcuggcccuacaucgccagcagaaccagcaucgugggcagagccugggagaacaccaccguggaccuggagagcgacggcaagccccagaaggugggcaccgccggcagcaacaagagccugcagagcgccggcuuccccaccggccugaccuacagccagcugaugacccugaaggacagcaugaugcagcuggaccccagcgccaagaccuggaucgacaucgagggcagacccgaggaccccguggagaucgcccuguaccagcccaugagcggcugcuacauccacuucuucagagagcccaccgaccugaagcaguucaagcaggacgccaaguacagccacggcaucgacgugaccgaccuguuccccgcccagcccggccugaccagcgccgugaucgaggcccugcccagaaacauggugcugaccugccagggcagcgacgacaucaagagacugcuggacagccagggcagaagagacaucaagcugaucgacaucgcccugagcaaggccgacagcagaagauucgagaacgccgugugggaccagugcaaggaccugugccacaugcacaccggcguggugguggagaagaagaagagaggcggcaaggaggagaucaccccccacugcgcccugauggacugcaucauguacgacgccgccgugagcggcggccugaacauccccgugcugagagccgugcugcccagagacaugguguucagaaccagcagccccaagguggugcugugaggacuaguuauaagacugacuagcccgaugggccucccaacgggcccuccuccccuccuugcaccgagauuaauaaaaaaaaaaaaaaaaaaaaaaaaaaaaaaaaaaaaaaaaaaaaaaaaaaaaaaaaaaaaaaaaaaaaaaaaaaaaaaaaaaaaaaaaaaaaaaaaaaaa

SEQ ID NO: 20635 - RNA, 1950 nt, Artificial Sequence
  mRNA product Design i-3 (A100) comprising derived and/or modified sequence from LASV(LASV035-NIG-2009;Clade II)__AIT17589__SP-HsALB_NP(2-569) (opt4)
aggagaaagcuuaccaugaagugggugaccuucaucagccugcuguuccuguucagcagcgccuacagcagcgccagcaaggaggugaagagcuuccuguggacccagagccugagaagagagcugagcggcuacugcagcagcaucaagcugcagguggugaaggacgcccaggcccugcugcacggccuggacuucagcgaggugagcaacgugcagagacugaugagaaagcagaagagagacgacagcgaccugaagagacugagagaccugaaccaggccgugaacaaccugguggagcugaagagcacccagcagaagagcauccugagagugggcacccugaccagcgacgaccugcugacccuggccgccgaccuggagaagcugaagagcaaggugaucagaaccgagagaccccugagcagcggcguguacaugggcaaccugagcgcccagcagcuggagcagagaagagcccugcugaacaugaucggcauggugggcggcgcccagggcacccagcccggcagagacggcguggugagagugugggacgugaagaaccccgaccugcugaacaaccaguucggcaccaugcccagccugacccuggccugccugaccaagcagggccagguggaccugaacgacgccgugcuggcccugaccgaccugggccugaucuacaccgccaaguaccccaacagcagcgaccuggacagacugagccagagccaccccauccugaacaugguggacaccaagaagagcagccugaacaucagcggcuacaacuucagccugggcgccgccgugaaggccggcgccugcaugcuggacggcggcaacaugcuggagaccaucaaggugaccccccagaccauggacggcauccugaagagcauccugaaggugaagagaagccugggcauguucgugagcgacacccccggcgagagaaaccccuacgagaacauccuguacaagaucugccugagcggcgacggcuggcccuacaucgccagcagaaccagcaucgugggcagagccugggagaacaccaccguggaccuggagagcgacggcaagccccagaaggugggcaccaccggcagcaacaagagccugcagagcgccggcuuccccaccggccugaccuacagccagcugaugacccugaaggacagcaugaugcagcuggaccccagcgccaagaccuggaucgacaucgagggcagacccgaggaccccguggagaucgcccuguaccagcccaugagcggcugcuacauccacuucuucagagagcccaccgaccugaagcaguucaagcaggacgccaaguacagccacggcaucgacguggccgaccuguuccccgcccagcccggccugaccagcgccgugaucgaggcccugcccagaaacauggugcugaccugccagggcagcgacgacaucaagaagcugcuggacagccagggcagaagagacaucaagcugaucgacaucgcccugagcaaggccgacagcagaaaguucgagaacgccgugugggaccagugcaaggaccugugccacaugcacaccggcguggugguggagaagaagaagagaggcggcaaggaggagaucaccccccacugcgcccugauggacugcaucauguacgacgccgccgugagcggcggccugaacauccccgugcugagagccgugcugcccagagacaugguguucagaaccagcagccccaagguggugcugugaggacuaguuauaagacugacuagcccgaugggccucccaacgggcccuccuccccuccuugcaccgagauuaauaaaaaaaaaaaaaaaaaaaaaaaaaaaaaaaaaaaaaaaaaaaaaaaaaaaaaaaaaaaaaaaaaaaaaaaaaaaaaaaaaaaaaaaaaaaaaaaaaaaa

SEQ ID NO: 20636 - RNA, 1950 nt, Artificial Sequence
  mRNA product Design i-3 (A100) comprising derived and/or modified sequence from LASV(LASV1000-NIG-2009;Clade II)__AIT17783__SP-HsALB_NP(2-569) (opt4)
aggagaaagcuuaccaugaagugggugaccuucaucagccugcuguuccuguucagcagcgccuacagcagcgccagcaaggaggugaagagcuuccuguggacccagagccugagaagagagcugagcggcuacugcagcaacaucaagcugcagguggugaaggacgcccaggcccugcugcacggccuggacuucagcgaggugagcaacgugcagagacugaugagaaagcagaagagagacgacagcgaccugaagagacugagagaccugaaccaggccgugaacaaccugguggagcugaagagcacccagcagaagagcauccugagagugggcacccugaccagcgacgaccugcugacccuggccgccgaccuggagaagcugaagagcaaggugaucagaaccgagagaccccugagcagcggcguguacaugggcaaccugagcacccagcagcuggagcagagaagagcccugcugaacaugaucggcauggugggcggcgcccagggcacccagcccggcagagacggcguggugagagugugggacgugaagaaccccgaccugcugaacaaccaguucggcaccaugcccagccugacccuggccugccugaccaagcagggccagguggaccugaacgacguggugcuggcccugaccgaccugggccugaucuacaccgccaaguaccccaacagcagcgaccuggacagacugagccagagccaccccauccugaacaugguggacaccaagaagagcagccugaacaucagcggcuacaacuucagccugggcgccgccgugaaggccggcgccugcaugcuggacggcggcaacaugcuggagaccaucaaggugaccccccagaccauggacggcauccugaagagcauccugaaggugaagaagagccugggcauguucgugagcgacacccccggcgagagaaaccccuacgagaacauccuguacaagaucugccugagcggcgacggcuggcccuacaucgccagcagaaccagcaucgugggcagagccugggagaacaccaccguggaccuggagagcgacggcaagccccagaaggugggcaccgccggcagcaacaagagccugcagagcgccggcuuccccaccggccugaccuacagccagcugaugacccugaaggacagcaugaugcagcuggaccccagcgccaagaccuggaucgacaucgagggcagacccgaggaccccguggagaucgcccuguaccagcccgugagcggcugcuacauccacuucuucagagagcccaccgaccugaagcaguucaagcaggacgccaaguacagccacggcaucgacguggccgaccuguuccccgcccagcccggccugaccagcgccgugaucgaggcccugcccagaaacauggugcugaccugccagggcagcgacgacaucaagagacugcuggacagccagggcagaagagacaucaagcugaucgacaucgcccugagcaaggccgacagcagaagauucgagaacgccgugugggaccagugcaaggaccugugccacaugcacaccggcguggugguggagaagaagaagagaggcggcaaggaggagaucaccccccacugcgcccugauggacugcaucauguacgacgccgccgugagcggcggccugaacauccccgugcugagagccgugcugcccagagacaugguguucagaaccagcagccccaagguggugcugugaggacuaguuauaagacugacuagcccgaugggccucccaacgggcccuccuccccuccuugcaccgagauuaauaaaaaaaaaaaaaaaaaaaaaaaaaaaaaaaaaaaaaaaaaaaaaaaaaaaaaaaaaaaaaaaaaaaaaaaaaaaaaaaaaaaaaaaaaaaaaaaaaaaa

SEQ ID NO: 20637 - RNA, 1950 nt, Artificial Sequence
  mRNA product Design i-3 (A100) comprising derived and/or modified sequence from LASV(LASV221-NIG-2010;Clade II)__AIT17625__SP-HsALB_NP(2-569) (opt4)
aggagaaagcuuaccaugaagugggugaccuucaucagccugcuguuccuguucagcagcgccuacagcagcgccagcaaggaggugaagagcuuccuguggacccagagccugagaagagagcugagcggcuacugcagcagcaucaagcugcagguggugaaggacgcccaggcccugcugcacggccuggacuucagcgaggugagcaacgugcagagacugaugagaaagcagagaagagacgacagcgaccugaagagacugagagaccugaaccaggccgugaacaaccugguggagcugaagagcacccagcagaagagcauccugagagugggcacccugaccagcgacgaccugcugacccuggccgccgaccuggagaagcugaagagcaaggugaucagaaccgagagaccccugagcagcggcguguacaugggcaaccugagcacccagcagcuggagcagagaagagcccugcugaacaugaucggcauggugggcggcgcccagggcacccagcccggcagagacggcguggugagagugugggacgugaagaaccccgaccugcugaacaaccaguucggcaccaugcccagccugacccuggccugccugaccaagcagggccagguggaccugaacgacgccgugcuggcccugaccgaccugggccugaucuacaccgccaaguaccccaacagcagcgaccuggacagacugagccagagccaccccauccugaacaugguggacaccaagaagagcagccugaacaucagcggcuacaacuucagccugggcgccgccgugaaggccggcgccugcaugcuggacggcggcaacaugcuggagaccaucaaggugaccccccagaccguggacggcauccugaagagcauccugaaggugaagagaagccugggcauguucgugagcgacacccccggcgagagaaaccccuacgagaacauccuguacaagaucugccugagcggcgacggcuggcccuacaucgccagcagaaccagcaucgugggcagagccugggagaacaccaccguggaccuggagagcgacggcaagccccagaaggugggcaccgccggcagcaacaagagccugcagagcgccggcuuccccaccggccugaccuacagccagcugaugacccugaaggacagcaugaugcagcuggaccccagcgccaagaccuggaucgacaucgagggcagacccgaggaccccguggagaucgcccuguaccagcccaugagcggcugcuacauccacuucuucagagagcccaccgaccugaagcaguucaagcaggacgccaaguacagccacggcaucgacguggccgaccuguuccccgcccagcccggccugaccagcgccgugaucgaggcccugcccagaaacauggugcugaccugccagggcagcgacgacaucaagagacugcuggacagccagggcagaagagacaucaagcugaucgacaucgcccugagcaaggccgacagcagaaaguucgagaacgccgugugggaccagugcaaggaccugugccacaugcacaccggcguggugguggagaagaagaagagaggcggcaaggaggagaucaccccccacugcgcccugauggacugcaucauguacgacgccgccgugagcggcggccugaacauccccgugcugagagccgugcugcccagagacaugguguucagaaccagcagccccaagguggugcugugaggacuaguuauaagacugacuagcccgaugggccucccaacgggcccuccuccccuccuugcaccgagauuaauaaaaaaaaaaaaaaaaaaaaaaaaaaaaaaaaaaaaaaaaaaaaaaaaaaaaaaaaaaaaaaaaaaaaaaaaaaaaaaaaaaaaaaaaaaaaaaaaaaaa

SEQ ID NO: 20638 - RNA, 1950 nt, Artificial Sequence
  mRNA product Design i-3 (A100) comprising derived and/or modified sequence from LASV(LASV237-NIG-2010;Clade II)__AIT17639__SP-HsALB_NP(2-569) (opt4)
aggagaaagcuuaccaugaagugggugaccuucaucagccugcuguuccuguucagcagcgccuacagcagcgccagcaaggaggugaagagcuuccuguggacccagagccugagaagagagcugagcggcuacugcagcaacaucaagcugcagguggugaaggacgcccaggcccugcugcacggccuggacuucagcgaggugagcaacgugcagagacugaugagaaagcagaagagagacgacagcgaccugaagagacugagagaccugaaccaggccgugaacaaccugguggagcugaagagcacccagcagaagagcauccugagagugggcacccugaccagcgacgaccugcugacccuggccgccgaccuggagaagcugaagagcaaggugaucagaaccgagagaccccugagcagcggcguguacaugggcaaccugagcacccagcagcuggagcagagaagagcccugcugaacaugaucggcauggugggcggcgcccagggcacccagcccggcagagacggcguggugagagugugggacgugaagaaccccgaccugcugaacaaccaguucggcaccaugcccagccugacccuggccugccugaccaagcagggccagguggaccugaacgacgccgugcuggcccugaccgaccugggccugaucuacaccgccaaguaccccaacagcagcgaccuggacagacugagccagagccaccccauccugaacaugguggacaucaagaagagcagccugaacaucagcggcuacaacuucagccugggcgccgccgugaaggccggcgccugcaugcuggacggcggcaacaugcuggagaccaucaaggugaccccccagaccauggacggcauccugaagagcauccugaaggugaagagaagccugggcauguucgugagcgacacccccggcgagagaaaccccuacgagaacauccuguacaagaucugccugagcggcgacggcuggcccuacaucgccagcagaaccagcaucgugggcagagccugggagaacaccaccguggaccuggagagcgacggcaagccccagaaggugggcagcgccggcagcaacaagagccugcagagcgccggcuuccccaccggccugaccuacagccagcugaugacccugaaggacagcaugaugcagcuggaccccagcgccaagaccuggaucgacaucgagggcagacccgaggaccccguggagaucgcccuguaccagcccaugagcggcugcuacauccacuucuucagagagcccaccgaccugaagcaguucaagcaggacgccaaguacagccacggcaucgacguggccgaccuguuccccgcccagcccggccugaccagcgccgugaucgaggcccugcccagaaacauggugcugaccugccagggcagcgacgacaucaagagacugcuggacagccagggcagaagagacaucaagcugaucgacaucgcccugagcaaggccgacagcagaagauucgagaacgccgugugggaccagugcaaggaccugugccacaugcacaccggcguggugguggagaagaagaagagaggcggcaaggaggagaucaccccccacugcgcccugauggacugcaucauguacgacgccgccgugagcggcggccugaacauccccgugcugagagccgugcugcccagagacaugguguucagaaccagcagccccaagguggugcugugaggacuaguuauaagacugacuagcccgaugggccucccaacgggcccuccuccccuccuugcaccgagauuaauaaaaaaaaaaaaaaaaaaaaaaaaaaaaaaaaaaaaaaaaaaaaaaaaaaaaaaaaaaaaaaaaaaaaaaaaaaaaaaaaaaaaaaaaaaaaaaaaaaaa

SEQ ID NO: 20639 - RNA, 1950 nt, Artificial Sequence
  mRNA product Design i-3 (A100) comprising derived and/or modified sequence from LASV(LASV253-NIG-2011;Clade II)__AIT17671__SP-HsALB_NP(2-569) (opt4)
aggagaaagcuuaccaugaagugggugaccuucaucagccugcuguuccuguucagcagcgccuacagcagcgccagcaaggaggugaagagcuuccuguggacccagagccugagaagagagcugagcggcuacugcagcagcaucaagcugcagguggugaaggacgcccaggcccugcugcacggccuggacuucagcgaggugagcaacgugcagagacugaugagaaagcagaagagagacgacagcgaccugaagagacugagagaccugaaccaggccgugaacaaccugguggagcugaagagcacccagcagaagagcgugcugagagugggcacccugaccagcgacgaccugcugacccuggccgccgaccuggagaagcugaagagcaaggugaucagaaccgagagaccccugagcagcggcguguacaugggcaaccugagcacccagcagcuggagcagagaagagcccugcugaacaugaucggcauggugggcggcgcccagggcacccagcccggcagagacggcguggugagagugugggacgugaagaaccccgaccugcugaacaaccaguucggcaccaugcccagccugacccuggccugccugaccaagcagggccagguggaccugaacgacguggugcuggcccugaccgaccugggccugaucuacaccgccaaguaccccaacagcagcgaccuggacagacugagccagagccaccccauccugaacaugguggacaccaagaagagcagccugaacaucagcggcuacaacuucagccugggcgccgccgugaaggccggcgccugcaugcuggacggcggcaacaugcuggagaccaucaaggugaccccccagaccauggacggcauccugaagagcauccugaaggugaagaagagccugggcauguucgugagcgacacccccggcgagagaaaccccuacgagaacauccuguacaagaucugccugagcggcgacggcuggcccuacaucgccagcagaaccagcaucgugggcagagccugggagaacaccaccguggaccuggagagcgacggcaagccccagaaggugggcaccgccggcagcaacaagagccugcagagcgccggcuuccccaccggccugaccuacagccagcugaugacccugaaggacagcaugaugcagcuggaccccagcgccaagaccuggaucgacaucgagggcagacccgaggaccccguggagaucgcccuguaccagcccaugagcggcugcuacauccacuucuucagagagcccaccgaccugaagcaguucaagcaggacgccaaguacagccacggcaucgacgugaccgaccuguuccccgcccagcccggccugaccagcgccgugaucgaggcccugcccagaaacauggugcugaccugccagggcagcgacgacaucaagagacugcuggacagccagggcagaagagacaucaagcugaucgacaucgcccugagcaaggccgacagcagaagauucgagaacgccgugugggaccagugcaaggaccugugccacaugcacaccggcguggugguggagaagaagaagagaggcggcaaggaggagaucaccccccacugcgcccugauggacugcaucauguacgacgccgccgugagcggcggccugaacauccccgugcugagagccgugcugcccagagacaugguguucagaaccagcagccccaagguggugcugugaggacuaguuauaagacugacuagcccgaugggccucccaacgggcccuccuccccuccuugcaccgagauuaauaaaaaaaaaaaaaaaaaaaaaaaaaaaaaaaaaaaaaaaaaaaaaaaaaaaaaaaaaaaaaaaaaaaaaaaaaaaaaaaaaaaaaaaaaaaaaaaaaaaa

SEQ ID NO: 20640 - RNA, 1950 nt, Artificial Sequence
  mRNA product Design i-3 (A100) comprising derived and/or modified sequence from LASV(LASV254-NIG-2011;Clade II)__AIT17675__SP-HsALB_NP(2-569) (opt4)
aggagaaagcuuaccaugaagugggugaccuucaucagccugcuguuccuguucagcagcgccuacagcagcgccagcaaggaggugaagagcuuccuguggacccagagccugagaagagagcugagcggcuacugcagcagcaucaagcugcagguggugaaggacgcccaggcccugcugcacggccuggacuucagcgaggugagcaacgugcagagacugaugagaaagcagaagagagacgacagcgaccugaagagacugagagaccugaaccaggccgugaacaaccugguggagcugaagagcacccagcagaagagcgugcugagagugggcacccugaccagcgacgaccugcugacccuggccgccgaccuggagaagcugaagagcaaggugaucagaaccgagagaccccugagcagcggcguguacaugggcaaccugagcacccagcagcuggagcagagaagagcccugcugaacaugaucggcauggugggcggcgcccagggcacccagcccggcagagacggcguggugagagugugggacgugaagaaccccgaccugcugaacaaccaguucggcaccaugcccagccugacccuggccugccugaccaagcagggccagguggaccugaacgacgccgugcuggcccugaccgaccugggccugaucuacaccgccaaguaccccaacagcagcgaccuggacagacugagccagagccaccccauccugaacaugguggacaccaagaagagcagccugaacaucagcggcuacaacuucagccugggcgccgccgugaaggccggcgccugcaugcuggacggcggcaacaugcuggagaccaucaaggugaccccccagaccauggacggcauccugaagagcauccugaaggugaagaagagccugggcauguucgugagcgacacccccggcgagagaaaccccuacgagaacauccuguacaagaucugccugagcggcgacggcuggcccuacaucgccagcagaaccagcaucgugggcagagccugggagaacaccaucguggaccuggagagcgacggcaagccccagaaggugggcaccgccggcagcaacaagagccugcagagcgccggcuuccccaccggccugaccuacagccagcugaugacccugaaggacagcaugaugcagcuggaccccagcgccaagaccuggaucgacaucgagggcagacccgaggaccccguggagaucgcccuguaccagcccaugagcggcugcuacauccacuucuucagagagcccaccgaccugaagcaguucaagcaggacgccaaguacagccacggcaucgacguggccgaccuguuccccgcccagcccggccugaccagcgccgugaucgaggcccugcccagaaacauggugcugaccugccagggcagcgacgacaucaagagacugcuggacagccagggcagaagagacaucaagcugaucgacaucgcccugagcaaggccgacagcagaagauucgagaacgccgugugggaccagugcaaggaccugugccacaugcacaccggcguggugguggagaagaagaagagaggcggcaaggaggagaucaccccccacugcgcccugauggacugcaucauguacgacgccgccgugagcggcggccugaacauccccgugcugagagccgugcugcccagagacaugguguucagaaccagcagccccaagguggugcugugaggacuaguuauaagacugacuagcccgaugggccucccaacgggcccuccuccccuccuugcaccgagauuaauaaaaaaaaaaaaaaaaaaaaaaaaaaaaaaaaaaaaaaaaaaaaaaaaaaaaaaaaaaaaaaaaaaaaaaaaaaaaaaaaaaaaaaaaaaaaaaaaaaaa

SEQ ID NO: 20641 - RNA, 1950 nt, Artificial Sequence
  mRNA product Design i-3 (A100) comprising derived and/or modified sequence from LASV(Nig08-04;Clade II)__ADU56611__SP-HsALB_NP(2-569) (opt4)
aggagaaagcuuaccaugaagugggugaccuucaucagccugcuguuccuguucagcagcgccuacagcagcgccagcaaggaggugaagagcuuccuguggacccagagccugagaagagagcugagcggcuacugcagcaacaucaagcugcagguggugaaggacgcccaggcccugcugcacggccuggacuucagcgaggugagcaacgugcagagacugaugagaaagcagaagagagacgacggcgaccugaagagacugagagaccugaaccaggccgugaacaaccugguggagcugaagagcacccagcagaagagcgugcugagagugggcacccugaccagcgacgaccugcugacccuggccgccgaccuggagaagcugaagagcaaggugaucagaaccgagagaccccugagcagcggcguguacaugggcaaccugagcacccagcagcuggagcagagaaaggcccugcugagcaugaucggcauggugggcggcgcccagggcacccagcccggcagagacggcguggugagagugugggacgugaagaaccccgaccugcugaacaaccaguucggcaccaugcccagccugacccuggccugccugaccaagcagggccagguggaccugaacgacgccgugcuggcccugaccgaccugggccugaucuacaccgccaaguaccccaacagcagcgaccuggacagacugagccagagccaccccauccugaacaugguggacaccaagaagagcagccugaacaucagcggcuacaacuucagccugggcgccgccgugaaggccggcgccugcaugcuggacggcggcaacaugcuggagaccaucaaggugaccccccagaccauggacggcauccugaagagcauccugaaggugaagagaagccugggcauguucgugagcgacacccccggcgagagaaaccccuacgagaacauccuguacaagaucugccugagcggcgacggcuggcccuacaucgccagcagaaccagcaucgugggcagagccugggagaacaccaccguggaccuggagagcgacggcaagccccagaaggugggcaccgccggcagcaacaagagccugcagagcgccggcuuccccaccggccugaccuacagccagcugaugacccugaaggacagcaugaugcagcuggaccccagcgccaagaccuggaucgacaucgagggcagacccgaggaccccguggagaucgcccuguaccagcccaugagcggcugcuacauccacuucuucagagagcccaccgaccugaagcaguucaagcaggacgccaaguacagccacggcaucgacgugaccgaccuguucagcgcccagcccggccugaccagcgccgugaucgaggcccugcccagaaacauggugcugaccugccagggcagcgacgacaucaagaagcugcuggacagccagggcagaagagacaucaagcugaucgacaucagccugaacaaggccgacagcagaagauucgagaacgccgugugggaccagugcaaggaccugugccacaugcacaccggcguggugguggagaagaagaagagaggcggcaaggaggagaucaccccccacugcgcccugauggacugcaucauguucgacgccgccgugagcggcggccugaacauccccauccugagagccgugcugcccagagacaugguguucagaaccagcagccccaagguggugcugugaggacuaguuauaagacugacuagcccgaugggccucccaacgggcccuccuccccuccuugcaccgagauuaauaaaaaaaaaaaaaaaaaaaaaaaaaaaaaaaaaaaaaaaaaaaaaaaaaaaaaaaaaaaaaaaaaaaaaaaaaaaaaaaaaaaaaaaaaaaaaaaaaaaa

SEQ ID NO: 20642 - RNA, 1953 nt, Artificial Sequence
  mRNA product Design i-3 (A100) comprising derived and/or modified sequence from LASV(GA391;Clade III)__AAA46284__SP-HsALB_NP(2-570) (opt4)
aggagaaagcuuaccaugaagugggugaccuucaucagccugcuguuccuguucagcagcgccuacagcagcgccagcaaggaggugagaagcugccuguggacccagagccugagaagagagcugagcggcuacugcagcaacaucaagcugcagguggugaaggacgcccaggcccugcugcacggccuggacuucagcgaggugagcaacgugcagagacugaugagaaagcagaagagagacgacggcgaccugaagagacugagagaccugaaccaggccgugaacaaccugguggagcugaagagcacccagcagaagagcgugcugagagugggcacccugagcagcgacgaccugcugauccuggccgccgaccuggagaagcugaagagcaaggugaccagaaccgagagaccccugagcagcggcguguacaugggcaaccugagcagccagcagcuggaccagagaagagcccugcugaacaugaucggcaugaccggcgugagcggcggcggcaagggcgccagcaacggcaucgugagagugugggacgugaagaacgccgagcugcugaacaaccaguucggcaccaugcccagccugacccuggccugccugaccaagcagggccagguggaccugaacgacgccgugcaggcccugaccgaccugggccugaucuacaccgccaaguaccccaacagcagcgaccuggacagacugagccagagccaccccauccugaacaugaucgacaccaagaagagcagccugaacaucagcggcuacaacuucagccugggcgccgccgugaaggccggcgccugcaugcuggacggcggcaacaugcuggagaccaucaaggugagcccccagaccauggacggcauccugaagagcauccugaaggugaagaagagccugggcauguucgugagcgacacccccggcgagagaaaccccuacgagaacauccuguacaagaucugccugagcggcgacggcuggagcuacaucgccagcagaaccagcaucgugggcagagccugggagaacaccgugguggaccuggagcaggacaacaagccccagaagaucggcaacggcggcagcaacaagagccugcagagcgccggcuucgccgccggccugaucuacagccagcugaugacccugaaggacuucaagugcuucaaccugauccccaacgccaagaccuggauggacaucgagggcagacccgaggaccccguggagaucgcccuguaccagcccagcagcggcugcuacgugcacuucuucagagagcccaccgaccugaagcaguucaagcaggacgccaaguacagccacggcagagacgugaccgaccuguucgccgcccagcccggccugaccagcgccgugaucgaggcccugcccagaaacauggugaucaccugccagggcagcgaggacaucagaaagcugcuggagagccagggcagaagagacaucaagcugaucgacaucacccugagcaaggccgacagcagaaaguucgagaacgccgugugggaccaguucaaggaccugugccacaugcacaccggcguggugguggagaagaagaagagaggcggcaaggaggagaucaccccccacugcgcccugauggacugcaucauguucgacgccgccgugagcggcggccuggacgccaaggugcugagaguggugcugcccagagacaugguguucagaaccagcacccccaagguggugcugugaggacuaguuauaagacugacuagcccgaugggccucccaacgggcccuccuccccuccuugcaccgagauuaauaaaaaaaaaaaaaaaaaaaaaaaaaaaaaaaaaaaaaaaaaaaaaaaaaaaaaaaaaaaaaaaaaaaaaaaaaaaaaaaaaaaaaaaaaaaaaaaaaaaa

SEQ ID NO: 20643 - RNA, 1950 nt, Artificial Sequence
  mRNA product Design i-3 (A100) comprising derived and/or modified sequence from LASV(Nig08-A19;Clade III)__ADU56619__SP-HsALB_NP(2-569) (opt4)
aggagaaagcuuaccaugaagugggugaccuucaucagccugcuguuccuguucagcagcgccuacagcagcgccagcaaggaggugaagagcuuccuguggacccagagccugagaagagagcugagcggcuacugcagcaacaucaagcugcagguggugaaggacgcccaggcccugcugcacggccuggacuucagcgaggugagcaacgugcagagacugaugagaaagcagaagagagacgacggcgaccugaagagacugagagaccugaaccaggccgugaacaaccugguggagcugaagagcacccagcagaagagcgugcugagagugggcacccugagcagcgacgaccugcuggugcuggccgccgaccuggagaagcugaagagcaagguggugagaaccgagagaccccugagcagcggcaucuacaugggcaaccugagcagccagcagcuggaccagagaaaggcccugcugaacaugaucggcaugaccggcggcaacggcggcagaaacaccaccagcgacggcaucgugagagugugggacgugaagaacgccgagcugcugaacaaccaguucggcaccaugcccagccugacccuggccugccugaccaagcagggccagguggaccugaacgacgccgugcaggcccugaccgaccugggccugaucuacaccgccaaguaccccaacagcagcgaccuggacagacuggcccagagccaccccauccugaacaugaucgacaccaagaagagcagccugaacaucagcggcuacaacuucagccugggcgccgccgugaaggccggcgccugcaugcuggacggcggcaacaugcuggagaccaucaaggugagcccccagaccauggacggcauccugaagagcauccugaaggugaagagaagccugggcauguucaucagcgacacccccggcgagagaaaccccuacgagaacauccuguacaagaucugccugagcggcgacggcuggcccuacaucgccagcagaaccagcaucgugggcagagccugggagaacaccgugguggaccuggagagcgacaacaagccccagaagaccggcaacggcggcagcaacaagagccugcagagcgccggcuucgccgccggccugaccuacagccagcugaugacccugaaggacagcaugcugcagcuggaccccaacgccaagaccuggauggacaucgagggcagacccgaggaccccguggagaucgcccuguaccagcccagcagcggcugcuacauccacuucuucagagagcccaccgaccugaagcaguucaagcaggacgccaaguacagccacggcaucgacgugaccgaccuguucgccgcccagcccggccugaccagcgccgugaucgaggcccugcccagaaacauggugaucaccugccagggcagcgaggacaucagaaagcugcuggagagccagggcagaagagacaucaagcugaucgacaucagccugagcaagguggacagcagaaaguucgagaacgccgugugggaccaguucaaggaccugugccacaugcacaccggcaucgugguggagaagaagaagagaggcggcaaggaggagaucaccccccacugcgcccugauggacugcaucauguucgacgccgccgugagcggcggcguggacgccaaggugcugagagccgugcugcccagagacaugguguucagaaccagcacccccaagguggugcugugaggacuaguuauaagacugacuagcccgaugggccucccaacgggcccuccuccccuccuugcaccgagauuaauaaaaaaaaaaaaaaaaaaaaaaaaaaaaaaaaaaaaaaaaaaaaaaaaaaaaaaaaaaaaaaaaaaaaaaaaaaaaaaaaaaaaaaaaaaaaaaaaaaaa

SEQ ID NO: 20644 - RNA, 1950 nt, Artificial Sequence
  mRNA product Design i-3 (A100) comprising derived and/or modified sequence from LASV(G1180-SLE-2010;Clade IV)__AIT17169__SP-HsALB_NP(2-569) (opt4)
aggagaaagcuuaccaugaagugggugaccuucaucagccugcuguuccuguucagcagcgccuacagcagcgccagcaaggagaucaagagcuuccuguggacccagagccugagaagagagcugagcggcuacugcagcaacaucaagcugcagguggugaaggacgcccaggcccugcugcacggccuggacuucagcgaggugagcaacgugcagagacugaugagaaaggagagaagagacgacaacgaccugaagagacugagagaccugaaccaggccgugaacaaccugguggagcugaagagcacccagcagaagagcauccugagagugggcacccugaccagcgacgaccugcugauccuggccgccgaccuggagaagcugaagagcaaggugaucagaaccgagagaccccugagcgccggcguguacaugggcaaccugagcagccagcagcuggaccagagaagagcccugcugagcaugaucggcaugagcagcggcaaccagagagcccaggccggcagagacggcguggugagagugugggacgugaagaacguggagcugcugaacaaccaguucggcaccaugcccagccugacccuggccugccugaccaagcagggccagguggaccugaacgacgccgugcaggcccugaccgaccugggccugaucuacaccgccaaguaccccaacaccagcgaccuggacagacugacccagagccaccccauccugaacaugaucgacaccaagaagagcagccugaacaucagcggcuacaacuucagccugggcgccgccgugaaggccggcgccugcaugcuggacggcggcaacaugcuggagaccaucaaggugagcccccagaccauggacggcauccugaagagcauccugaaggugaagaaggcccugggcauguucaucagcgacacccccggcgagagaaaccccuacgagaacauccuguacaagaucugccugagcggcgacggcuggcccuacaucgccagcagaaccagcaucaccggcagagccugggagaacaccgugguggaccuggagagcgacggcaagccccagaaggccggcagcaacaacagcaacaagagccugcagagcgugggcuucaccgccggccugaccuacagccagcugaugacccugaaggacgccaugcugcagcuggaccccaacgccaagaccuggauggacaucgagggcagacccgaggaccccguggagaucgcccuguaccagcccagcagcggcugcuacauccacuucuucagagagcccaccgaccugaagcaguucaagcaggacgccaaguacagccacggcaucgacgugaccgaccuguucgccgcccagcccggccugaccagcgccgugaucgacgcccugcccagaaacauggugaucaccugccagggcagcgacgacaucagaaagcugcuggagagccagggcagaaaggacaucaagcugaucgacaucgcccugagcaagaccgacagcagaaaguacgagaacgccgugugggaccaguacaaggaccugugccacaugcacaccggcguggugguggagaagaagaagagaggcggcaaggaggagaucaccccccacugcgcccugauggacugcaucauguucgacgccgccgugagcggcggccugaacaccagcgugcugagagccgugcugcccagagacaugguguucagaaccagcacccccagaguggugcugugaggacuaguuauaagacugacuagcccgaugggccucccaacgggcccuccuccccuccuugcaccgagauuaauaaaaaaaaaaaaaaaaaaaaaaaaaaaaaaaaaaaaaaaaaaaaaaaaaaaaaaaaaaaaaaaaaaaaaaaaaaaaaaaaaaaaaaaaaaaaaaaaaaaa

SEQ ID NO: 20645 - RNA, 1950 nt, Artificial Sequence
  mRNA product Design i-3 (A100) comprising derived and/or modified sequence from LASV(G1442-SLE-2011;Clade IV)__AIT17181__SP-HsALB_NP(2-569) (opt4)
aggagaaagcuuaccaugaagugggugaccuucaucagccugcuguuccuguucagcagcgccuacagcagcgccagcaaggaggugaagagcuuccuguggacccagagccugagaagagagcugagcggcuacugcagcaacaucaagcugcagguggugaaggacgcccaggcccugcugcacggccuggacuucagcgaggugagcaacgugcagagacugaugagaaagcagagaagagacgacaacgaccugaagagacugagagaccugaaccaggccgugaacaaccugguggagcugaagagcacccagcagaagagcgugcugagagugggcacccugaccagcgacgaccugcuggugcuggccgccgaccuggagaagcugaagagcaaggugaucagaaccgagagaccccugagcgccggcguguacaugggcaaccugagcagccagcagcuggaccagagaagagcccugcugaacaugaucggcaugagcggcggcauccagggcaccagaaccggcagagacggcguggugagagugugggacgugaagaacgccgaccugcugaacaaccaguucggcaccaugcccagccugacccuggccugccugaccaagcagggccagguggaccugaacgacguggugcaggcccugaccgaccugggccugaucuacaccgccaaguaccccaacgccagcgaccuggacagacugacccagagccaccccauccugaacaugaucgacaccaagaagagcagccugaacaucagcggcuacaacuucagccugggcgccgccgugaaggccggcgccugcaugcuggacggcggcaacaugcuggagaccaucaaggugagcccccagaccauggacggcauccugaagagcauccugaaggugaagaagacccugggcauguucaucagcgacacccccggcgagagaaaccccuacgagaacauccuguacaagaucugccugagcggcgacggcuggcccuacaucgccagcagaaccagcaucaccggcagagccugggagaacaccgugguggaccuggagagcgacggcaagccccagaaggccggcagcaacaacagcaacaagagccugcagagcgccggcuucgccgccggccugaccuacagccagcugaugacccugaaggacgccaugcugcagcuggaccccaacgccaagaccuggauggacaucgagggcagacccgaggaccccguggagaucgcccuguaccagcccagcagcggcugcuacauccacuucuucagagagcccaccgaccugaagcaguucaagcaggacgccaaguacagccacggcaucgacgugaccgaccuguucgccgcccagcccggccugaccagcgccgugaucgaggcccugcccagaaacauggugaucaccugccagggcagcgacgacaucaagaagcugcuggagagccagggcagaaaggacaucaagcugaucgacaucgcccugagcaagaccgacagcagaaaguacgagaacgccgugugggaccaguacaaggaccugugccacaugcacaccggcguggugguggagaagaagaagagaggcggcaaggaggagaucaccccccacugcgcccugauggacugcaucauguucgacgccgccgugagcggcggccugaacacccuggugcugagagccgugcugcccagagacaugguguucagaaccagcacccccagaguggugcugugaggacuaguuauaagacugacuagcccgaugggccucccaacgggcccuccuccccuccuugcaccgagauuaauaaaaaaaaaaaaaaaaaaaaaaaaaaaaaaaaaaaaaaaaaaaaaaaaaaaaaaaaaaaaaaaaaaaaaaaaaaaaaaaaaaaaaaaaaaaaaaaaaaaa

SEQ ID NO: 20646 - RNA, 1950 nt, Artificial Sequence
  mRNA product Design i-3 (A100) comprising derived and/or modified sequence from LASV(G3010-SLE-2013;Clade IV)__AIT17345__SP-HsALB_NP(2-569) (opt4)
aggagaaagcuuaccaugaagugggugaccuucaucagccugcuguuccuguucagcagcgccuacagcagcgccagcaaggagaucaagagcuuccuguggacccagagccugagaagagagcugagcggcuacugcagcaacaucaagcugcagguggugaaggacgcccaggcccugcugcacggccuggacuucagcgaggugagcaacgugcagagacugaugagaaaggagagaagagacgacaacgaccugaagagacugagagaccugaaccaggccgugaacaaccugguggagcugaagagcacccagcagaagagcauccugagagugggcacccugaccagcgacgaccugcugauccuggccgccgaccuggagaagcugaagagcaaggugaccagaaccgagagaccccugagcgccggcguguacaugggcaaccugagcagccagcagcuggaccagagaagagcccugcugagcaugaucggcaugagcagcggcgugcagggcgccagagccggcagagacggcguggugagagugugggacgugaagaacgccgagcugcugaacaaccaguucggcaccaugcccagccugacccuggccugccugaccaagcagggccagguggaccugaacgacguggugcaggcccugaccgaccugggccugaucuacaccgccaaguaccccaacaccagcgaccuggacagacugacccagagccaccccauccugaacaugaucgacaccaagaagagcagccugaacaucagcggcuacaacuucagccugggcgccgccgugaaggccggcgccugcaugcuggacggcggcaacaugcuggagaccaucaaggugagcccccagaccauggacggcauccugaagagcauccugaaggugaagaaggcccugggcauguucaucagcgagacccccggcgagagaaaccccuacgagaacauccuguacaagaucugccugagcggcgacggcuggcccuacaucgccagcagaaccagcaucaccggcagagccugggagaacaccgugguggaccuggagagcgacggcaagccccagaaggccggcagcaacaacagcaacaagagccugcagagcgccggcuucaccgccggccugaccuacagccagcugaugacccugaaggacgccaugcugcagcuggaccccaacgccaagaccuggauggacaucgagggcagacccgaggaccccguggagguggcccuguaccagcccagcagcggcugcuacauccacuucuucagagagcccaccgaccugaagcaguucaagcaggacgccaaguacagccacggcaucgacgugaccgaccuguucgccgcccagcccggccugaccagcgccgugaucgacgcccugcccagaaacauggugaucaccugccagggcagcgacgacaucaagaagcugcuggagagccagggcagaaaggacaucaagcugaucgacaucgcccugagcaagaccgacagcagaaaguacgagaacgccgugugggaccaguacaaggaccugugccacaugcacaccggcguggugguggagaagaagaagagaggcggcaaggaggagaucaccccccacugcgcccugauggacugcaucauguucgacgccgccgugagcggcggccugaacaccagcgugcugagagccgugcugcccagagacaugguguucagaaccagcacccccagaguggugcugugaggacuaguuauaagacugacuagcccgaugggccucccaacgggcccuccuccccuccuugcaccgagauuaauaaaaaaaaaaaaaaaaaaaaaaaaaaaaaaaaaaaaaaaaaaaaaaaaaaaaaaaaaaaaaaaaaaaaaaaaaaaaaaaaaaaaaaaaaaaaaaaaaaaa

SEQ ID NO: 20647 - RNA, 1950 nt, Artificial Sequence
  mRNA product Design i-3 (A100) comprising derived and/or modified sequence from LASV(G502-SLE-2009;Clade IV)__AIT17127__SP-HsALB_NP(2-569) (opt4)
aggagaaagcuuaccaugaagugggugaccuucaucagccugcuguuccuguucagcagcgccuacagcagcgccagcaaggagaucaagagcuuccuguggacccagagccugagaagagagcugagcggcuacugcagcaacaucaagcugcagguggugaaggacgcccaggcccugcugcacggccuggacuucagcgaggugagcaacgugcagagacugaugagaaaggagagaagagacgacaacgaccugaagagacugagagaccugaaccaggccgugaacaaccugguggagcugaagagcacccagcagaagagcauccugagagugggcacccugaccagcgacgaccugcugauccuggccgccgaccuggagaagcugaagagcaaggugaucagaaccgagagaccccugagcgccggcguguacaugggcaaccugagcagccagcagcuggaccagagaagagcccugcugagcaugaucggcaugagcggcggcaaccagggcgugagagccggcaaggacggcguggugagagugugggacgugaagaacgccgagcugcugaacaaccaguucggcaccaugcccagccugacccuggccugccugaccaagcagggccagguggaccugaacgacgccgugcaggcccugaccgaccugggccugaucuacaccgccaaguaccccaacaccagcgaccuggacagacugacccagagccaccccauccugaacaugaucgacaccaagaagagcagccugaacaucagcggcuacaacuucagccugggcgccgccgugaaggccggcgccugcaugcuggacggcggcaacaugcuggagaccaucaaggugagcccccagaccauggacggcauccugaagagcauccugaaggugaagaaggcccugggcauguucaucagcgacacccccggcgagagaaaccccuacgagaacauccuguacaagaucugccugagcggcgacggcuggcccuacaucgccagcagaaccagcaucaccggcagagccugggagaacaccgugguggaccuggagagcgacggcaagccccagaaggccggcagcaacaacagcaacaagagccugcagagcgccggcuucaccgccggccugaccuacagccagcugaugacccugaaggacgccaugcugcagcuggaccccaacaccaagaccuggauggacaucgagggcagacccgaggaccccguggagaucgcccuguaccagcccagcagcggcugcuacauccacuucuucagagagcccaccgaccugaagcaguucaagcaggacgccaaguacagccacggcaucgacgugaccgaccuguucgccgcccagcccggccugaccagcgccgugaucgacgcccugcccagaaacauggugaucaccugccagggcagcgacgacaucagaaagcugcuggagagccagggcagaaaggacaucaagcugaucgacaucgcccugaacaagaccgacagcagaaaguacgagaacgccgugugggaccaguacaaggaccugugccacaugcacaccggcguggugguggagaagaagaagagaggcggcaaggaggagaucaccccccacugcgcccugauggacugcaucauguucgacgccgccgugagcggcggccugaacaccagcgugcugagagccgugcugcccagagacaugguguucagaaccagcacccccagaguggugcugugaggacuaguuauaagacugacuagcccgaugggccucccaacgggcccuccuccccuccuugcaccgagauuaauaaaaaaaaaaaaaaaaaaaaaaaaaaaaaaaaaaaaaaaaaaaaaaaaaaaaaaaaaaaaaaaaaaaaaaaaaaaaaaaaaaaaaaaaaaaaaaaaaaaa

SEQ ID NO: 20648 - RNA, 1950 nt, Artificial Sequence
  mRNA product Design i-3 (A100) comprising derived and/or modified sequence from LASV(G733-SLE-2010;Clade IV)__AIT17155__SP-HsALB_NP(2-569) (opt4)
aggagaaagcuuaccaugaagugggugaccuucaucagccugcuguuccuguucagcagcgccuacagcagcgccagcaaggagaucaagagcuuccuguggacccagagccugagaagagagcugagcggcuacugcagcaacaucaagcugcagguggugaaggacgcccaggcccugcugcacggccuggacuucagcgaggugagcaacgugcagagacugaugagaaaggagagaagagacgacaacgaccugaagagacugagagaccugaaccaggccgugaacaaccugguggagcugaagagcacccagcagaagagcgugcugagagugggcacccugaccagcgacgagcugcuggugcuggccgccgaccuggagaagcugaagagcaaggugaucagaaccgagagaccccugagcgccggcguguacaugggcaaccugagcagccagcagcuggaccagagaagagcccugcugagcaugaucggcaugagcggcggcaaccagggcgccagaaccggcagagacggcguggugagagugugggacgugaagaacgccgagcugcugaacaaccaguucggcaccaugcccagccugacccuggccugccugaccaagcagggccagguggaccugaacgacgccgugcaggcccugaccgaccugggccugaucuacaccgccaaguaccccaacaccagcgaccuggacagacugacccagagccaccccauccugaacaugaucgacaccaagaagagcagccugaacaucagcggcuacaacuucagccugggcgccgccgugaaggccggcgccugcaugcuggacggcggcaacaugcuggagaccaucaaggugagcccccagaccauggacggcauccugaagagcauccugaaggugaagaaggcccugggcauguucaucagcgacacccccggcgagagaaaccccuacgagaacauccuguacaagaucugccugagcggcgacggcuggcccuacaucgccagcagaaccagcaucaccggcagagccugggagaacaccgugguggaccuggagagcgacggcaagccccagaaggccggcagcaacaacagcaacaagagccugcagagcgccggcuucaccgccggccugaccuacagccagcugaugacccugaaggacgccaugcugcagcuggaccccaacgccaagaccuggauggacaucgagggcagacccgaggaccccguggagaucgcccuguaccagcccagcagcggcugcuacauccacuucuucagagagcccaccgaccugaagcaguucaagcaggacgccaaguacagccacggcaucgacgugaccgaccuguucgccgcccagcccggccugaccagcgccgugaucgacgcccugcccagaaacauggugaucaccugccagggcagcgacgacaucagaaagcugcuggagagccagggcagaaaggacaucaagcugaucgacaucgcccugagcaagaucgacagcagaaaguacgagaacgccgugugggaccaguacaaggaccugugccacaugcacaccggcguggugguggagaagaagaagagaggcggcaaggaggagaucaccccccacugcgcccugauggacugcaucauguucgacgccgccgugagcggcggccugaacagccuggugcugagagccgugcugcccagagacaugguguucagaaccagcacccccagaguggugcugugaggacuaguuauaagacugacuagcccgaugggccucccaacgggcccuccuccccuccuugcaccgagauuaauaaaaaaaaaaaaaaaaaaaaaaaaaaaaaaaaaaaaaaaaaaaaaaaaaaaaaaaaaaaaaaaaaaaaaaaaaaaaaaaaaaaaaaaaaaaaaaaaaaaa

SEQ ID NO: 20649 - RNA, 1950 nt, Artificial Sequence
  mRNA product Design i-3 (A100) comprising derived and/or modified sequence from MOPV/LASV reassortant(IGS-1;Clade IV)__AFY05578__SP-HsALB_NP(2-569) (opt4)
aggagaaagcuuaccaugaagugggugaccuucaucagccugcuguuccuguucagcagcgccuacagcagcgccagcaaggagaucaagagcuuccuguggacccagagccugagaagagagcugagcggcuacugcagcaacaucaagcugcagguggugaaggacgcccaggcccugcugcacggccuggacuucagcgaggugagcaacgugcagagacugaugagaaaggagagaagagacgacaacgaccugaagagacugagagaccugaaccaggccgugaacaaccugguggagcugaagagcacccagcagaagagcauccugagagugggcacccugaccagcgacgaccugcugauccuggccgccgaccuggagaagcugagaagcaaggugaucagaaccgagagaccccugagcgccggcguguacaugggcaaccugagcagccagcagcuggaccagagaagagcccugcugaacaugaucggcaugagcggcggcaaccagggcgccagagccggcagagacggcguggugagagugugggacgugaagaacgccgagcugcugagcaaccaguucggcaccaugcccagccugacccuggccugccugaccaagcagggccagguggaccugaacgacgccgugcaggcccugaccgaccugggccugaucuacaccgccaaguaccccaacaccagcgaccuggacagacugacccagagccaccccauccugaacaugaucgacaccaagaagagcagccugaacaucagcggcuacaacuucagccugggcgccgccgugaaggccggcgccugcaugcuggacggcggcaacaugcuggagaccaucaaggugagcccccagaccauggacggcauccugaagagcauccugaaggugaagaaggcccugggcauguucaucagcgacacccccggcgagagaaaccccuacgagaacauccuguacaagaucugccugagcggcgacggcuggcccuacaucgccagcagaaccagcaucaccggcagagccugggagaacaccgugguggaccuggagagcgacggcaagccccagaaggccgacagcaacaacagcagcaagagccugcagagcgccggcuucaccgccggccugaccuacagccagcugaugacccugaaggacgccaugcugcagcuggaccccaacgccaagaccuggauggacaucgagggcagacccgaggaccccguggagaucgcccuguaccagcccagcagcggcugcuacauccacuucuucagagagcccaccgaccugaagcaguucaagcaggacgccaaguacagccacggcaucgacgugaccgaccuguucgccacccagcccggccugaccagcgccgugaucgacgcccugcccagaaacauggugaucaccugccagggcagcgacgacaucagaaagcugcuggagagccagggcagaaaggacaucaagcugaucgacaucgaccugagcaagaccgacagcagaaaguacgagaacgccgugugggaccaguacaaggaccugugccacaugcacaccggcguggugguggagaagaagaagagaggcggcaaggaggagaucaccccccacugcgcccugauggacugcaucauguucgacgccgccgugagcggcggccugaacaccagcgugcugagagccgugcugcccagagacaugguguucagaaccagcacccccagaguggugcugugaggacuaguuauaagacugacuagcccgaugggccucccaacgggcccuccuccccuccuugcaccgagauuaauaaaaaaaaaaaaaaaaaaaaaaaaaaaaaaaaaaaaaaaaaaaaaaaaaaaaaaaaaaaaaaaaaaaaaaaaaaaaaaaaaaaaaaaaaaaaaaaaaaaa

SEQ ID NO: 20650 - RNA, 1950 nt, Artificial Sequence
  mRNA product Design i-3 (A100) comprising derived and/or modified sequence from LASV(LM765-SLE-2012;Clade IV)__AIT17815__SP-HsALB_NP(2-569) (opt4)
aggagaaagcuuaccaugaagugggugaccuucaucagccugcuguuccuguucagcagcgccuacagcagcgccagcaaggagaucaagagcuuccuguggacccagagccugagaagagagcugagcggcuacugcagcaacaucaagcugcagguggugaaggacgcccaggcccugcugcacggccuggacuucagcgaggugagcaacgugcagagacugaugagaaaggagagaagagacgacaacgaccugaagagacugagagaccugaaccaggccgugaacaaccugguggagcugaagagcacccagcagaagagcauccugagagugggcacccugaccagcgacgaccugcugauccuggccgccgaccuggagaagcugaagagcaaggugaccagaaccgagagaccccugagcgccggcguguacaugggcaaccugagcagccagcagcuggaccagagaagagcccugcuggacaugaucggcaugagcggcagcaaccagggcgccagagccggcagagacggcguggugagagugugggacgugaagaacgccgagcugcugaacaaccaguucggcaccaugcccagccugacccuggccugccugaccaagcagggccagguggaccugaacgacgccgugcaggcccugaccgaccugggccugaucuacaccgccaaguaccccaacaccagcgaccuggacagacugacccagagccaccccauccugaacaugaucgacaccaagaagagcagccugaacaucagcggcuacaacuucagccugggcgccgccgugaaggccggcgccugcaugcuggacggcggcaacaugcuggagaccaucaaggugagcccccagaccauggacggcauccugaagagcauccugaaggugaagaaggcccugggcauguucaucagcgacgcccccggcgagagaaaccccuacgagaacauccuguacaagaucugccugagcggcgacggcuggcccuacaucgccagcagaaccagcaucaccggcagagccugggagaacaccgugguggaccuggagagcgacggcaagccccagaaggccggcagcaacggcagcaacaagagccugcagagcgccggcuucaccgccggccugaccuacagccagcugaugacccugaaggacgccaugcugcagcuggaccccaacgccaagaccuggauggacaucgagggcagacccgaggaccccguggagaucgcccuguaccagcccagcagcggcugcuacauccacuucuucagagagcccaccgaccugaagcaguucaagcaggacgccaaguacagccacggcaucgacgugaccgaccuguucgccgcccagcccggccugaccagcgccgugaucgacgcccugcccagaaacauggugaucaccugccagggcagcgacgacaucagaaagcuguucgagagccagggcagaaaggacaucaagcugaucgacaucgcccugagcaagaccgacagcagaaaguacgagaacgccgugugggaccaguacaaggaccugugccacaugcacaccggcaucgugguggagaagaagaagagaggcggcaaggaggagaucaccccccacugcgcccugauggacugcaucauguucgacgccgccgugagcggcggccugaacaccagcgugcugagagccgugcugcccagagacaugguguucagaaccagcacccccagaguggugcugugaggacuaguuauaagacugacuagcccgaugggccucccaacgggcccuccuccccuccuugcaccgagauuaauaaaaaaaaaaaaaaaaaaaaaaaaaaaaaaaaaaaaaaaaaaaaaaaaaaaaaaaaaaaaaaaaaaaaaaaaaaaaaaaaaaaaaaaaaaaaaaaaaaaa

SEQ ID NO: 20651 - RNA, 1950 nt, Artificial Sequence
  mRNA product Design i-3 (A100) comprising derived and/or modified sequence from LASV(LM776-SLE-2012;Clade IV)__AIT17825__SP-HsALB_NP(2-569) (opt4)
aggagaaagcuuaccaugaagugggugaccuucaucagccugcuguuccuguucagcagcgccuacagcagcgccagcaaggagaucaagagcuuccuguggacccagagccugagaagagagcugagcagcuacugcagcaacaucaagcugcagguggugaaggacgcccaggcccugcugcacggccuggacuucagcgaggugagcaacgugcagagacugaugagaaaggagagaagagacgacaacgaccugaagagacugagagaccugaaccaggccgugaacaaccugguggagcugaagagcacccagcagaagagcauccugagagugggcacccugaccagcgacgaccugcugauccuggccgccgaccuggagaagcugaagagcaaggugaccagaaccgagagaccccugagcgccggcguguacaugggcaaccugagcagccagcagcuggaccagagaagagcccugcugagcaugaucggcaugagcggcagcaaccagggcgccagagccggcagagacggcguggugagagugugggacgugaagaacgccgagcugcugaacaaccaguucggcaccaugcccagccugacccuggccugccugaccaagcagggccagguggaccugaacgacgccgugcaggcccugaccgaccugggccugaucuacaccgccaaguaccccaacaccagcgaccuggacagacugacccagagccaccccauccugaacaugaucgacaccaagaagagcagccugaacaucagcggcuacaacuucagccugggcgccgccgugaaggccggcgccugcaugcuggacggcggcaacaugcuggagaccaucaaggugagcccccagaccauggacggcauccugaagagcauccugaaggugaagaaggcccugggcauguucaucagcgacacccccggcgagagaaaccccuacgagaacauccuguacaagaucugccugagcggcgacggcuggcccuacaucgccagcagaaccagcaucaccggcagagccugggagaacaccgugguggaccuggagagcgacggcaagccccagaaggccggcagcaacaacagcaacaagagccugcagagcgccggcuucaccgccggccugaccuacagccagcugaugacccugaaggacgccaugcugcagcuggaccccaacgccaagaccuggauggacaucgagggcagacccgaggaccccguggagguggcccuguaccagcccagcagcggcugcuacauccacuucuucagagagcccaccgaccugaagcaguucaagcaggacgccaaguacagccacggcaucgacgugaccgaccuguucgccgcccagcccggccugaccagcgccgugaucgacgcccugcccagaaacauggugaucaccugccagggcagcgacgacaucagaaagcugcuggagagccagggcagaaaggacaucaagcugaucgacaucgcccugagcaagaccgacagcagaaaguacgagaacgccgugugggaccaguacaaggaccugugccacaugcacaccggcguggugguggagaagaagaagagaggcggcaaggaggagaucaccccccacugcgcccugauggacugcaucauguucgacgccgccgugagcggcggccugaacaccagcgugcugagagccgugcugcccagagacaugguguucagaaccagcacccccagaguggugcugugaggacuaguuauaagacugacuagcccgaugggccucccaacgggcccuccuccccuccuugcaccgagauuaauaaaaaaaaaaaaaaaaaaaaaaaaaaaaaaaaaaaaaaaaaaaaaaaaaaaaaaaaaaaaaaaaaaaaaaaaaaaaaaaaaaaaaaaaaaaaaaaaaaaa

SEQ ID NO: 20652 - RNA, 1950 nt, Artificial Sequence
  mRNA product Design i-3 (A100) comprising derived and/or modified sequence from LASV(Mad39;Clade IV)__ANH09723__SP-HsALB_NP(2-569) (opt4)
aggagaaagcuuaccaugaagugggugaccuucaucagccugcuguuccuguucagcagcgccuacagcagcgccagcaaggagaucaagagcuuccuguggacccagagccugagaagagagcugagcggcuacugcagcaacaucaagcugcagguggugaaggacgcccaggcccugcugcacggccuggacuucagcgaggugagcaacgugcagagacugaugagaaagcagagaagagacgacaacgaccugaagagacugagagaccugaaccaggccgugaacaaccugguggagcugaagagcacccagcagaagagcgugcugagagugggcacccugaccagcgacgaccugcugacccuggccgccgaccuggagaagcugaagagcaaggugaccagaaccgagagaccccugaccgccggcguguacaugggcaaccugagcagccagcagcuggaccagagaagagcccugcugaacaugaucggcaugagcggcggcaaccagggcgccagaaccggcagagacggcguggugagagugugggacgugaagaacgccgagcugcugaacaaccaguucggcaccaugcccagccugacccuggccugccugaccaagcagggccagguggaccugaacgacguggugcaggcccugaccgaccugggccugaucuacaccgccaaguaccccaacaccagcgaccuggacagacugacccagagccaccccauccugaacaugaucgacaccaacaagagcagccugaacaucagcggcuacaacuucagccugggcgccgccgugaaggccggcgccugcaugcuggacggcggcaacaugcuggagaccaucaaggugagcccccagaccauggacggcauccugaagagcauccugaaggugaagaagagccugggcauguucaucagcgacacccccggcgagagaaaccccuacgagaacauccuguacaagaucugccugagcggcgacggcuggcccuacaucgccagcagaaccagcaucaccggcagagccugggagaacaccgugguggaccuggagagcggcggcaagccccagaaggccggcagcaacaacagcaacaagagccugcagagcgccggcuucgccgccggccugaccuacagccagcugaugacccugaaggacgccaugcugcagcuggaccccaacgccaagaccuggauggacaucgagggcagacccgaggaccccguggagaucgcccuguaccagcccaucagcggcugcuacauccacuucuucagagagcccaccgaccugaagcaguucaagcaggacgccaaguacagccacggcaucgacgugaccgaccuguucgccgcccagcccggccugaccagcgccgugaucgaggcccugcccagaaacauggugaucaccugccagggcagcgacgacaucagaaagcuguucgagagccagggcagaaaggacaucaagcugaucgacaucgcccugagcaagaccgacagcagaaaguacgagaacgccgugugggaccaguacaaggaccugugccacaugcacaccggcguggugguggagaagaagaagaagggcggcaaggaggagaucaccccccacugcgcccugauggacugcaucauguucgacgccgccgugagcggcggccugaacacccuggugcugagagccgugcugcccagagacaugguguucagaaccagcacccccaagguggugcugugaggacuaguuauaagacugacuagcccgaugggccucccaacgggcccuccuccccuccuugcaccgagauuaauaaaaaaaaaaaaaaaaaaaaaaaaaaaaaaaaaaaaaaaaaaaaaaaaaaaaaaaaaaaaaaaaaaaaaaaaaaaaaaaaaaaaaaaaaaaaaaaaaaaa

SEQ ID NO: 20653 - RNA, 1950 nt, Artificial Sequence
  mRNA product Design i-3 (A100) comprising derived and/or modified sequence from LASV(Z0947-SLE-2011;Clade IV)__AIT17841__SP-HsALB_NP(2-569) (opt4)
aggagaaagcuuaccaugaagugggugaccuucaucagccugcuguuccuguucagcagcgccuacagcagcgccagcaaggagaucaagagcuuccuguggacccagagccugagaagagagcugagcggcuacugcagcaacaucaagcugcagguggugaaggacgcccaggcccugcugcacggccuggacuucagcgaggugagcaacgugcagagacugaugagaaaggagagaagagacgacaacgaccugaagagacugagagaccugaaccaggccgugaacaaccugguggagcugaagagcacccagcagaagagcauccugagagugggcacccugaccagcgacgaccugcugauccuggccgccgaccuggagaagcugaagagcaaggugaccagaaccgagagaccccugagcgccggcguguacaugggcaaccugagcagccagcagcuggaccagagaagagcccugcugaacaugaucggcaugagcggcagcaaccagggcgccagaaccggcagagacggcguggugagagugugggacgugaagaacgccgagcugcugaacaaccaguucggcaccaugcccagccugacccuggccugccugaccaagcagggccagguggaccugaacgacgccgugcaggcccugaccgaccugggccugaucuacaccgccaaguaccccaacaccagcgaccuggacagacugacccagagccaccccauccugaacaugaucgacaccaagaagagcagccugaacaucagcggcuacaacuucagccugggcgccgccgugaaggccggcgccugcaugcuggacggcggcaacaugcuggagaccaucaaggugagcccccagaccauggacggcauccugaagagcauccugaaggugaagaaggcccugggcauguucaucagcgacgcccccggcgagagaaaccccuacgagaacauccuguacaagaucugccugagcggcgacggcuggcccuacaucgccagcagaaccagcaucaccggcagagccugggagaacaccgugguggaccuggagagcgacggcaagccccagaaggccggcagcaacggcagcaacaagagccugcagagcgccggcuucaccgccggccugaccuacagccagcugaugacccugaaggacgccaugcugcagcuggaccccaacgccaagaccuggauggacaucgagggcagacccgaggaccccguggagaucgcccuguaccagcccagcagcggcugcuacauccacuucuucagagagcccaccgaccugaagcaguucaagcaggacgccaaguacagccacggcaucgacgugaccgaccuguucgccgcccagcccggccugaccagcgccgugaucgacgcccugcccagaaacauggugaucaccugccagggcagcgacgacaucagaaagcuguucgagagccagggcagaaaggacaucaagcugaucgacaucgcccugagcaagaccgacagcagaaaguacgagaacgccgugugggaccaguacaaggaccugugccacaugcacaccggcaucgugguggagaagaagaagagaggcggcaaggaggagaucaccccccacugcgcccugauggacugcaucauguucgacgccgccgugagcggcggccugaacaccagcgugcugagagccgugcugcccagagacaugguguucagaaccagcacccccagaguggugcugugaggacuaguuauaagacugacuagcccgaugggccucccaacgggcccuccuccccuccuugcaccgagauuaauaaaaaaaaaaaaaaaaaaaaaaaaaaaaaaaaaaaaaaaaaaaaaaaaaaaaaaaaaaaaaaaaaaaaaaaaaaaaaaaaaaaaaaaaaaaaaaaaaaaa

SEQ ID NO: 20654 - RNA, 1950 nt, Artificial Sequence
  mRNA product Design i-3 (A100) comprising derived and/or modified sequence from LASV(Josiah;Clade IV)__NP_694869__SP-HsALB_NP(2-569) (opt5)
aggagaaagcuuaccaugaagugggugaccuucaucagccugcucuuucuguucuccucugccuacagcagcgccuccaaggagaucaaaucuuuccuguggacccagagccucagacgggaacuguccggcuacugcucuaacauuaagcugcaaguggucaaagacgcucaggcccugcuccacgggcuggauuuuagcgagguuuccaaugugcagcgccuuaugagaaaggaacggcgcgacgauaacgaccugaaaagacuccgggaucugaaucaggcggugaacaaucuggucgagcucaagucuacacaacaaaagagcauccugcgcgugggaacgcuuaccuccgacgaucugcucauucuggcugccgaccuugaaaaacuuaagagcaaaguuaucagaacagagcggccccucucugccggcguguauauggggaaccuguccagccagcagcuggaucagcgcagagcucuccugaauaugauuggaaugucuggcgggaaccagggagcccgggcuggccgcgacggcgucgugagaguuugggaugugaagaaugccgagcuucugaacaaucaguucgggaccaugccuucccucacacuggcgugucuuaccaaacagggacaagucgaccugaacgaugccgugcaggcucucacagaccugggccugaucuacaccgccaaguauccgaauacgagcgaccucgaucggcugacccagucucaucccauccuuaacaugauugacacaaagaaauccagccugaauaucuccggguacaacuuuucucucggagcugccgugaaggcgggcgccugcaugcuggaugggggaaacaugcuugaaaccauuaaagucagcccucaaacaauggacggcauccugaaguccauucucaaaguuaagaaagcucugggcauguucaucagcgauacccccggggagcgcaauccuuaugaaaacauucuguacaagaucugucucucuggagacggcuggcccuauaucgccuccagaacgagcauuacagggcgggcuugggagaauaccgugguggaucuggagucugacggaaagccucagaaagccgauagcaacaauuccucuaagagccuucaguccgccggcuuuacagcugggcugaccuacagccagcucaugacccugaaagacgcgaugcugcaacuugauccgaacgccaagacauggauggacaucgaaggaagacccgaggacccugucgaaauugcucucuaccagcccucuuccggcugcuauauccacuucuuucgcgagccuacggaucugaaacaguucaagcaggacgccaaguacagccauggcauugaugugaccgaccuguuugccacacaacccgggcucaccucugcuguuaucgaugcccugccgcggaauauggugaucacaugucagggauccgacgauauuagaaaacuucuggaaagccagggccgcaaggacaucaaacucauugauaucgcgcuguccaagaccgacucucggaaauaugagaacgcugucugggaucaguacaaggaccugugccacaugcauacgggggugguuguggagaagaaaaagagaggaggcaaagaagagauuacaccucacugugcccuuauggauugcaucauguucgacgccgcugucagcgggggccucaauaccuccgugcugcgcgccguccugccccgggacaugguguuuagaaccucuacaccucgcguugugcucugaggacuaguuauaagacugacuagcccgaugggccucccaacgggcccuccuccccuccuugcaccgagauuaauaaaaaaaaaaaaaaaaaaaaaaaaaaaaaaaaaaaaaaaaaaaaaaaaaaaaaaaaaaaaaaaaaaaaaaaaaaaaaaaaaaaaaaaaaaaaaaaaaaaa

SEQ ID NO: 20655 - RNA, 1950 nt, Artificial Sequence
  mRNA product Design i-3 (A100) comprising derived and/or modified sequence from LASV(LP;Clade I)__AAF86702__SP-HsALB_NP(2-569) (opt5)
aggagaaagcuuaccaugaagugggugaccuucaucagccugcucuuucuguucuccucugccuacagcagcaacuccaaggagaucaaaucuuuccuguggacccagagccucagacgggaacuguccggcuacugcucuaauauuaagcuccaaguggucaaagacgcccaggcucugcuccacgggcuggauuuuagcgagguuuccaacgugcagcgccuuaugagaaagcagaaacgggacgaugccgaccugaagcgccucagagaucugaaucaagcggugaacaaucuggucgaacucaagucuacacagcagaaaaacgugcugcggguuggaacgcuuagcuccgacgaucugaucacccucgcugccgaccuggagaaacuuaaaagcaaggugauucgcacagaaagaccccugucuuccggcgucuauauggggaaucucagcucucagcaacuggaucagcggcgcgcccugcucuccaugaucggaaugagcggcgggccucagggaaacagaaccggcggcgacggggugguucgggugugggaugucaaaaaugcugagcugcuuaacaaucaguucggaacaaugccgucucugacccucgccugucugacaaagcaaggccagguggaccuuaacgaugcugugcaggcccugaccgaccucgggcugauuuacacggcgaaguaucccaauuccagcgaccuggauaugcucacccaaucccauccuauccugggaauggucgacacaaagaagucuagccuuaacaucuccggcuacaauuuuagccugggggccgcuguuaaagccggagcuugcaugcucgauggcggcaacaugcuggagaccauuaaggugucuccccagacaauggacgggauccuuaaauccauucugaaggugaaacgcagccucggaauguucaucucugauaccccuggcgaaagaaaccccuaugagaauauucuguacaagaucugucugagcggggaaggauggccuuauauugccucccggacgucuaucacaggccgcgcgugggagaacacccucgucgaccuggagagcgauaauaagccgcccaaacuuaacuccgccgggagcaauaagucucugcaggcugccggacucaacgcuggccugacauacucccagcugaugacccuuaaagacugcaugcuccaacuggauccuagcucuaagaccuggaucgacauugaaggcagacccgaggauccuguggaaaucgcccuguuucagcccuccagcggguguuacauucacuucuuucgggagccgacagaccucaaacaguucaagcaggacgccaaguauucccauggaaucgauguuacggaccuguuuucuacccaaccuggccuuacaagcgcugugauugaagcgcugcccagaaauaugguccuuaccugccagggguccgaugacaucaaaaagcugcuggagucucagggacgccgggauaucaaacuuauugacaucagccucuccaaggccgauagcagaaaauucgagaacgcugugugggaccaguacaaggaucugugucacaugcauacaggcguuguggucgaaaagaaaaagcgcgggggcaaagaggaaauuaccccucacugcgcccugcucgacuguaucauguuugaugccgcuacgacaggaucucugaauauuaccacccuucgggccgugcugcccagagacauggucuuccgcacauccacccccaaggugguucucugaggacuaguuauaagacugacuagcccgaugggccucccaacgggcccuccuccccuccuugcaccgagauuaauaaaaaaaaaaaaaaaaaaaaaaaaaaaaaaaaaaaaaaaaaaaaaaaaaaaaaaaaaaaaaaaaaaaaaaaaaaaaaaaaaaaaaaaaaaaaaaaaaaaa

SEQ ID NO: 20656 - RNA, 1950 nt, Artificial Sequence
  mRNA product Design i-3 (A100) comprising derived and/or modified sequence from LASV(803213;Clade II)__AAF86704__SP-HsALB_NP(2-569) (opt5)
aggagaaagcuuaccaugaagugggugaccuucaucagccugcucuuucuguucuccucugccuacagcagcgccuccaaggaggugaaaucuuuccuguggacccagagccucagacgggaacuguccggcuacugcucuaacaucaaacuucaagucguuaaggacgcucaggcccugcuccacgggcuggauuuuagcgaggugaauaacgugcagcgccuuaugagaaagcagaaacgggacgauggagaccugaagcgccucagagaucugaaucaagcggucaacaaucugguggaacucaaguccacacagcagaaaucuauucugcggguuggcacgcuuaccagcgacgaucugcucacacuggcugccgaccuugagaagcugaaauccaaggugauccgcaccgaaagaccccucagcucuggggucuauaugggaaaccuguccacacagcaacuggagcagcggcgcgcccuccugaauaugauuggcauggugggaggagcucagggcacccagccuggcagagaugggguugugcgggucugggacgugaaaaacccggaucuucugaauaaccaauucggaacaaugcccagccucacccuggccugucuuacgaagcagggccagguggaccugaaugaugcuguccucgcccugaccgaccuggggcucaucuacacagcgaaguauccuaacucuuccgaccuggaucgccuuagccaaucucaucccauucugaauaugguugacaccaaaaaguccagccucaacaucuccggauacaauuuuucucugggcgccgcugugaaagccggggcuugcaugcuugauggaggcaacaugcuggagacaaucaaggugaccccucagacgauggacggcauucucaaaagcauccugaaggucaaaagaucccuggggauguucgugagcgauacacccggagaacggaacccuuaugagaauauucucuacaagaucugucugucuggcgacggguggccguauauugccucccgcaccagcaucguugggagagcgugggaaaacacaaccguggaucuugagucugacggcaagccccagaaagucgggaccgccggaagcaauaagucccugcagucugcuggcuuuccuacaggccucacguacagccaacugaugacccugaaagauuccaugaugcagcuugaccccagcgccaagacauggauugauaucgaggggcggccugaagaccccguggagaucgcucucuaccagccgaugucuggaugcuauauucacuucuuuagagaaccuaccgaccugaaacaguucaagcaagaugccaaguacucccauggcaucgacguugccgaucuguuucccgcucagccugggcucacaagcgcggugauugaggcccugccccgcaacaugguccuuaccugucagggaucugacgauaucaaaaagcugcucgacucccagggccggagagauauuaaacugaucgacaucagccuguccaagguggauucucgcaaauucgaaaaugcugucugggaccaaugcaaggaucuuugucacaugcauacgggggugguuguggagaagaaaaagcggggcggaaaagaggaaauuacaccccacugcgcccucauggacuguaucauguuugaugccgcugucagcggcgggcugaacauuccugugcugagagccguucucccgcgcgacaugguguuccggaccuccucucccaaggucgugcugugaggacuaguuauaagacugacuagcccgaugggccucccaacgggcccuccuccccuccuugcaccgagauuaauaaaaaaaaaaaaaaaaaaaaaaaaaaaaaaaaaaaaaaaaaaaaaaaaaaaaaaaaaaaaaaaaaaaaaaaaaaaaaaaaaaaaaaaaaaaaaaaaaaaa

SEQ ID NO: 20657 - RNA, 1953 nt, Artificial Sequence
  mRNA product Design i-3 (A100) comprising derived and/or modified sequence from LASV(GA391;Clade III)__CAA36646__SP-HsALB_NP(2-570) (opt5)
aggagaaagcuuaccaugaagugggugaccuucaucagccugcucuuucuguucuccucugccuacagcagcgccuccaaggaggugagaucuuuccuguggacccagagccuccggcgcgaacuguccggcuacugcucuaacaucaaacuucaagucguuaaggacgcucaggcccugcuccacgggcuggauuuuagcgagguguccaaugugcagagacuuaugcggaaacagaagcgcgacgauggagaccugaaaagacuccgggaucugaaccaagcggucaauaaccugguggaacucaagucuacacagcagaaaagcguucugcgcgugggcacgcuuuccagcgacgaucugcucauucuggcugccgaccuugagaaacugaagucuaaagucaccagaacagaacggccccucuccagcgggguguauaugggaaaucugucuucccagcaacuggaucagcgcagagcccuccugaacaugaucggcaugaccgggguuagcggaggcggcaagggggcuucugacggaauugugcgggucugggaugugaaaaaugccgagcuucugaacaaucaguucggcacaaugccuucccucacccuggcuugucuuacaaagcaggggcaaguggaccugaacgaugccguccaggcgcucaccgaccugggacugaucuacacggccaaguauccgaauagcuccgaccucgaucgccugucucagagccaucccauucuuaacaugaucgacaccaaaaaguccagccugaauaucucuggcuacaacuuuucccucggggcugccguuaaagcuggagccugcaugcuggauggcggcaauaugcuugagacaauuaaggugagcccucaaaccauggacgggauccugaaaucuauucucaaggugaaaaagagccugggaauguucgucuccgauacacccggcgaaagaaacccuuaugagaacauccuguacaagauuugucucucuggggacggauggcccuauaucgcgagccggaccuccauugugggccgcgccugggaaaauacgguuguggaucuggagcaggacaacaaaccucagaagaucgggaauggaggcagcaacaaaucucuucaguccgcuggcuuugccgcugggcugacauacagccaacucaugacccugaaggauuucaaaugcuuuaaucugaucccgaacgccaagacauggauggacauugagggaagacccgaagauccugucgagaucgcccuuuaccagcccucuuccggcuguuaugugcacuucuuucgggaaccuaccgaccucaagcaguucaaacaggacgcuaaguacagccaugggauugauguuaccgaccuguuugcggcccaacccggacugacauccgcugugaucgaggcccucccgagaaauauggucauuacgugccagggcucugaagauauccgcaaacugcuugagagccaggggcggagagacaucaagcugauugauaucacccucuccaaagccgacucucgcaaguucgagaacgcugugugggaucaguuuaaggaccugugucacaugcauacaggcgucgugguugaaaagaagaaacggggaggcaaggaggaaauuaccccucacugcgcccugauggauuguaucauguucgacgcggcugugagcgggggacuugaugccaaaguccucagagugguucugccccgcgacaugguguuccggacauccaccccuaaggucgugcugugaggacuaguuauaagacugacuagcccgaugggccucccaacgggcccuccuccccuccuugcaccgagauuaauaaaaaaaaaaaaaaaaaaaaaaaaaaaaaaaaaaaaaaaaaaaaaaaaaaaaaaaaaaaaaaaaaaaaaaaaaaaaaaaaaaaaaaaaaaaaaaaaaaaa

SEQ ID NO: 20658 - RNA, 1950 nt, Artificial Sequence
  mRNA product Design i-3 (A100) comprising derived and/or modified sequence from LASV(AV;Clade V)__CCA30315__SP-HsALB_NP(2-569) (opt5)
aggagaaagcuuaccaugaagugggugaccuucaucagccugcucuuucuguucuccucugccuacagcagcgccuccaaggaggugaaaucuuuccuguggacccagagccucagacgggaacuguccggcuacugcucuaacaucaaacuucaagucguuaaggacgcucaggcccugcuccacgggcuggauuuuagcgagguguccaaugugcagcgccuuaugagaaagcagcggcgcgacgauucugaccugaaaagacuccgggaucugaaccaagcggucaauaaccugguggaacucaagagcacacagcagaaguccguucugcgcgugggaacgcuuagcucugacgaucugcucacccuggcugccgaccuugagaaacugaaguccaaagucacaagaaccgaacggccccucagcucuggcguguauauggggaaucuguccagccagcaacuggaucagcgcagagcccuccugaaccuuauuggaaugacaaauggcucucaggggucccaggcuggacgggacggcguugugcgcgucugggaugugaagaacgccgagcugcucaauaaccaauucggcaccaugccuagccugacacuugcuugucugaccaaacagggacagguggaccucaaugaugucguucaagcccugacggaccuggggcucaucuacaccgcgaaguauccgaacacauccgaccuggauagacuuacccagucucaucccauucugaauaugaucgacacaaagaaaagcucccucaacauuagcggcuacaauuuuucucugggggccgcugugaaggccggagcuugcaugcuugauggcgggaacaugcuggagaccaucaaaguguccccucagagcauggacggaauccucaagucuauucugaaagucaagcgggcccugggcauguucgugagcgauacgcccggcgaacgcaacccuuaugagaauauccucuacaaaauuugucuguccggggacggauggcccuauaucgcgucuagaacaagcauuguuggccgggccugggaaaacaccguggucgaucuugagacagacgggaagccucagaagaucggauccggcaauagcaacaaaucucugcaauccgcuggguuuagcgccggacucaccuacucucagcugaugacccugaaggaugcuaugcuucagcucgacccgaaugccaaaacauggauggauauugagggcagacccgaagacccuguggagguugcccuguaccagcccaucuccggcugcuauauccacuucuuucgcgaaccuacggaccugaagcaauucaaacaggaugcuaaguacagccaugggauugacaucgcggaucucuuugccgcucagcccggacugaccuccgccgugauugaggcccuuccgcggaacauggucaucacaugucagggcucugaagacauuaagaaacugcucgagagccaagggagaaaggauaucaaacugaucgacauugcucuguccaagaucgauucucgcaaauucgagaaugccgugugggaccaguauaaggaucuuugccacaugcauaccggagucgugguugaaaagaaaaagcggggcgggaaagaggaaauuacaccucacugugcgcucauggacugcaucauguuugaugcugccgugagcggcggacugaacacccugguccucagagccgugcugccccgcgacaugguuuuccggacguccacaccuagagugguccuuugaggacuaguuauaagacugacuagcccgaugggccucccaacgggcccuccuccccuccuugcaccgagauuaauaaaaaaaaaaaaaaaaaaaaaaaaaaaaaaaaaaaaaaaaaaaaaaaaaaaaaaaaaaaaaaaaaaaaaaaaaaaaaaaaaaaaaaaaaaaaaaaaaaaa

SEQ ID NO: 20659 - RNA, 1950 nt, Artificial Sequence
  mRNA product Design i-3 (A100) comprising derived and/or modified sequence from LASV(Togo/2016/7082;Clade VI)__AMR44578__SP-HsALB_NP(2-569) (opt5)
aggagaaagcuuaccaugaagugggugaccuucaucagccugcucuuucuguucuccucugccuacagcagcaacuccaaggaggugaaaucuuuccuguggacccagagccucagacgggaacuguccggcuacugcucuaauaucaaacuucaagucguuaaagacgcccaggcucugcuccacgggcuggauuuuagcgagguguccaacgugcagcgccuuaugagaaagcagaaacgggacgauggagaccugaagcgccucagagaucugaaucaagccgucaacaaucugguggaacucaagucuguucagcagaaaagcauucugcgggugggcacacuuacguccgacgaucugcucacccuggcggcugaccuugagaagcugaaaagcaaggucacacgcaccgaaagaccccucucuuccgggguguauaugggaaaccugagcucucagcaacuggaucagcggcgcgcccuccuguccaugaucggcaugagcgggggaaaucagaacucucagccuaaaggcgacggcguugugagagucugggaugugaagaaugccgaccuucugaacaaucaauucgggacaaugccgucccucacccuggcuugucuuacaaagcagggacagguggaucugaacgacgccguccaagcucucaccgaccugggccugauuuacacggccaaauaucccaauagcuccgaucucgaccggcugucucagagccauccuauccuuaacaugauugauaccaagaaauccagccugaauaucucuggguacaacuuuucccucggagcggccaucaagacaggcgcuugcaugcuggacgggggaaacaugcuugagaccauuaaaguuacaccccagaccauggauggcauccucaagagcauucugaaagugaagcgcucucugggcauguucaucagcgacacgccuggggagagaaaucccuaugaaaacauucuguacaagaucugucucuccggagauggcuggccuuauauugccucucggacagcuaucaucgggcgcgccugggagaauaccguggucgaccuggaaagcgauuccaaaccgcagaagauuggaagcaacggcucuaauaaaucccuucaaagcgcgggguuugcccccggacugacauacucucagcucaugacccugaaggacuccaugcugcagcuugauccuaacgcuaaaaccuggaucgacauugagggcagacccgaggacccuguggaaguugcccucuuccagcccaucagcggcugcuacauucacuuuuuccgggagccgacagaucugaagcaauuuaagcaggacgcuaaauauucccaugggaucgaugugacggaccuguucgccgcccagccuggacucaccucugcugucaucgaagcgcugcccagaaauauggugcuuacaugucagggcagcgaugacauuaagaaacugcucgauucccaagggcgccgggacaucaagcugauugauguuucucugaacaaaaucgacagcagaaaguuugagaaugccgugugggaucaguacaaggaccuuugccacaugcauaccggagucguggucgaaaagaagaaaaagggcgggaaagaggagauuacaccucacugugcucuccuggauugcaucauguucgacgccgccguguccggcggacugaacgcuaccguucuccgcgccgugcugccccgggacauggucuuuagaacgagcucucccaaggugguucuuugaggacuaguuauaagacugacuagcccgaugggccucccaacgggcccuccuccccuccuugcaccgagauuaauaaaaaaaaaaaaaaaaaaaaaaaaaaaaaaaaaaaaaaaaaaaaaaaaaaaaaaaaaaaaaaaaaaaaaaaaaaaaaaaaaaaaaaaaaaaaaaaaaaaa

SEQ ID NO: 20660 - RNA, 1950 nt, Artificial Sequence
  mRNA product Design i-3 (A100) comprising derived and/or modified sequence from LASV(KAK-428;Clade n.d. (VII))__ANH09741__SP-HsALB_NP(2-569) (opt5)
aggagaaagcuuaccaugaagugggugaccuucaucagccugcucuuucuguucuccucugccuacagcagcaacuccaaggaggugaaaucuuuccuguggacccagagccucagacgggaacuguccggcuacugcacaaauaucaaacuucaagucguuaaggacgcccaggcucugcuccacgggcuggauuuuucugaggugagcaacgugcagcgccuuaugagaaagcagaaacgggacgauaaugaccugaagcgccucagagaucugaaccaagccgucaauaaccugguggaacucaaguccguucagcagaaaucugugcugaaggucggaacgcuuaauagcgacgaucugcucacccuggcggcugaccuugagaaacugaaguccaaagugguucggacagaacgcccccucagcucuggcguguauauggggaaccuguccagccagcaacuggaucagagacgggcccuccugaauaugauuggaauggccggcgggucucagggaaaccagccuucccgcgacggcgucgugagagugugggaugucaagaaugcugaccuucugaacaaucaauucggcaccaugccgagccucacacuggccugucuuaccaagcaggggcagguugaucugaacgacguggugcucgcucugacagaccugggacucaucuacaccgccaaauaucccaauucuuccgaucuggaccggcuuagccaaaaccauccuguccugaacaugauugaugugaauaaguccucucucaacaucagcggcuacaauuuuucccugggggcggccguuaaagcuggagccugcaugcuugacggcgggaacaugcuggagacgauuaagaucagcccccagaccguggauggaauccucaaaucuauucugaaggucaaacgcgcucugggcauguucguguccgacacaccuggcgagagaaaucccuaugaaaacauccucuacaagguuugucugagcgggaauggauggccuuauauugccucucggaccagcaucgugggccgcgcgugggagaacacagucguggaucuugaauccaauaagaaccagccgaaagucgggaauaacggaucuaauaagaugcugcagagcuccggcuuugccaccgggcucacguacagccaacugaugacacugagagacucuaugcuucagcucgaucccaccgcuaaaacauggauugacaucgagggacggccugaggaucccguggaacuggcccuguuccagccuuccagcggcugcuacauucacuuuuucagagagcccaccgaccucaagcaguuuaaacaagacgcuaaguauucucauggcaucgauguuaacgaccuguucuccgcccagccggggcuuaccagcgccgugcuggaagcucucccucgcaauaugguccugacaugucagggauccgaugacauccggaagcugcuugauucucaggacagaaaagauauuaagcucaucgacauuagccuguccaaagcggaugcccgcaaguuugagaacgacgugugggaucaauucaaagaccugugccacaugcauacgggcaucguuguggaaaagaagaaaaagggagggaaacaggagaugacaccccacugugcucuccuggauugcauuauguuugacgccgccgucucuggcgggcuuaacgugccuacccugcgggcugugcuccccaccgacaugguuuucagaacaaucaccacgaaggucgugcugugaggacuaguuauaagacugacuagcccgaugggccucccaacgggcccuccuccccuccuugcaccgagauuaauaaaaaaaaaaaaaaaaaaaaaaaaaaaaaaaaaaaaaaaaaaaaaaaaaaaaaaaaaaaaaaaaaaaaaaaaaaaaaaaaaaaaaaaaaaaaaaaaaaaa

SEQ ID NO: 20661 - RNA, 1950 nt, Artificial Sequence; identical to SEQ ID NO: 20655
  mRNA product Design i-3 (A100) comprising derived and/or modified sequence from LASV(Pinneo-NIG-1969;Clade I)__AIT17837__SP-HsALB_NP(2-569) (opt5)

SEQ ID NO: 20662 - RNA, 1950 nt, Artificial Sequence
  mRNA product Design i-3 (A100) comprising derived and/or modified sequence from LASV(ISTH0009-NIG-2011;Clade II)__AIT17405__SP-HsALB_NP(2-569) (opt5)
aggagaaagcuuaccaugaagugggugaccuucaucagccugcucuuucuguucuccucugccuacagcagcguguccaaggaggucaaaucuuuccuguggacccagagccucagacgggaacuguccggcuacugcucuaacaucaaacuucaaguugugaaggacgcccaggcucugcuccacgggcuggauuuuagcgagguguccaauguccagcgccuuaugagaaagcagaaacgggacgauucugaccugaagcgccucagagaucugaaccaagccgugaauaaccugguugaacucaagagcacacagcagaaauccauucugcgggugggaacgcuuaccagcgacgaucugcucacacuggcggcugaccuugagaagcugaaaucuaaggucauccgcaccgaaagaccccucuccagcggcguguauauggggaaucugucuacacagcaacuggagcagcggcgcgcccuccugaacaugauuggaaugguuggcggggcccagggaacccagccuggcagagauggcgugguccgggugugggacgugaaaaauccggaucuucugaacaaucaauucgggacaaugcccucccucacccuggcuugucuuacgaagcagggacaggucgaccugaacgaugccguucucgcucugaccgaccugggccucaucuacacagccaaguauccuaauagcucugaccuggaucgccuuucccaaagccaucccauucugaacaugguggacaucaaaaaguccucucucaauaucagcggguacaacuuuucccugggagcggccgugaaagcuggcgccugcaugcuugaugggggaaauaugcuggagaccauuaaggucacaccucagaccauggacggcauccucaaaagcauucugaaggugaaaagaucucugggcauguucguuuccgauacgcccggggaacggaacccuuaugagaacauccucuacaagauuugucugagcggagacggcuggccguauaucgcuucucgcacaagcauuguggggagagccugggaaaauaccacagucgaucuugaguccgacggaaagccccagaaagugggcucugcggggagcaacaagucccugcagagcgccggauuuccuaccggccucaccuacucucaacugaugacacugaaagauuccaugaugcagcuugaccccagcgcuaagacguggaucgauaucgagggccggccugaagaccccguugagauugcccucuaccagccgaugucugggugcuauauccacuucuuuagagaaccuaccgaccugaaacaguucaagcaagaugcuaaguacucccauggaauugacguggccgaucuguuucccgcccagccuggccucacaagcgcugucaucgaggcgcugccccgcaauauggugcuuaccugucagggguccgacgauauuaaacggcugcucgacucucagggaagacgcgauaucaagcugaucgacauugcccugagcaaagcugauucccggagauucgaaaacgccgucugggaccaaugcaaggaucuuugucacaugcauacaggcgugguuguggagaaaaagaagcgcgggggcaaagaggaaaucacgccccacugcgcccucauggacuguauuauguaugaugcugccgucucuggaggccugaauaucccugugcugcgggcgguucucccgagagacaugguguuucgcaccagcucccccaaggucgugcugugaggacuaguuauaagacugacuagcccgaugggccucccaacgggcccuccuccccuccuugcaccgagauuaauaaaaaaaaaaaaaaaaaaaaaaaaaaaaaaaaaaaaaaaaaaaaaaaaaaaaaaaaaaaaaaaaaaaaaaaaaaaaaaaaaaaaaaaaaaaaaaaaaaaa

SEQ ID NO: 20663 - RNA, 1950 nt, Artificial Sequence
  mRNA product Design i-3 (A100) comprising derived and/or modified sequence from LASV(ISTH2010-NIG-2012;Clade II)__AIT17483__SP-HsALB_NP(2-569) (opt5)
aggagaaagcuuaccaugaagugggugaccuucaucagccugcucuuucuguucuccucugccuacagcagcgccuccaaggaggugaaaucuuuccuguggacccagagccucagacgggaacuguccggcuacugcucuaacaucaaacuucaagucguuaaggacgcucaggcccugcuccacgggcuggauuuuagcgagguguccaaugugcagcgccuuaugagaaagcagaaacgggacgauucugaccugaagcgccucagagaucugaaccaagcggucaauaaccugguggaacucaagagcacacagcagaaauccauucugcggguuggaacgcuuaccagcgacgaucugcucacacuggcugccgaccuugagaagcugaaaucuaaggugauccgcaccgaaagaccccucuccagcggcgucuauauggggaaucugucuacacagcaacuggagcagcggcgcgcccuccugaaccuuauuggaauggugggcggggcucagggaacccagccuggcagagauggcguugugcgggucugggacgugaaaaauccggaucugcucaacaaucaauucgggacaaugcccucccugacccuugccugucugacgaagcagggacagguggaccucaacgaugcuguccuggcccugaccgaccucggccugaucuacacagcgaaguauccuaauagcucugaccuugaucgccugucccaaagccaucccauucucaacaugguugacaccaaaaaguccucucugaauaucagcggguuuaacuucucccuuggagccgcugugaaagccggcgcuugcaugcuggaugggggaaauaugcucgagacaaucaaggugaccccucagacgauggacggcauucugaaaagcauccugaaggucaaaaagucucucggcauguuuguguccgauacacccggggaaagaaacccuuacgagaacauucuguauaagaucugucuuagcggagacggcuggccguacauugccucucggaccagcaucguugggcgcgcgugggaaaauacaaccguggaucuggaguccgacggaaaaccccacaaggucggcaccgccgggucuaacaaaagccuccaguccgcuggauucccuacaggccugacguauagccagcugaugacccuuaaggauucuaugaugcaacucgaccccuccgccaaaacauggauugauaucgagggcagaccugaagaccccguggagaucgcucuguaccagccgaugagcgggugcuacauucacuuuuuccgggaaccuaccgaccugaagcaguuuaagcaggaugccaaauauucucauggaaucgacguugccgaucucuuccccgcucaaccuggccugacauccgcggugauugaggcccuucccagaaauaugguccugaccugucaggggagcgacgauaucaagcgccuccuggacucccagggacggagagauauuaaacugaucgacaucgcucuuucuaaggccgauagccgccgguuugaaaacgccgugugggaccagugcaaagaucucugucauaugcacacgggcgucgugguugagaagaagaaaagagggggcaaggaggaaauuacaccccacugcgcucugauggacuguaucauguacgaugccgcgguguccggaggccugaauauuccuguccuccgcgcugugcugccgcgggacaugguuuucagaaccucuagccccaaagugguccuuugaggacuaguuauaagacugacuagcccgaugggccucccaacgggcccuccuccccuccuugcaccgagauuaauaaaaaaaaaaaaaaaaaaaaaaaaaaaaaaaaaaaaaaaaaaaaaaaaaaaaaaaaaaaaaaaaaaaaaaaaaaaaaaaaaaaaaaaaaaaaaaaaaaaa

SEQ ID NO: 20664 - RNA, 1950 nt, Artificial Sequence
  mRNA product Design i-3 (A100) comprising derived and/or modified sequence from LASV(Lassa virus/H.sapiens-wt/NGA/2015/ISTH_0543;Clade II)__AVO03640__SP-HsALB_NP(2-569) (opt5)
aggagaaagcuuaccaugaagugggugaccuucaucagccugcucuuucuguucuccucugccuacagcagcgccuccaaggaggugaaaucuuuccuguggacccagagccucagacgggaacuguccggcuacugcucuaacaucaaacuucaagucguuaaggacgcucaggcccugcuccacgggcuggauuuuagcgagguguccaaugugcagcgccuuaugagaaagcagaaacgggacgauucugaccugaagcgccucagagaucugaaccaagcggucaauaaccugguggaacucaagagcacacagcagaaauccauucugcggguuggaacgcuuaccagcgacgaucugcucacacuggcugccgaccuugagaagcugaaaucuaaggugauccgcaccgaaagaccccucuccagcggcgucuauauggggaaucugucuacacagcaacuggagcagcggcgcgcccuccugaacaugauuggaauggugggcggggcucagggaacccagccuggcagagauggcguugugcgggucugggacgugaaaaauccggaucuucugaacaaucaauucgggacaaugcccucccucacccuggccugucuuacgaagcagggacagguggaccugaacgaugcuguccucgcccugaccgaccugggccucaucuacacagcgaaguauccuaauagcucugaccuggaucgccuuucccaaagccaucccauucugaacaugguugacaccaaaaaguccucucucaauaucagcggguacaacuuuucccugggagccgcugugaaagccggcgcuugcaugcuugaugggggaaauaugcuggagacaaucaaggugaccccucagacgauggacggcauucucaaaagcauccugaaggucaaaaagucucugggcauguucguguccgauacacccggggaaagaaacccuuaugagaacauucucuacaagaucugucugagcggagacggcuggccguauauugccucucggaccagcaucguugggcgcgcgugggaaaauacaaccguggaucuugaguccgacggaaaaccccagaaggucggcucugccgggagcaacaaaucccugcagagcgcuggauuuccuaccggccucacauacucucaacugaugacgcugaaggauuccaugaugcagcuugaccccagcgccaaaaccuggauugauaucgagggcagaccugaagaccccguggagaucgcucucuaccagccgaugucugggugcuauauucacuucuuucgggaaccuacagaccugaagcaguucaagcaagaugccaaauacucccauggaaucgacguugccgaucuguuucccgcucagccuggccucaccagcgcggugauugaggcccugcccagaaauaugguccuuacaugucagggguccgacgauaucaagcgccugcucgacucucagggacggaaagauauuaagcugaucgacaucgcucugagcaaagccgauuccagacgcuucgaaaacgccgugugggaccaaugcaaggaucuuugucacaugcauaccggcgucgugguugagaagaaaaagagagggggcaaagaggaaauuacgccccacugcgcucucauggacuguaucauguaugaugccgcggugucuggaggccugaauauuccuguccugcgggcugugcucccgcgcgacaugguuuuucggacaagcucccccaaggugguccugugaggacuaguuauaagacugacuagcccgaugggccucccaacgggcccuccuccccuccuugcaccgagauuaauaaaaaaaaaaaaaaaaaaaaaaaaaaaaaaaaaaaaaaaaaaaaaaaaaaaaaaaaaaaaaaaaaaaaaaaaaaaaaaaaaaaaaaaaaaaaaaaaaaaa

SEQ ID NO: 20665 - RNA, 1950 nt, Artificial Sequence
  mRNA product Design i-3 (A100) comprising derived and/or modified sequence from LASV(Lassa virus/H.sapiens-wt/NGA/2016/ISTH_0009;Clade II)__AVO03572__SP-HsALB_NP(2-569) (opt5)
aggagaaagcuuaccaugaagugggugaccuucaucagccugcucuuucuguucuccucugccuacagcagcgccuccaaggaggugaaaucuuuccuguggacccagagccucagacgggaacuguccggcuacugcucuaacaucaaacuucaagucguuaaggacgcucaggcccugcuccacgggcuggauuuuagcgagguguccaaugugcagcgccuuaugagaaagcagaaacgggacgauucugaccugaagcgccucagagaucugaaccaagcggucaauaaccugguggaacucaagagcacacagcagaaauccauucugcggguuggaacgcuuaccagcgacgaucugcucacacuggcugccgaccuugagaagcugaaaucuaaggugauccgcaccgaaagaccccucuccagcggcgucuauauggggaaucugucuacacagcaacuggagcagcggcgcgcccuccugaacaugauuggaauggugggcggggcucagggaacccagccuggcagagauggcguugugcgggucugggacgugaaaaauccggaucuucugaacaaucaauucgggacaaugcccucccucacccuggccugucuuacgaagcagggacagguggaccugaacgaugcuguccucgcccugaccgaccugggccucaucuacacagcgaaguauccuaauagcucugaccuggaucgccuuucccaaagccaucccauucugaacaugguugacaccaaaaaguccucucucaauaucagcggguacaacuuuucccugggagccgcugugaaagccggcgcuugcaugcuugaugggggaaauaugcuggagacaaucaaggugaccccucagacgauggacggcauucucaaaagcauccugaaggucaaaaagucucugggcauguucguguccgauacacccggggaaagaaacccuuaugagaacauucucuacaagaucugucugagcggagacggcuggccguauauugccucucggaccagcaucguugggcgcgcgugggaaaauacaaccguggaucuugaguccgacggaaaaccccagaaggucggcucugccgggagcaacaaaucccugcagagcgcuggauuuccuaccggccucacauacucucaacugaugacgcugaaggauuccaugaugcagcuugaccccagcgccaaaaccuggauugauaucgagggcagaccugaagaccccguggagaucgcucucuaccagccgaugucugggugcuauauucacuucuuucgggaaccuacagaccugaagcaguucaagcaagaugccaaauacucccauggaaucgacguugccgaucuguuucccgcucagccuggccucaccagcgcggugauugaggcccugcccagaaauaugguccuuacaugucagggguccgacgauaucaagcgccugcucgacucucagggacggagagauauuaaacugaucgacaucgcucugagcaaggccgauucccgccgguucgaaaacgccgugugggaccaaugcaaagaucuuugucacaugcauaccggcgucgugguugagaagaagaaaagagggggcaaggaggaaauuacgccccacugcgcucucauggacuguaucauguaugaugccgcggugucuggaggccugaauauuccuguccugcgcgcugugcucccgcgggacaugguuuuuagaacaagcucccccaaagugguccugugaggacuaguuauaagacugacuagcccgaugggccucccaacgggcccuccuccccuccuugcaccgagauuaauaaaaaaaaaaaaaaaaaaaaaaaaaaaaaaaaaaaaaaaaaaaaaaaaaaaaaaaaaaaaaaaaaaaaaaaaaaaaaaaaaaaaaaaaaaaaaaaaaaaa

SEQ ID NO: 20666 - RNA, 1950 nt, Artificial Sequence
  mRNA product Design i-3 (A100) comprising derived and/or modified sequence from LASV(Lassa virus/H.sapiens-wt/NGA/2016/ISTH_0017;Clade II)__AVO03568__SP-HsALB_NP(2-569) (opt5)
aggagaaagcuuaccaugaagugggugaccuucaucagccugcucuuucuguucuccucugccuacagcagcgccuccaaggaggugaaaucuuuccuguggacccagagccucagacgggaacuguccggcuacugcucuagcaucaaacuucaagucguuaaggacgcucaggcccugcuccacgggcuggauuuuuccgaggugucuaacgugcagcgccuuaugagaaagcagaaacgggacgauagcgaccugaagcgccucagagaucugaaucaagcggucaacaaucugguggaacucaaguccacacagcagaaaagcauucugcggguuggaacgcuuaccucugacgaucugcucacacuggcugccgaccuugagaagcugaaauccaaggugauccgcaccgaaagaccccucagcucuggcgucuauauggggaaccuguccacacagcaacuggagcagcggcgcgcccuccugaauaugauuggaauggcuggcggggcccagggaacccagccuggcagagauggcgugguucgggugugggacgucaaaaacccggaucuucugaauaaccaauucgggacaaugcccagccucacccuggcuugucuuacgaagcagggacagguggaccugaaugaugccgugcucgcgcugaccgaccugggccucaucuacacagccaaguauccuaacucuuccgaccuggaucgccuuagccaaucccaucccauucugaauauggucgacaccaaaaagucuagccucaacaucuccggguacaauuuuagccugggagcugccguuaaagcuggcgccugcaugcuugaugggggaaacaugcuggagacaaucaaggugaccccucagacgauggacggcauucucaaaucuauccugaaggugaaaagaucccugggcauguucgucagcgaugcgcccggggaacggaauccuuaugagaacauucucuacaagaucugucugucuggagacggcuggccguauauugccagccgcacauccaucguggggagagcuugggaaaacaccacaguugaucuugagucugacggaaagccccagaaagugggcgccaccgggagcaauaagucccugcagagcgcuggauuuccuaccggccucacauacucucaacugaugacgcugaaagauuccaugaugcagcuugaccccagcgccaagaccuggauugauaucgagggccggccugaagaccccgucgagguggcccucuaccagccgguuucugggugcuauauccacuucuuuagagaaccuacagaccugaaacaguucaagcaagaugcuaaguacucccauggaauugacguggcggaucuguuucccgcccagccuggccucaccagcgcugucaucgaggcccugccccgcaacauggugcuuacaugucagggguccgacgauauuaaaaagcugcucgacucucagggacggaaagauaucaagcugauugacaucgcccugagcaaagcugauuccagacgcuucgaaaaugccgucugggaccaaugcaaggaucuuugucacaugcauaccggcgugguuguggagaagaaaaagagagggggcaaagaggaaaucacgccccacugcgcgcucauggacuguauuauguaugaugcugccgucucuggaggccugaacaucccugugcugcgggccguucucccgcgcgacaugguguuucggacaagcucccccaaggucgugcugugaggacuaguuauaagacugacuagcccgaugggccucccaacgggcccuccuccccuccuugcaccgagauuaauaaaaaaaaaaaaaaaaaaaaaaaaaaaaaaaaaaaaaaaaaaaaaaaaaaaaaaaaaaaaaaaaaaaaaaaaaaaaaaaaaaaaaaaaaaaaaaaaaaaa

SEQ ID NO: 20667 - RNA, 1950 nt, Artificial Sequence
  mRNA product Design i-3 (A100) comprising derived and/or modified sequence from LASV(Lassa virus/H.sapiens-wt/NGA/2018/ISTH_0959;Clade II)__AVV65100__SP-HsALB_NP(2-569) (opt5)
aggagaaagcuuaccaugaagugggugaccuucaucagccugcucuuucuguucuccucugccuacagcagcgccuccaaggaggugaaaucuuuccuguggacccagagccucagacgggaacuguccggcuacugcucuaacaucaaacuucaagucguuaaggacgcucaggcccugcuccacgggcuggauuuuagcgagguguccaaugugcagcgccuuaugagaaagcagaaacgggacgauucugaccugaagcgccucagagaucugaaccaagcggucaauaaccugguggaacucaagagcacccagcagaaauccauucugcggguuggaacgcuuaccagcgacgaucugcucacacuggcugccgaccuugagaagcugaaaucuaaggugauccgcaccgaaagaccccucuccagcggcgucuauauggggaaucugucuacacagcaacuggagcagcggcgcgcccuccugaaccuuauuggaauggugggcggggcucagggaacccagccuggcagagauggcguugugcgggucugggacgugaaaaauccggaucugcucaacaaucaauucgggacaaugcccucccugacccuugccugucugacgaagcagggacagguggaccucaacgaugucguucuggcucugaccgaccucggccugaucuacacagccaaguauccuaauagcucugaccuugaucgccugucccaaagccaucccauucucaacaugguggacaccaaaaaguccucucugaauaucagcggguuuaacuucucccuuggagcggccgugaaagcuggcgccugcaugcuggaugggggaaauaugcucgagacaaucaaggucaccccucagacgauggacggcauucugaaaagcauccugaaggugaaaaagucucucggcauguuuguuuccgauacacccggggaaagaaacccuuacgagaacauucuguauaagaucugucuuagcggagacggcuggccguacauugcuucucggaccagcaucguggggcgcgccugggaaaauacaaccgucgaucuggaguccgacggaaaaccccacaaggugggcaccgcggggucuaacaaaagccuccaguccgccggauucccuacaggccugacguauagccagcugaugacccuuaaggauucuaugaugcaacucgaccccuccgcuaaaacauggauugauaucgagggcagaccugaagaccccguugagaucgcccuguaccagccgaugagcgggugcuacauucacuuuuuccgggaaccuaccgaccugaagcaguuuaagcaggaugcuaaauauucucauggaaucgacguggccgaucucuuccccgcccaaccuggccugacauccgcugucauugaggcgcuucccagaaauauggugcugaccugucaggggagcgacgauaucaagcgccuccuggacucccagggacggaaagauauuaagcugaucgacaucgcccuuucuaaaacggauagcagacgcuuugaaaacgcugucugggaccagugcaaggaucucugucauaugcacacaggcgugguuguggagaagaaaaagagagggggcaaagaggaaauuacaccccacugcgcccugauggacuguaucauguacgaugccgcugucuccggaggccugaauauuccugugcuccgggccguucugccgcgcgacaugguguuccggaccucuagccccaaggucgugcuuugaggacuaguuauaagacugacuagcccgaugggccucccaacgggcccuccuccccuccuugcaccgagauuaauaaaaaaaaaaaaaaaaaaaaaaaaaaaaaaaaaaaaaaaaaaaaaaaaaaaaaaaaaaaaaaaaaaaaaaaaaaaaaaaaaaaaaaaaaaaaaaaaaaaa

SEQ ID NO: 20668 - RNA, 1950 nt, Artificial Sequence
  mRNA product Design i-3 (A100) comprising derived and/or modified sequence from LASV(LASV003-NIG-2008;Clade II)__AIT17581__SP-HsALB_NP(2-569) (opt5)
aggagaaagcuuaccaugaagugggugaccuucaucagccugcucuuucuguucuccucugccuacagcagcgccuccaaggaggugaaaucuuuccuguggacccagagccucagacgggaacuguccggcuacugcucuagcaucaaacuucaagucguuaaggacgcucaggcccugcuccacgggcuggauuuuuccgaggugucuaacgugcagcgccuuaugagaaagcagaaacgggacgauagcgaccugaagcgccucagagaucugaaucaagcggucaacaaucugguggaacucaaguccacccagcagaaaagcguucugcgggugggaacgcuuaccucugacgaucugcucacacuggcugccgaccuugagaagcugaaauccaaggucauucgcaccgaaagaccccucagcucuggcguguauauggggaaccuguccgcccagcaacuggagcagcggcgcacacuccugaauaugaucggaaugguuggcggggcucagggaacccagccuggcagagauggcgugguccgggugugggacgugaaaaacccggaucuucugaauaaccaauucgggacaaugcccagccucacccuggccugucuuacgaagcagggacaggucgaccugaaugauguugugcucgcucugaccgaccugggccucauuuacacagccaaguauccuaacucuuccgaccuggaucgccuuagccaaucccaucccauccugucuaugguggacaccaaaaagagcucccucaauauuagcggguacaacuuuucucugggagcggccgucaaagcuggcgccugcaugcuugaugggggaaauaugcuggagacaaucaaggugaccccucagacgauggacggcauccucaaauccauucugaagguuaaaaagagccugggcauguucgugucugauacacccggggaaagaaacccuuaugagaauauccucuacaagauuugucugagcggagacggcuggccguauaucgcuucccggaccucuauugucgggcgcgccugggaaaacacaaccguggaucuugagagcgacggaaaaccccagaagguuggcaccgcgggguccaacaaaagccugcagucugccggauuuccuacaggccucacguacucccaacugaugacccugaaggauagcaugaugcagcuugaccccucugcuaaaacauggaucgauauugagggcagaccugaagaccccguggagaucgcccucuaccagccgauguccgggugcuauauccacuucuuucgggaaccuaccgaccugaagcaguucaagcaagaugcuaaauacagccauggaauugacgucacagaucuguuucccgcccagccuggccucaccuccgccgugaucgaggcucugcccagaaauaugguccuuacgugucaggggucugacgauauuaagcgccugcucgacagccagggacggagagauaucaaacugauugacaucgcgcuguccaaggccgauucucgccgguucgaaaacgcugugugggaccaaugcaaagaucuuugucacaugcauacaggcguuguggucgagaagaagaaaagagggggcaaggaggaaaucacaccccacugcgcccucauggacuguauuauguaugaugccgcugugagcggaggccugaauaucccuguucugcgcgccgugcucccgcgggacauggucuuuagaaccuccagccccaaaguggugcugugaggacuaguuauaagacugacuagcccgaugggccucccaacgggcccuccuccccuccuugcaccgagauuaauaaaaaaaaaaaaaaaaaaaaaaaaaaaaaaaaaaaaaaaaaaaaaaaaaaaaaaaaaaaaaaaaaaaaaaaaaaaaaaaaaaaaaaaaaaaaaaaaaaaa

SEQ ID NO: 20669 - RNA, 1950 nt, Artificial Sequence
  mRNA product Design i-3 (A100) comprising derived and/or modified sequence from LASV(LASV035-NIG-2009;Clade II)__AIT17589__SP-HsALB_NP(2-569) (opt5)
aggagaaagcuuaccaugaagugggugaccuucaucagccugcucuuucuguucuccucugccuacagcagcgccuccaaggaggugaaaucuuuccuguggacccagagccucagacgggaacuguccggcuacugcucuagcaucaaacuucaagucguuaaagacgcucaggcccugcuccacgggcuggauuuuuccgaggugucuaacgugcagcgccuuaugagaaagcagaaacgggacgauagcgaccugaagcgccucagagaucugaaucaagcggucaacaaucugguggaacucaaguccacacagcagaaaagcauucugcggguuggaacgcuuaccucugacgaucugcucacacuggcugccgaccuugagaagcugaaauccaaggugauccgcaccgaaagaccccucagcucuggcgucuauauggggaaccuguccgcccagcaacuggagcagcggcgcgcucuccugaauaugauuggaauggugggcggggcccagggaacacagccuggcagagauggcguugugcgggucugggacgugaaaaacccggaucuucugaauaaccaauucgggaccaugcccagccucacacuggcuugucuuaccaagcagggacagguggaccugaaugaugccguccucgcgcugacggaccugggccucaucuacaccgccaaguauccuaacucuuccgaccuggaucgccuuagccaaucccaucccauucugaauaugguugacacaaagaagucuagccucaacaucuccggguacaauuuuagccugggagcugccgugaaagcuggcgccugcaugcuugaugggggaaacaugcuggagaccaucaaggugacaccucagaccauggacggcauucucaaaucuauccugaaggucaaaagaucccugggcauguucgugagcgauacgcccggggaacggaauccuuaugagaacauucucuacaagaucugucugucuggagacggcuggccguauauugcgagccgcacauccaucguugggagagccugggaaaacaccacaguggaucuugagucugacggaaagccccagaaagucggcaccaccgggagcaauaagucccugcagagcgcuggauuuccuacaggccucacguacucucaacugaugacccugaaagauuccaugaugcagcuugaccccagcgccaagacauggauugauaucgagggccggccugaagaccccguggagaucgcucucuaccagccgaugucugggugcuauauucacuucuuuagagaaccuaccgaccugaaacaguucaagcaagaugccaaguacucccauggaaucgacguugccgaucuguuucccgcucagccuggccucacaagcgcggugauugaggcccugccccgcaacaugguccuuaccugucagggguccgacgauaucaaaaagcugcucgacucucagggacggagagauauuaaacugaucgacaucgcucugagcaaggccgauucccgcaaauucgaaaaugccgugugggaccaaugcaaggaucuuugucacaugcauacgggcgucgugguugagaagaaaaagagagggggcaaagaggaaauuacaccccacugcgcucucauggacuguaucauguaugaugccgcggugucuggaggccugaacauuccuguccugcgggcugugcucccgcgcgacaugguuuuucggaccagcucccccaaggugguccugugaggacuaguuauaagacugacuagcccgaugggccucccaacgggcccuccuccccuccuugcaccgagauuaauaaaaaaaaaaaaaaaaaaaaaaaaaaaaaaaaaaaaaaaaaaaaaaaaaaaaaaaaaaaaaaaaaaaaaaaaaaaaaaaaaaaaaaaaaaaaaaaaaaaa

SEQ ID NO: 20670 - RNA, 1950 nt, Artificial Sequence
  mRNA product Design i-3 (A100) comprising derived and/or modified sequence from LASV(LASV1000-NIG-2009;Clade II)__AIT17783__SP-HsALB_NP(2-569) (opt5)
aggagaaagcuuaccaugaagugggugaccuucaucagccugcucuuucuguucuccucugccuacagcagcgccuccaaggaggugaaaucuuuccuguggacccagagccucagacgggaacuguccggcuacugcucuaacaucaaacuucaagucguuaaggacgcucaggcccugcuccacgggcuggauuuuagcgagguguccaaugugcagcgccuuaugagaaagcagaaacgggacgauucugaccugaagcgccucagagaucugaaccaagcggucaauaaccugguggaacucaagagcacacagcagaaauccauucugcggguuggaacgcuuaccagcgacgaucugcucacacuggcugccgaccuugagaagcugaaaucuaaggugauccgcaccgaaagaccccucuccagcggcgucuauauggggaaucugucuacacagcaacuggagcagcggcgcgcccuccugaacaugauuggaauggugggcggggcucagggaacccagccuggcagagauggcguugugcgggucugggacgugaaaaauccggaucuucugaacaaucaauucgggacaaugcccucccucacccuggccugucuuacgaagcagggacagguggaccugaacgaugucguucucgcucugaccgaccugggccucaucuacacagccaaguauccuaauagcucugaccuggaucgccuuucccaaagccaucccauucugaacaugguggacaccaaaaaguccucucucaauaucagcggguacaacuuuucccugggagcggccgugaaagcuggcgccugcaugcuugaugggggaaauaugcuggagacaaucaaggucaccccucagacgauggacggcauucucaaaagcauccugaaggugaaaaagucucugggcauguucguuuccgauacacccggggaaagaaacccuuaugagaacauucucuacaagaucugucugagcggagacggcuggccguauauugcuucucggaccagcaucguggggcgcgccugggaaaauacaaccgucgaucuugaguccgacggaaaaccccagaaggugggcaccgcggggucuaacaaaagccugcaguccgccggauuuccuacaggccucacguacagccaacugaugacccugaaggauucuaugaugcagcuugaccccuccgcuaaaacauggauugauaucgagggcagaccugaagaccccguugagaucgcccucuaccagccggugagcgggugcuauauucacuucuuucgggaaccuaccgaccugaagcaguucaagcaagaugcuaaauacucucauggaaucgacgucgccgaucuguuucccgcccagccuggccucacauccgcugugauugaggcgcugcccagaaauaugguccuuaccugucaggggagcgacgauaucaagcgccugcucgacucccagggacggagagauauuaaacugaucgacaucgcccugucuaaggcugauagccgccgguucgaaaacgccgugugggaccaaugcaaagaucuuugucacaugcauacgggcguuguggucgagaagaagaaaagagggggcaaggaggaaauuacaccccacugcgcccucauggacuguaucauguaugaugcugccguguccggaggccugaauauuccuguucugcgcgcggugcucccgcgggacauggucuuuagaaccucuagccccaaaguggugcugugaggacuaguuauaagacugacuagcccgaugggccucccaacgggcccuccuccccuccuugcaccgagauuaauaaaaaaaaaaaaaaaaaaaaaaaaaaaaaaaaaaaaaaaaaaaaaaaaaaaaaaaaaaaaaaaaaaaaaaaaaaaaaaaaaaaaaaaaaaaaaaaaaaaa

SEQ ID NO: 20671 - RNA, 1950 nt, Artificial Sequence
  mRNA product Design i-3 (A100) comprising derived and/or modified sequence from LASV(LASV221-NIG-2010;Clade II)__AIT17625__SP-HsALB_NP(2-569) (opt5)
aggagaaagcuuaccaugaagugggugaccuucaucagccugcucuuucuguucuccucugccuacagcagcgccuccaaggaggugaaaucuuuccuguggacccagagccucagacgggaacuguccggcuacugcucuagcaucaaacuucaagucguuaaggacgcucaggcccugcuccacgggcuggauuuuuccgaggugucuaacgugcagcgccuuaugagaaagcagcggcgcgacgauagcgaccugaaaagacuccgggaucugaaucaagcggucaacaaucugguggaacucaaguccacacagcaaaagagcauucugcgcguuggaacgcuuaccucugacgaucugcucacacuggcugccgaccuugagaaacugaaguccaaagugaucagaaccgaacggccccucagcucuggcgucuauauggggaaccuguccacacagcagcuggagcagcgcagagcccuccugaauaugauuggaauggugggcggggcucagggaacccagccuggccgggauggcguugugcgcgucugggacgugaagaacccggaucuucugaauaaccaauucgggacaaugcccagccucacccuggccugucuuacgaaacagggacagguggaccugaaugaugcuguccucgcccugaccgaccugggccucaucuacacagcgaaguauccuaacucuuccgaccuggauagacuuagccaaucccaucccauucugaauaugguugacaccaagaaaucuagccucaacaucuccggguacaauuuuagccugggagccgcugugaaggccggcgcuugcaugcuugaugggggaaacaugcuggagacaaucaaagugaccccucagacggucgacggcauucucaagucuauccugaaagugaagcggucccugggcauguucguuagcgauacacccggggaacgcaauccuuaugagaacauucucuacaaaaucugucugucuggagacggcuggccguauauugccagcagaaccuccaucguggggcgggcgugggaaaacacaaccgucgaucuugagucugacggaaagccccagaaggugggcaccgccgggagcaauaaaucccugcagagcgcuggauuuccuacaggccucacguacucucaacugaugacccugaaggauuccaugaugcagcuugaccccagcgccaaaacauggauugauaucgagggcagaccugaagaccccguugagaucgcucucuaccagccgaugucugggugcuauauucacuucuuucgcgaaccuaccgaccugaagcaguucaaacaagaugccaaguacucccauggaaucgacguggccgaucuguuucccgcucagccuggccucacaagcgcggucauugaggcccugccccggaacauggugcuuaccugucagggguccgacgauaucaagagacugcucgacucucagggacgccgggauauuaaacugaucgacaucgcucugagcaaggccgauuccagaaaauucgaaaaugccgucugggaccaaugcaaggaucuuugucacaugcauacgggcgugguuguggagaaaaagaagcgcgggggcaaagaggaaauuacaccccacugcgcucucauggacuguaucauguaugaugccgcggucucuggaggccugaacauuccugugcugcgggcuguucucccgagagacaugguguuucgcaccagcucccccaaggucgugcugugaggacuaguuauaagacugacuagcccgaugggccucccaacgggcccuccuccccuccuugcaccgagauuaauaaaaaaaaaaaaaaaaaaaaaaaaaaaaaaaaaaaaaaaaaaaaaaaaaaaaaaaaaaaaaaaaaaaaaaaaaaaaaaaaaaaaaaaaaaaaaaaaaaaa

SEQ ID NO: 20672 - RNA, 1950 nt, Artificial Sequence
  mRNA product Design i-3 (A100) comprising derived and/or modified sequence from LASV(LASV237-NIG-2010;Clade II)__AIT17639__SP-HsALB_NP(2-569) (opt5)
aggagaaagcuuaccaugaagugggugaccuucaucagccugcucuuucuguucuccucugccuacagcagcgccuccaaggaggugaaaucuuuccuguggacccagagccucagacgggaacuguccggcuacugcucuaacaucaaacuucaagucguuaaggacgcucaggcccugcuccacgggcuggauuuuagcgagguguccaaugugcagcgccuuaugagaaagcagaaacgggacgauucugaccugaagcgccucagagaucugaaccaagcggucaauaaccugguggaacucaagagcacacagcagaaauccauucugcggguuggaacgcuuaccagcgacgaucugcucacacuggcugccgaccuugagaagcugaaaucuaaggugauccgcaccgaaagaccccucuccagcggcgucuauauggggaaucugucuacacagcaacuggagcagcggcgcgcccuccugaacaugauuggaauggugggcggggcucagggaacccagccuggcagagauggcguugugcgggucugggacgugaaaaauccggaucuucugaacaaucaauucgggacaaugcccucccucacccuggccugucuuacgaagcagggacagguggaccugaacgaugcuguccucgcccugaccgaccugggccucaucuacacagcgaaguauccuaauagcucugaccuggaucgccuuucccaaagccaucccauucugaacaugguugacaucaaaaaguccucucucaauaucagcggguacaacuuuucccugggagccgcugugaaagccggcgcuugcaugcuugaugggggaaauaugcuggagaccauuaaggugacaccucagaccauggacggcauccucaaaagcauucugaaggucaaaagaucucugggcauguucguguccgauacgcccggggaacggaacccuuaugagaacauccucuacaagauuugucugagcggagacggcuggccguauaucgccucucgcacaagcauuguugggagagcgugggaaaauaccacaguggaucuugaguccgacggaaagccccagaaagucggcucugccgggagcaacaagucccugcagagcgcuggauuuccuaccggccucaccuacucucaacugaugacacugaaagauuccaugaugcagcuugaccccagcgccaagacguggaucgauaucgagggccggccugaagaccccguggagauugcucucuaccagccgaugucugggugcuauauccacuucuuuagagaaccuaccgaccugaaacaguucaagcaagaugccaaguacucccauggaauugacguugccgaucuguuucccgcucagccuggccucacaagcgcggugaucgaggcccugccccgcaauaugguccuuaccugucagggguccgacgauauuaaacggcugcucgacucucagggaagacgcgauaucaagcugaucgacauugcucugagcaaagccgauucccggagauucgaaaacgccgugugggaccaaugcaaggaucuuugucacaugcauacaggcgucgugguugagaaaaagaagcgcgggggcaaagaggaaaucacgccccacugcgcucucauggacuguauuauguaugaugccgcggugucuggaggccugaauaucccuguccugcgggcugugcucccgagagacaugguuuuucgcaccagcucccccaaggugguccugugaggacuaguuauaagacugacuagcccgaugggccucccaacgggcccuccuccccuccuugcaccgagauuaauaaaaaaaaaaaaaaaaaaaaaaaaaaaaaaaaaaaaaaaaaaaaaaaaaaaaaaaaaaaaaaaaaaaaaaaaaaaaaaaaaaaaaaaaaaaaaaaaaaaa

SEQ ID NO: 20673 - RNA, 1950 nt, Artificial Sequence
  mRNA product Design i-3 (A100) comprising derived and/or modified sequence from LASV(LASV253-NIG-2011;Clade II)__AIT17671__SP-HsALB_NP(2-569) (opt5)
aggagaaagcuuaccaugaagugggugaccuucaucagccugcucuuucuguucuccucugccuacagcagcgccuccaaggaggugaaaucuuuccuguggacccagagccucagacgggaacuguccggcuacugcucuagcaucaaacuucaagucguuaaggacgcucaggcccugcuccacgggcuggauuuuuccgaggugucuaacgugcagcgccuuaugagaaagcagaaacgggacgauagcgaccugaagcgccucagagaucugaaucaagcggucaacaaucugguggaacucaaguccacccagcagaaaagcguucugcgggugggaacgcuuaccucugacgaucugcucacacuggcugccgaccuugagaagcugaaauccaaggucauucgcaccgaaagaccccucagcucuggcguguauauggggaaccuguccacacagcaacuggagcagcggcgcgcccuccugaauaugaucggaaugguuggcggggcucagggaacccagccuggcagagauggcgugguccgggugugggacgugaaaaacccggaucuucugaauaaccaauucgggacaaugcccagccucacccuggccugucuuacgaagcagggacaggucgaccugaaugauguugugcucgcucugaccgaccugggccucauuuacacagccaaguauccuaacucuuccgaccuggaucgccuuagccaaucccaucccauccugaauaugguggacaccaaaaagucuagccucaacauuuccggguacaauuuuagccugggagcggccgucaaagcuggcgccugcaugcuugaugggggaaacaugcuggagacaaucaaggugaccccucagacgauggacggcauccucaaaucuauucugaagguuaaaaagucccugggcauguucgugagcgauacacccggggaaagaaauccuuaugagaacauccucuacaagauuugucugucuggagacggcuggccguauaucgcuagccggaccuccauugucgggcgcgccugggaaaacacaaccguggaucuugagucugacggaaaaccccagaagguuggcaccgcggggagcaauaaaucccugcagagcgccggauuuccuacaggccucacguacucucaacugaugacccugaaggauuccaugaugcagcuugaccccagcgcuaaaacauggaucgauauugagggcagaccugaagaccccguggagaucgcccucuaccagccgaugucugggugcuauauccacuucuuucgggaaccuaccgaccugaagcaguucaagcaagaugcuaaauacucccauggaauugacgucacagaucuguuucccgcccagccuggccucaccagcgccgugaucgaggcucugcccagaaacaugguccuuacgugucagggguccgacgauauuaagcgccugcucgacucucagggacggagagauaucaaacugauugacaucgcgcugagcaaggccgauucccgccgguucgaaaaugcugugugggaccaaugcaaagaucuuugucacaugcauacaggcguuguggucgagaagaagaaaagagggggcaaggaggaaaucacaccccacugcgcccucauggacuguauuauguaugaugccgcugugucuggaggccugaacaucccuguucugcgcgccgugcucccgcgggacauggucuuuagaaccagcucccccaaaguggugcugugaggacuaguuauaagacugacuagcccgaugggccucccaacgggcccuccuccccuccuugcaccgagauuaauaaaaaaaaaaaaaaaaaaaaaaaaaaaaaaaaaaaaaaaaaaaaaaaaaaaaaaaaaaaaaaaaaaaaaaaaaaaaaaaaaaaaaaaaaaaaaaaaaaaa

SEQ ID NO: 20674 - RNA, 1950 nt, Artificial Sequence
  mRNA product Design i-3 (A100) comprising derived and/or modified sequence from LASV(LASV254-NIG-2011;Clade II)__AIT17675__SP-HsALB_NP(2-569) (opt5)
aggagaaagcuuaccaugaagugggugaccuucaucagccugcucuuucuguucuccucugccuacagcagcgccuccaaggaggugaaaucuuuccuguggacccagagccucagacgggaacuguccggcuacugcucuagcaucaaacuucaagucguuaaggacgcucaggcccugcuccacgggcuggauuuuuccgaggugucuaacgugcagcgccuuaugagaaagcagaaacgggacgauagcgaccugaagcgccucagagaucugaaucaagcggucaacaaucugguggaacucaaguccacacagcagaaaagcguucugcgggugggaacgcuuaccucugacgaucugcucacacuggcugccgaccuugagaagcugaaauccaaggucauucgcaccgaaagaccccucagcucuggcguguauauggggaaccuguccacacagcaacuggagcagcggcgcgcccuccugaauaugaucggaaugguuggcggggcucagggaacccagccuggcagagauggcgugguccgggugugggacgugaaaaacccggaucuucugaauaaccaauucgggacaaugcccagccucacccuggccugucuuacgaagcagggacaggucgaccugaaugaugcuguucucgcccugaccgaccugggccucauuuacacagcgaaguauccuaacucuuccgaccuggaucgccuuagccaaucccaucccauccugaauaugguggacaccaaaaagucuagccucaacauuuccggguacaauuuuagccugggagccgcugugaaagccggcgcuugcaugcuugaugggggaaacaugcuggagacaaucaaggucaccccucagacgauggacggcauccucaaaucuauucugaaggugaaaaagucccugggcauguucguuagcgauacacccggggaaagaaauccuuaugagaacauccucuacaagauuugucugucuggagacggcuggccguauaucgccagccggaccuccauuguggggcgcgcgugggaaaacacaaucgucgaucuugagucugacggaaaaccccagaaggugggcaccgccgggagcaauaaaucccugcagagcgcuggauuuccuaccggccucacauacucucaacugaugacgcugaaggauuccaugaugcagcuugaccccagcgccaaaaccuggauugauaucgagggcagaccugaagaccccguugagaucgcucucuaccagccgaugucugggugcuauauucacuucuuucgggaaccuacagaccugaagcaguucaagcaagaugccaaauacucccauggaaucgacguggccgaucuguuucccgcucagccuggccucaccagcgcggucauugaggcccugcccagaaacauggugcuuacaugucagggguccgacgauaucaagcgccugcucgacucucagggacggagagauauuaaacugaucgacaucgcucugagcaaggccgauucccgccgguucgaaaaugccgucugggaccaaugcaaagaucuuugucacaugcauaccggcgugguuguggagaagaagaaaagagggggcaaggaggaaauuacgccccacugcgcucucauggacuguaucauguaugaugccgcggucucuggaggccugaacauuccugugcugcgcgcuguucucccgcgggacaugguguuuagaacaagcucccccaaagucgugcugugaggacuaguuauaagacugacuagcccgaugggccucccaacgggcccuccuccccuccuugcaccgagauuaauaaaaaaaaaaaaaaaaaaaaaaaaaaaaaaaaaaaaaaaaaaaaaaaaaaaaaaaaaaaaaaaaaaaaaaaaaaaaaaaaaaaaaaaaaaaaaaaaaaaa

SEQ ID NO: 20675 - RNA, 1950 nt, Artificial Sequence
  mRNA product Design i-3 (A100) comprising derived and/or modified sequence from LASV(Nig08-04;Clade II)__ADU56611__SP-HsALB_NP(2-569) (opt5)
aggagaaagcuuaccaugaagugggugaccuucaucagccugcucuuucuguucuccucugccuacagcagcgccuccaaggaggugaaaucuuuccuguggacccagagccucagacgggaacuguccggcuacugcucuaacaucaaacuucaagucguuaaggacgcucaggcccugcuccacgggcuggauuuuagcgagguguccaaugugcagcgccuuaugagaaagcagaaacgggacgauggagaccugaagcgccucagagaucugaaccaagcggucaauaaccugguggaacucaagucuacccagcagaaaagcguucugcgggugggcacgcuuaccuccgacgaucugcucacacuggcugccgaccuugagaagcugaaaagcaaggucauucgcaccgaaagaccccucucuuccgggguguauaugggaaaucugagcacacagcaacuggagcagcggaaagcccuccugucuaugaucggcaugguugggggagcucagggcacccagccuggccgcgaugggguggucagagugugggacgugaagaacccggaucuucugaauaaccaauucggaacaaugcccucccucacccuggccugucuuacgaagcagggccaggucgaccugaaugaugcuguucucgcccugaccgaccuggggcucauuuacacagcgaaauauccuaacagcucugaccuggaucggcuuucccaaagccaucccauccugaauaugguggacaccaagaaauccucucucaacauuagcggauacaauuuuucccugggcgccgcugugaaggccggggcuugcaugcuugauggaggcaacaugcuggagacaaucaaagucaccccucagacgauggacggcauccucaagagcauucugaaagugaagcgcucucuggggauguucguuuccgauacacccggagaaagaaauccuuaugagaacauccucuacaagauuugucugagcggcgacggguggccguauaucgccucucggaccagcauugugggacgcgcgugggaaaacacaaccgucgaucuugaguccgacggcaaaccccagaagguggggaccgccggaucuaauaaaagccugcaguccgcuggcuuuccuacaggccucacguacagccaacugaugacccugaaggauucuaugaugcagcuugaccccuccgccaaaacauggaucgauauugaggggagaccugaagaccccguugagaucgcucucuaccagccgaugagcggaugcuauauccacuucuuucgggaaccuaccgaccugaagcaguucaagcaagaugccaaauacucucauggcauugacgugacagaucuguuuuccgcccagcccgggcucaccagcgcugucaucgaggcgcugccuagaaacauggugcuuacgugucagggauccgacgauauuaagaaacugcucgacucucagggccgccgggauaucaagcugauugacaucagccugaauaaagccgauuccagacgcuucgaaaacgcugucugggaccaaugcaaggaucuuugucacaugcauacaggggugguuguggagaagaaaaagcggggcggaaaagaggaaaucacaccccacugcgcccucauggacuguauuauguuugaugccgcugucucuggcgggcugaauauccccauucugagagccgugcucccucgcgacaugguuuuccggaccagcuccccgaaggugguccugugaggacuaguuauaagacugacuagcccgaugggccucccaacgggcccuccuccccuccuugcaccgagauuaauaaaaaaaaaaaaaaaaaaaaaaaaaaaaaaaaaaaaaaaaaaaaaaaaaaaaaaaaaaaaaaaaaaaaaaaaaaaaaaaaaaaaaaaaaaaaaaaaaaaa

SEQ ID NO: 20676 - RNA, 1953 nt, Artificial Sequence
  mRNA product Design i-3 (A100) comprising derived and/or modified sequence from LASV(GA391;Clade III)__AAA46284__SP-HsALB_NP(2-570) (opt5)
aggagaaagcuuaccaugaagugggugaccuucaucagccugcucuuucuguucuccucugccuacagcagcgccuccaaggaggugagaucuugccuguggacccagagccuccggcgcgaacuguccggcuacuguucuaacaucaaacuucaagucguuaaggacgcucaggcccugcuccacgggcuggauuucagcgagguguccaaugugcagagacuuaugcggaaacagaagcgcgacgauggagaccugaaaagacuccgggaucugaaccaagcggucaauaaccugguggaacucaagucuacacagcagaaaagcguucugcgcgugggcacgcuuuccagcgacgaucugcucauucuggcugccgaccuugagaaacugaagucuaaagucaccagaacagaacggccccucuccagcgggguguauaugggaaaucugucuucccagcaacuggaucagcgcagagcccuccugaacaugaucggcaugaccgggguuagcggaggcggcaagggggcuucuaauggaauugugcgggucugggacgugaaaaacgccgagcuucugaauaaccaguuuggcacaaugccuucccucacccuggcuugccuuacaaagcaggggcaaguggaucugaaugacgccguccaggcgcucaccgaucugggacugaucuacacggccaaguauccgaacagcuccgaccucgaccgccugucucagagccaucccauucuuaauaugaucgauaccaaaaaguccagccugaacaucucuggcuacaauuucucccucggggcugccguuaaagcuggagccuguaugcuggacggcggcaacaugcuugagacaauuaaggugagcccucaaaccauggaugggauccugaaaucuauucucaaggugaaaaagagccugggaauguuugucuccgacacacccggcgaaagaaacccuuaugagaauauccuguacaagauuugccucucuggggauggauggagcuauaucgcgucccggaccagcauugugggccgcgccugggaaaacacgguuguggaccuggagcaggauaauaaaccccagaagaucgggaacggaggcucuaauaaaucccuucagagcgcuggcuucgccgcugggcugaucuacucucaacucaugacacugaaggacuuuaaauguuucaaccugauuccuaaugccaagaccuggauggauaucgagggaagaccggaagaccccgucgagauugcccuuuaccagccuuccagcggcugcuaugugcacuuuuuccgggaacccacagaucucaagcaguuuaaacaggacgcuaaguacucccaugggagagacguuaccgaucuguucgcggcccaaccuggacugaccucugcugugaucgaggcccucccccgcaacauggucauuacaugucagggcagcgaagacauccggaaacugcuugagucccaggggagacgcgauaucaagcugauugacaucacgcucucuaaagccgauagccggaaguuugagaaugcugugugggaccaguucaaggaucugugccacaugcauaccggcgucgugguugaaaagaagaaaagaggaggcaaggaggaaauuacaccgcacugugcccugauggacugcaucauguuugaugcggcuguguccgggggacuugacgccaaaguccuccgcgugguucugccucgggauaugguguucagaaccagcacacccaaggucgugcugugaggacuaguuauaagacugacuagcccgaugggccucccaacgggcccuccuccccuccuugcaccgagauuaauaaaaaaaaaaaaaaaaaaaaaaaaaaaaaaaaaaaaaaaaaaaaaaaaaaaaaaaaaaaaaaaaaaaaaaaaaaaaaaaaaaaaaaaaaaaaaaaaaaaa

SEQ ID NO: 20677 - RNA, 1950 nt, Artificial Sequence
  mRNA product Design i-3 (A100) comprising derived and/or modified sequence from LASV(Nig08-A19;Clade III)__ADU56619__SP-HsALB_NP(2-569) (opt5)
aggagaaagcuuaccaugaagugggugaccuucaucagccugcucuuucuguucuccucugccuacagcagcgccuccaaggaggugaaaucuuuccuguggacccagagccucagacgggaacuguccggcuacugcucuaacaucaaacuucaagucguuaaggacgcucaggcccugcuccacgggcuggauuuuagcgagguguccaaugugcagcgccuuaugagaaagcagaaacgggacgauggagaccugaagcgccucagagaucugaaccaagcggucaauaaccugguggaacucaagucuacacagcagaaaagcguucugcgggugggcacgcuuuccagcgacgaucugcucguccuggcugccgaccuugagaagcugaaaucuaaggugguucgcaccgaaagaccccucuccagcgggauuuauaugggaaaucugucuucccagcaacuggaucagcggaaagcccuccugaacaugaucggcaugacagggggaaauggcggccgcaacaccacaagcgacgggauugugagagucugggaugugaagaaugcugagcuucugaacaaucaguucggaaccaugccuucucucacacuggccugucuuaccaagcagggccaaguggaccugaacgaugcuguccaggcccucacggaccuggggcugaucuacaccgcgaaauaucccaauuccagcgaccucgaucggcuggcccagucccauccgauucuuaacaugaucgacacaaagaaaucuagccugaauaucuccggauacaacuuuagccucggcgcugccguuaaggcuggggccugcaugcuggauggaggcaacaugcuugagaccauuaaagugucuccucaaacaauggacggcauccugaaguccauucucaaagugaagcgcagccuggggauguucaucucugauacccccggagaaagaaauccuuaugagaacauucuguacaagaucugucucagcggcgacggguggcccuauauugcgucccggacgucuaucgucggacgcgccugggaaaauacagugguugaucuggagagcgacaacaaaccucagaagaccggcaaugggggauccaacaaaagccuucagucugcuggcuuugccgcuggccugacauacucccagcucaugacccugaaggauagcaugcugcaacuugacccgaaugccaaaaccuggauggauaucgaggggagacccgaagacccuguggagauugcccucuaccagcccucuuccggaugcuauauccacuucuuucgggaaccuacagaccugaagcaguucaagcaggaugcuaaauacagccauggcauugacgucacggaucuguuugcggcccaacccgggcucaccuccgcugugaucgaggcccugccgagaaacaugguuauuacaugucagggaucugaagacauccgcaaacuucuggagagccagggccggagagauaucaagcucauugacaucucccugucuaagguggauagccgcaaauucgagaaugccgucugggaccaguuuaaggaucugugccacaugcauaccgggauuguggucgaaaagaaaaagcggggcggaaaagaggaaaucacaccucacugugcucuuauggacugcauuauguucgaugccgcgguguccggcgggguugacgcuaaggugcucagagccguccugccccgcgauaugguguuucggaccagcacgccuaaaguugugcugugaggacuaguuauaagacugacuagcccgaugggccucccaacgggcccuccuccccuccuugcaccgagauuaauaaaaaaaaaaaaaaaaaaaaaaaaaaaaaaaaaaaaaaaaaaaaaaaaaaaaaaaaaaaaaaaaaaaaaaaaaaaaaaaaaaaaaaaaaaaaaaaaaaaa

SEQ ID NO: 20678 - RNA, 1950 nt, Artificial Sequence
  mRNA product Design i-3 (A100) comprising derived and/or modified sequence from LASV(G1180-SLE-2010;Clade IV)__AIT17169__SP-HsALB_NP(2-569) (opt5)
aggagaaagcuuaccaugaagugggugaccuucaucagccugcucuuucuguucuccucugccuacagcagcgccuccaaggagaucaaaucuuuccuguggacccagagccucagacgggaacuguccggcuacugcucuaacauuaagcugcaaguggucaaagacgcucaggcccugcuccacgggcuggauuuuagcgagguuuccaaugugcagcgccuuaugagaaaggaacggcgcgacgauaacgaccugaaaagacuccgggaucugaaucaggcggugaacaaucuggucgagcucaagucuacacaacaaaagagcauccugcgcgugggaacgcuuaccuccgacgaucugcucauucuggcugccgaccuugaaaaacuuaagagcaaaguuaucagaacagagcggccccucucugccggcguguauauggggaaccuguccagccagcagcuggaucagcgcagagcucuccugucuaugauuggaauguccagcggcaaucagcgggcccaggcugggcgcgacggagucgugagaguuugggaugugaagaacgucgagcuucugaauaaccaguucggcaccaugccuucucucacacuggccugucuuaccaaacaaggccagguggaccugaaugaugcggugcaggcccucacagaccuggggcugaucuacaccgcuaaguauccgaacacguccgaccucgaucggcugacccaaagccaucccauccuuaauaugauugacacaaagaaauccucucugaacaucagcggauacaauuuuucccucggcgccgcugucaaggccggggcgugcaugcuggauggaggcaacaugcuugaaaccauuaaaguuagcccucagacaauggacgggauccugaagucuauucucaaagugaagaaagcccugggaauguucaucuccgauacccccggcgagcgcaacccuuaugaaaauauucuguacaagaucugucucagcggcgacggguggcccuauaucgcuucuagaacgagcauuacaggacgggccugggagaacaccguggucgaucuggaguccgacggcaagccucagaaagcugggucuaauaacagcaauaagucccuucagagcgugggauuuacagccggccugaccuacucucaacucaugacccugaaagaugccaugcugcagcuugacccgaacgcuaagacauggauggauaucgaagggagacccgaggacccuguugaaauugcgcucuaccagcccuccagcggaugcuauauccacuucuuucgcgagccuacggaccugaaacaguucaagcaagaugccaaguacucucauggcauugacgugaccgaucuguuugcugcccagcccggccucacauccgccgucaucgacgcucugccgcggaauauggugaucaccugucaggggagcgaugacauuagaaaacuucuggaaucccagggacgcaaggauaucaaacucauugacaucgcccugucuaagacagauagccggaaauaugagaacgcgguuugggaccaauacaaggaucugugccacaugcauaccggcguggucguggagaagaaaaagagagggggaaaagaagagauuacgccucacugugcucuuauggacugcaucauguucgaugccgccgucuccggcgggcucaauacaucugugcugcgcgcuguucugccccgggacaugguguuuagaaccagcaccccucgcgucgugcucugaggacuaguuauaagacugacuagcccgaugggccucccaacgggcccuccuccccuccuugcaccgagauuaauaaaaaaaaaaaaaaaaaaaaaaaaaaaaaaaaaaaaaaaaaaaaaaaaaaaaaaaaaaaaaaaaaaaaaaaaaaaaaaaaaaaaaaaaaaaaaaaaaaaa

SEQ ID NO: 20679 - RNA, 1950 nt, Artificial Sequence
  mRNA product Design i-3 (A100) comprising derived and/or modified sequence from LASV(G1442-SLE-2011;Clade IV)__AIT17181__SP-HsALB_NP(2-569) (opt5)
aggagaaagcuuaccaugaagugggugaccuucaucagccugcucuuucuguucuccucugccuacagcagcgccuccaaggaggugaaaucuuuccuguggacccagagccucagacgggaacuguccggcuacugcucuaacaucaaacuucaagucguuaaggacgcucaggcccugcuccacgggcuggauuuuagcgagguguccaaugugcagcgccuuaugagaaagcagcggcgcgacgauaacgaccugaaaagacuccgggaucugaaucaagcggucaacaaucugguggaacucaagucuacacagcaaaagagcguucugcgcgugggaacgcuuaccuccgacgaucugcucguccuggcugccgaccuugagaaacuuaagagcaaagugauuagaacagaacggccccucucugccggcguuuauauggggaaccuguccagccagcagcuggaucagcgcagagcucuccugaauaugaucggaaugucuggcgggauucagggaacccggacaggccgcgacggcguggucagagugugggaugugaagaacgccgaccuucugaauaaccaguucgggaccaugccuucccucacacuggcuugucuuaccaaacaaggacaggucgaucugaaugacguugugcaggcccucacggaccugggccugaucuacaccgcgaaguauccgaacgccagcgaucucgaccggcugacacaaucucaucccauucuuaauaugaucgauaccaagaaauccagccugaacaucuccggguacaauuuuucucucggagcugccgugaaggcuggcgccugcaugcuggacgggggaaacaugcuugagacaauuaaagucagcccucagaccauggauggcauccugaaguccauucucaaagugaagaaaacgcugggcauguucaucagcgacacacccggggagcgcaacccuuaugaaaauauucuguacaagaucugucucucuggagauggcuggcccuauauugcguccagaaccagcaucacagggcgggccugggagaacaccguuguggaccuggaaucugauggaaagccucagaaagcuggcagcaauaacuccaauaagucucuucagagcgccggguuugcugccggacugaccuacucccaacucaugacacugaaagacgccaugcugcagcuugauccgaacgcuaagacguggauggacaucgagggcagacccgaggacccugucgaaauugcgcucuaccagcccagcucuggcugcuauauccacuucuuucgcgagccuaccgaucugaaacaguucaagcaagacgccaaguacucccaugggauugaugugacagaccuguuugcugcccagcccggacucaccagcgccguuaucgaagcucugccgcggaauauggugauuacaugucagggcucugaugacaucaaaaagcugcuggagucccaggggagaaaagauaucaagcucauugacaucgcccugagcaaaaccgauucccgcaaguaugaaaacgcggucugggaccaauacaaggaucugugccacaugcauacgggaguggucguggagaaaaagaaacggggcgggaaggaggaaauuacaccucacugugcucuuauggacugcaucauguucgaugccgccguuucuggcggacucaauacccuggugcugagagcuguccucccccgcgacaugguguuucggaccagcacaccuagaguugugcugugaggacuaguuauaagacugacuagcccgaugggccucccaacgggcccuccuccccuccuugcaccgagauuaauaaaaaaaaaaaaaaaaaaaaaaaaaaaaaaaaaaaaaaaaaaaaaaaaaaaaaaaaaaaaaaaaaaaaaaaaaaaaaaaaaaaaaaaaaaaaaaaaaaaa

SEQ ID NO: 20680 - RNA, 1950 nt, Artificial Sequence
  mRNA product Design i-3 (A100) comprising derived and/or modified sequence from LASV(G3010-SLE-2013;Clade IV)__AIT17345__SP-HsALB_NP(2-569) (opt5)
aggagaaagcuuaccaugaagugggugaccuucaucagccugcucuuucuguucuccucugccuacagcagcgccuccaaggagaucaaaucuuuccuguggacccagagccucagacgggaacuguccggcuacugcucuaacauuaaacuucaaguggucaaagacgcucaggcccugcuccacgggcuggauuuuagcgagguuuccaaugugcagcgccuuaugagaaaggaacggcgcgacgauaacgaccugaaaagacuccgggaucugaaucaggcggugaacaaucuggucgagcucaagucuacacaacaaaagagcauccugcgcgugggaacgcuuaccuccgacgaucugcucauucuggcugccgaccuugaaaaacuuaagagcaaaguuacaagaaccgagcggccccucucugccggcguguauauggggaaccuguccagccagcagcuggaucagcgcagagcucuccugucuaugaucggaauguccagcggcguccagggggcccgggcuggacgcgacggcgugguuagagugugggaugucaagaaugccgagcuucugaacaaucaguucggcacaaugccuucucucacccuggcgugucuuacaaaacaggggcaaguggaccugaacgaugugguccaggcccucaccgaccugggacugauuuacacggcuaaguauccgaauaccuccgaccucgaucggcugacacagagccaucccauccuuaacaugaucgacaccaagaaauccucucugaauauuagcggcuacaacuuuucccucggggccgcuguuaaggccggagcgugcaugcuggauggcgggaauaugcuugaaacaaucaaagugagcccucaaaccauggacggcauucugaagucuauccucaaagugaagaaagcccugggaauguucauuuccgagacgcccggcgaacgcaacccuuaugagaacauccuguacaagauuugucucagcggggauggauggcccuauaucgcuucuagaacaagcaucaccggccgggccugggagaauacagucguggaccuggaauccgaugggaagccucagaaagcuggaucuaacaauagcaacaagucccuucagagcgccggcuuuaccgccgggcugaccuacucucagcucaugacacugaaagacgcuaugcugcaacuugauccgaaugcgaagacguggauggacauugagggaagacccgaagauccuguugagguggcccucuaccagcccuccagcggcugcuauauccacuucuuucgcgaaccuaccgaccugaaacaguucaagcaggacgcuaaguacucucauggcauugaugucacagaccuguuugccgcccaacccgggcucaccuccgcugugaucgaugcccugccgcggaacaugguuauuacaugucagggaagcgacgauaucaaaaagcugcuggagucccagggcagaaaagacaucaagcucauugauaucgcgcugucuaaaaccgacagccgcaaguaugagaaugcugugugggaucaguacaaggaccugugccacaugcauacgggggucguggucgaaaagaagaaacggggaggcaaggaggaaauuacaccucacugugcccuuauggauugcaucauguucgacgccgcuguguccgggggccucaacaccucuguucugagagccgugcugccccgcgauauggucuuucggaccagcacaccuagagugguucucugaggacuaguuauaagacugacuagcccgaugggccucccaacgggcccuccuccccuccuugcaccgagauuaauaaaaaaaaaaaaaaaaaaaaaaaaaaaaaaaaaaaaaaaaaaaaaaaaaaaaaaaaaaaaaaaaaaaaaaaaaaaaaaaaaaaaaaaaaaaaaaaaaaaa

SEQ ID NO: 20681 - RNA, 1950 nt, Artificial Sequence
  mRNA product Design i-3 (A100) comprising derived and/or modified sequence from LASV(G502-SLE-2009;Clade IV)__AIT17127__SP-HsALB_NP(2-569) (opt5)
aggagaaagcuuaccaugaagugggugaccuucaucagccugcucuuucuguucuccucugccuacagcagcgccuccaaggagaucaaaucuuuccuguggacccagagccucagacgggaacuguccggcuacugcucuaacauuaagcugcaaguggucaaagacgcucaggcccugcuccacgggcuggauuuuagcgagguuuccaaugugcagcgccuuaugagaaaggaacggcgcgacgauaacgaccugaaaagacuccgggaucugaaucaggcggugaacaaucuggucgagcucaagucuacacaacaaaagagcauccugcgcgugggaacgcuuaccuccgacgaucugcucauucuggcugccgaccuugaaaaacuuaagagcaaaguuaucagaacagagcggccccucucugccggcguguauauggggaaccuguccagccagcagcuggaucagcgcagagcucuccugucuaugauuggaauguccggcgggaaucagggaguccgggccggcaaggacggcgugguucgcgugugggaugucaaaaacgcugagcuucugaauaaccaguucgggaccaugccuagccucacacuggccugucuuaccaagcagggacaaguggaccugaaugaugcggugcaggcccucacagaccugggccugaucuacaccgcuaaguauccgaacacgucugaccucgauagacugacccagucccaucccauccuuaauaugauugacaccaaaaagagcucccugaacaucucuggguacaauuuuagccucggagccgcugucaaagccggcgcgugcaugcuggaugggggaaacaugcuugaaacaauuaagguuuccccucaaacaauggacggcauccugaaaagcauucucaaggugaaaaaggcccugggcauguucaucucugauacccccggggagcggaacccuuaugaaaauauucuguacaagaucugucucuccggagacggcuggcccuauaucgcuagccgcacgucuauuacagggagagccugggagaacaccguggucgaucuggagagcgacggaaaaccucagaaggcuggcuccaauaacucuaauaaaagccuucaguccgccggguuuacagccggacugaccuacagccagcucaugacccugaaggaugcuaugcugcaacuugacccgaacacaaaaacguggauggauaucgaaggccggcccgaggacccuguggaaauugcgcucuaccagcccucuuccggcugcuauauccacuucuuuagagagccuaccgaccugaagcaguucaagcaggaugccaaauacagccaugggauugacguuacagaucuguuugcugcccaacccggacucaccucugccgugaucgacgcucugccgcgcaauauggucaucacaugucagggcuccgaugacauucggaaacuucuggaaagccaggggagaaaggauaucaagcucauugacaucgcccugaacaaaaccgauucccgcaaguaugagaaugcggugugggaccaguacaaggaucugugccacaugcauacgggaguuguggucgagaaaaagaaacggggcgggaaggaagagauuacaccucacugugcucuuauggacugcaucauguucgaugccgccgugucuggcggacucaacaccagcguccugagagcugugcugccccgcgacaugguuuuucggaccuccacaccuagagugguccucugaggacuaguuauaagacugacuagcccgaugggccucccaacgggcccuccuccccuccuugcaccgagauuaauaaaaaaaaaaaaaaaaaaaaaaaaaaaaaaaaaaaaaaaaaaaaaaaaaaaaaaaaaaaaaaaaaaaaaaaaaaaaaaaaaaaaaaaaaaaaaaaaaaaa

SEQ ID NO: 20682 - RNA, 1950 nt, Artificial Sequence
  mRNA product Design i-3 (A100) comprising derived and/or modified sequence from LASV(G733-SLE-2010;Clade IV)__AIT17155__SP-HsALB_NP(2-569) (opt5)
aggagaaagcuuaccaugaagugggugaccuucaucagccugcucuuucuguucuccucugccuacagcagcgccuccaaggagaucaaaucuuuccuguggacccagagccucagacgggaacuguccggcuacugcucuaacauuaagcugcaaguggucaaagacgcucaggcccugcuccacgggcuggauuuuagcgagguuuccaaugugcagcgccuuaugagaaaggaacggcgcgacgauaacgaccugaaaagacuccgggaucugaaucaggcggugaacaaucuggucgagcucaagucuacacaacaaaagagcgugcugcgcguuggaacgcuuaccuccgacgaacugcucgugcuggcugccgaucuugagaaacuuaagagcaaagucaucagaacagagcggccccucucugccggcguguauauggggaaccuguccagccagcagcuggaccagcgcagagcucuccugucuaugauuggaauguccggcgggaaucagggagcccggaccggccgcgauggcguugugagagucugggacgugaagaacgcugaacuucugaauaaccaguucgggacaaugccuagccucacccuggccugucuuacaaaacagggacaaguggaucugaaugacgcgguccaggcccucaccgaucugggccugaucuacacggcuaaguauccgaacaccucugaccucgaccggcugacacagucccaucccauucuuaauaugaucgauaccaagaaaagcucccugaacaucucuggguacaauuuuagccucggagccgcuguuaaggccggcgcgugcaugcuggacgggggaaacaugcuugagacaauuaaaguguccccucaaaccauggauggcauccucaagagcauucugaaagugaagaaagcccugggcauguucaucucugacacgcccggggaacgcaacccuuaugagaauauucuguacaagaucugucucuccggagauggcuggcccuauauugcuagcagaacaucuaucaccgggcgggccugggagaacacagucguggaccuggaaagcgauggaaagccucagaaagcuggcuccaauaacucuaauaagagccuucaguccgccggguuuaccgccggacugaccuacagccagcucaugacacugaaagacgcuaugcugcaacuugauccgaacgcgaagacguggauggacaucgagggcagacccgaagauccuguugagauugcccucuaccagcccucuuccggcugcuauauccacuucuuucgcgaaccuaccgaccugaaacaguucaagcaggacgcuaaguacagccaugggauugaugugacagaccuguuugccgcccaacccggacucaccucugcugucaucgaugcccugccgcggaauauggugauuacaugucagggcuccgacgauaucagaaaacuucuggagagccaggggcgcaaggacaucaaacucauugauaucgcgcuguccaagauugacucucggaaauaugagaacgcuguuugggaucaguacaaggaccugugccacaugcauaccggaguggucguggaaaagaaaaagagaggcgggaaagaggaaaucacgccucacugugcccuuauggauugcauuauguucgacgccgcugucagcggcggacucaauucccuggugcugcgcgccguucucccccgggauaugguguuuagaacaucuaccccucgcgucgugcugugaggacuaguuauaagacugacuagcccgaugggccucccaacgggcccuccuccccuccuugcaccgagauuaauaaaaaaaaaaaaaaaaaaaaaaaaaaaaaaaaaaaaaaaaaaaaaaaaaaaaaaaaaaaaaaaaaaaaaaaaaaaaaaaaaaaaaaaaaaaaaaaaaaaa

SEQ ID NO: 20683 - RNA, 1950 nt, Artificial Sequence
  mRNA product Design i-3 (A100) comprising derived and/or modified sequence from MOPV/LASV reassortant(IGS-1;Clade IV)__AFY05578__SP-HsALB_NP(2-569) (opt5)
aggagaaagcuuaccaugaagugggugaccuucaucagccugcucuuucuguucuccucugccuacagcagcgccuccaaggagaucaaaucuuuccuguggacccagagccucagacgggaacuguccggcuacugcucuaacauuaaacuucaaguggucaaggacgcucaggcccugcuccacgggcuggauuuuagcgagguuuccaaugugcagcgccuuaugagaaaggaacggcgcgacgauaacgaccugaaaagacuccgggaucugaaucaggcggugaacaaucuggucgagcucaagucuacacaacaaaagagcauccugcgcgugggaacgcuuaccuccgacgaucugcucauucuggcugccgaccuugaaaaacugagaagcaagguuauccggacagagcgcccccucucugccggcguguauauggggaaccuguccagccagcagcuggaucagagacgggcucuccugaauaugauuggaaugucuggcgggaaccagggagcccgcgcuggcagagacggcgucgugcggguuugggaugugaaaaaugccgagcuucuguccaaccaguucgggaccaugccuagccucacacuggcgugucuuaccaagcagggacaagucgaccugaaugaugccgugcaggcucucacagaccugggccugaucuacaccgccaaauauccgaacacgucugaccucgaucgccugacccagucccaucccauccuuaauaugauugacacaaagaaaagcucccugaacaucucuggguacaauuuuagccucggagcugccgugaaggcgggcgccugcaugcuggaugggggaaacaugcuugaaaccauuaaggucuccccucaaacaauggacggcauccugaaaagcauucucaagguuaaaaaggcucugggcauguucaucucugauacccccggggagagaaacccuuaugaaaauauucuguacaaaaucugucucuccggagacggcuggcccuauaucgccagccggacgucuauuacagggagagcuugggagaacaccgugguggaucuggagagcgacggaaagccucagaaggccgauuccaauaacucuagcaaaucccuucagagcgccggcuuuacagcugggcugaccuacucucagcucaugacccugaaggacgcgaugcugcaacuugauccgaaugccaaaacauggauggacaucgaaggacgccccgaggacccugucgaaauugcucucuaccagcccuccagcggcugcuauauccacuucuuucgggagccuacggaucugaagcaguucaaacaggacgccaaguacucucauggcauugaugugaccgaccuguuugccacacaacccgggcucaccuccgcuguuaucgaugcccugccgagaaacauggugaucacaugucagggaagcgacgauauucgcaaacuucuggaaucccagggccggaaggacaucaagcucauugauaucgaccugucuaaaaccgauagcagaaaguaugagaaugcggucugggaccaguacaaagaucugugccacaugcauacgggggugguuguggagaagaagaaacgcggaggcaaggaagagauuacaccucacugugcucuuauggacugcaucauguucgacgccgccgucuccgggggccucaacaccucugugcugcgggcuguccugcccagagauaugguguuucgcaccagcacaccucggguugugcucugaggacuaguuauaagacugacuagcccgaugggccucccaacgggcccuccuccccuccuugcaccgagauuaauaaaaaaaaaaaaaaaaaaaaaaaaaaaaaaaaaaaaaaaaaaaaaaaaaaaaaaaaaaaaaaaaaaaaaaaaaaaaaaaaaaaaaaaaaaaaaaaaaaaa

SEQ ID NO: 20684 - RNA, 1950 nt, Artificial Sequence
  mRNA product Design i-3 (A100) comprising derived and/or modified sequence from LASV(LM765-SLE-2012;Clade IV)__AIT17815__SP-HsALB_NP(2-569) (opt5)
aggagaaagcuuaccaugaagugggugaccuucaucagccugcucuuucuguucuccucugccuacagcagcgccuccaaggagaucaaaucuuuccuguggacccagagccucagacgggaacuguccggcuacugcucuaacauuaagcugcaaguggucaaagacgcucaggcccugcuccacgggcuggauuuuagcgagguuuccaaugugcagcgccuuaugagaaaggaacggcgcgacgauaacgaccugaaaagacuccgggaucugaaucaggcggugaacaaucuggucgagcucaagucuacacaacaaaagagcauccugcgcgugggaacgcuuaccuccgacgaucugcucauucuggcugccgaccuugaaaaacuuaagagcaaaguuacaagaaccgagcggccccucucugccggcguguauauggggaaccuguccagccagcagcuggaucagcgcagagcucuccuggacaugaucggaaugucuggcuccaaucagggggcccgggcuggacgcgauggcgucgugagaguuugggacgugaagaacgccgagcuucugaauaaccaguucggcacaaugccuagccucacccuggcgugucuuacaaaacaggggcaagucgaucugaaugacgccgugcaggcucucaccgaccugggacugauuuacacggccaaguauccgaacaccucugaucucgaccggcugacacagucccaucccauccuuaauaugaucgauaccaagaaaagcucccugaacauuucuggcuacaauuuuagccucggggcugccgugaaggcgggagccugcaugcuggacggcgggaacaugcuugaaacaaucaaagucuccccucaaaccauggauggcauucucaagagcauccugaaaguuaagaaagcucugggaauguucauuucugacgcccccggcgagcgcaacccuuaugaaaauauccuguacaagauuugucucuccggggauggauggcccuauaucgcuagcagaacgucuaucacaggccgggccugggagaacaccgugguggaccuggagagcgaugggaagccucagaaagccggauccaauggcucuaacaagagccuucaguccgcuggguuuacagcgggacugaccuacagccagcucaugacccugaaagacgccaugcugcaacuugauccgaaugcuaagacauggauggacauugaaggcagacccgaggacccugucgaaaucgcccucuaccagcccucuuccggcugcuauauucacuucuuucgcgagccuacggaucugaaacaguucaagcaggacgccaaguacagccaugggaucgaugugaccgaccuguuugcugcccaacccggacucacaucugcgguuauugaugcucugccgcggaacauggugaucaccugucagggcuccgacgauaucagaaaacuuuucgaaagccaggggcgcaaggacauuaaacugaucgauauugcccucuccaagacagacucucggaaauaugagaaugccgucugggaucaguacaaggaccugugccacaugcauaccggaaucgugguugagaagaaaaagagaggcgggaaagaagagauuacgccucacugugcucugauggauugcaucauguuugacgccgcugugagcggcggacuuaacacauccguccuccgcgccgugcugccccgggacauggucuucagaaccucuaccccucgcgugguucugugaggacuaguuauaagacugacuagcccgaugggccucccaacgggcccuccuccccuccuugcaccgagauuaauaaaaaaaaaaaaaaaaaaaaaaaaaaaaaaaaaaaaaaaaaaaaaaaaaaaaaaaaaaaaaaaaaaaaaaaaaaaaaaaaaaaaaaaaaaaaaaaaaaaa

SEQ ID NO: 20685 - RNA, 1950 nt, Artificial Sequence
  mRNA product Design i-3 (A100) comprising derived and/or modified sequence from LASV(LM776-SLE-2012;Clade IV)__AIT17825__SP-HsALB_NP(2-569) (opt5)
aggagaaagcuuaccaugaagugggugaccuucaucagccugcucuuucuguucuccucugccuacagcagcgccuccaaggagaucaaaucuuuccuguggacccagagccucagacgggaacuguccucuuacugcagcaacauuaaacuucaaguggucaaggacgcucaggcccugcuccacggccuggauuuuuccgagguuucuaaugugcagcgccuuaugagaaaggaacggcgcgacgauaacgaccugaaaagacuccgggaucugaaucaggcggugaacaaucuggucgagcucaagagcacacaacagaaguccauccugcgcguggggacgcuuaccagcgacgaucugcucauucuggcugccgaccuugaaaaacugaagucuaaaguuacaagaaccgagcggccccucuccgccggaguguauaugggcaaccugagcucucagcagcuggaucaacgcagagcucuccuguccaugaucgggaugagcggaucuaaucagggcgcccgggcugggcgcgacggagucgugagaguuugggaugugaagaacgccgagcuucugaauaaccaguucggcacaaugccuucccucacccuggcgugucuuacaaaacagggccaagucgaccugaaugaugccgugcaggcucucaccgaccuggggcugauuuacacggccaaguauccgaacaccagcgaccucgaucggcugacacagucccaucccauccuuaauaugaucgacaccaagaaaucuagccugaacauuuccggauacaauuuuagccucggcgcugccgugaaggcgggggccugcaugcuggauggaggcaacaugcuugaaacaaucaaagucucuccucaaaccauggacgggauucugaaguccauccucaaaguuaagaaagcucugggaauguucauuagcgauacgcccggcgagcgcaacccuuaugaaaauauccuguacaagauuugucucucuggcgacggguggcccuauaucgccagcagaacauccaucaccggacgggcuugggagaacacagugguggaucuggagucugacggcaagccucagaaagccgggagcaauaacuccaauaagagccuucagucugccggauuuaccgcuggccugaccuacucccagcucaugacacugaaagaugcgaugcugcaacuugacccgaacgccaagacguggauggauauugaagggagacccgaggacccugucgaaguggcucucuaccagcccagcucuggaugcuauauccacuucuuucgcgagccuaccgaccugaaacaguucaagcaggaugccaaguacucccauggcauugacguuacagaucuguuugccgcucaacccggccucaccagcgccgugaucgacgcgcugccgcggaauauggucauuacaugucagggguccgaugacaucagaaaacuucuggaaucucagggacgcaaggauaucaaacucauugacaucgcucugagcaagaccgauucccggaaauaugagaacgccgugugggaccaguacaaggaucugugccacaugcauacgggcguuguggucgagaagaaaaagagagggggaaaagaagagauuacaccucacugugcccuuauggacugcaucauguucgaugcugccgugucuggcgggcucaauaccagcguccugcgcgcugugcugccccgggacaugguuuuuagaaccuccacaccucgcgugguccucugaggacuaguuauaagacugacuagcccgaugggccucccaacgggcccuccuccccuccuugcaccgagauuaauaaaaaaaaaaaaaaaaaaaaaaaaaaaaaaaaaaaaaaaaaaaaaaaaaaaaaaaaaaaaaaaaaaaaaaaaaaaaaaaaaaaaaaaaaaaaaaaaaaaa

SEQ ID NO: 20686 - RNA, 1950 nt, Artificial Sequence
  mRNA product Design i-3 (A100) comprising derived and/or modified sequence from LASV(Mad39;Clade IV)__ANH09723__SP-HsALB_NP(2-569) (opt5)
aggagaaagcuuaccaugaagugggugaccuucaucagccugcucuuucuguucuccucugccuacagcagcgccuccaaggagaucaaaucuuuccuguggacccagagccucagacgggaacuguccggcuacugcucuaacauuaagcugcaaguggucaaagacgcucaggcccugcuccacgggcuggauuuuagcgagguuuccaaugugcagcgccuuaugagaaagcagcggcgcgacgauaacgaccugaaaagacuccgggaucugaaucaagcggugaacaaucuggucgaacucaagucuacacagcaaaagagcgugcugcgcguuggaacgcuuaccuccgacgaucugcucacacuggcugccgaccuugagaaacuuaagagcaaagugaccagaacagaacggccccucaccgccggcgucuauauggggaaccugucuucccagcagcuggaucagcgcagagcucuccugaauaugaucggaaugagcggcgggaaccagggagcccggacaggccgcgacggcgugguuagagugugggaugucaagaaugcugagcuucugaacaaucaguucgggaccaugccuucucucacgcuggccugucuuaccaaacaaggacagguggaccugaacgaugugguccaggcgcucacagaccugggccugauuuacaccgccaaguauccgaauacauccgaccucgaucggcugacccaaagccaucccauccuuaacaugauugacacgaauaagucuucccugaacaucagcggguacaacuuuucccucggagcugccguuaaagcuggcgccugcaugcuggaugggggaaauaugcuugagacaaucaaggugucuccucagaccauggacggcauucugaaaagcauccucaaggugaaaaagucccugggcauguucauuagcgauacacccggggaacgcaacccuuaugagaauauccuguacaaaauuugucucucuggagacggcuggcccuauaucgcguccagaaccagcauuaccgggcgggccugggaaaacacagucguggaucuggagucuggaggcaagccucagaaggcugggagcaauaacuccaauaaaucucuucagagcgccggauuugcugccggccugacguacucccaacucaugacccugaaggacgccaugcugcagcuugauccgaacgcuaaaacauggauggacaucgagggcagacccgaagauccuguugagaucgcgcucuaccagcccauuagcgggugcuauauccacuucuuucgcgaaccuaccgaccugaagcaguucaaacaagacgccaaguacucucauggaauugaugugacagaccuguuugcugcccagcccggccucaccuccgccgucaucgaggcucugccgcggaauauggugauuacgugucaggggagcgaugacaucagaaaacuuuucgaaucucagggacgcaaggauaucaagcugauugacaucgcccucuccaaaacagauagccggaaguaugagaacgcgguuugggaccaauacaaagaucugugccacaugcauaccggcguggucguggagaagaagaaaaagggcgggaaagaagagauuaccccucacugugcucugauggacugcaucauguuugaugccgccgucuccggaggccuuaauacacucgugcugagagcuguucugccccgcgacaugguguuccggaccucuacaccuaaggucgugcucugaggacuaguuauaagacugacuagcccgaugggccucccaacgggcccuccuccccuccuugcaccgagauuaauaaaaaaaaaaaaaaaaaaaaaaaaaaaaaaaaaaaaaaaaaaaaaaaaaaaaaaaaaaaaaaaaaaaaaaaaaaaaaaaaaaaaaaaaaaaaaaaaaaaa

SEQ ID NO: 20687 - RNA, 1950 nt, Artificial Sequence
  mRNA product Design i-3 (A100) comprising derived and/or modified sequence from LASV(Z0947-SLE-2011;Clade IV)__AIT17841__SP-HsALB_NP(2-569) (opt5)
aggagaaagcuuaccaugaagugggugaccuucaucagccugcucuuucuguucuccucugccuacagcagcgccuccaaggagaucaaaucuuuccuguggacccagagccucagacgggaacuguccggcuacugcucuaacauuaagcugcaaguggucaaagacgcucaggcccugcuccacgggcuggauuuuagcgagguuuccaaugugcagcgccuuaugagaaaggaacggcgcgacgauaacgaccugaaaagacuccgggaucugaaucaggcggugaacaaucuggucgagcucaagucuacacaacaaaagagcauccugcgcgugggaacgcuuaccuccgacgaucugcucauucuggcugccgaccuugaaaaacuuaagagcaaaguuacaagaaccgagcggccccucucugccggcguguauauggggaaccuguccagccagcagcuggaucagcgcagagcucuccugaauaugaucggaaugucuggcuccaaccagggggcccggacaggacgcgacggcgucgugagaguuugggaugugaagaaugcugagcuucugaacaaucaguucggcaccaugccuagccucacacuggccugucuuaccaaacaggggcaagucgaccugaacgaugcggugcaggcccucacggaccugggacugauuuacaccgcuaaguauccgaauacaucugaccucgaucggcugacccagucccaucccauccuuaacaugaucgacacaaagaaaagcucccugaauauuucuggcuacaacuuuagccucggggccgcugugaaggccggagcgugcaugcuggauggcgggaacaugcuugaaaccaucaaagucuccccucaaacgauggacggcauucucaagagcauccugaaaguuaagaaagcccugggaauguucauuucugaugcucccggcgagcgcaauccuuaugaaaacauccuguacaagauuugucucuccggggacggauggcccuauaucgccagcagaacaucuaucaccggccgggcuugggagaauacagugguggaucuggagagcgacgggaagccucagaaagccggauccaacggcucuaauaagagccuucaguccgccggguuuaccgcuggacugaccuacagccagcucaugacacugaaagaugcgaugcugcaacuugacccgaacgccaagacguggauggauauugaaggcagacccgaggacccugucgaaaucgcucucuaccagcccucuuccggcugcuauauucacuucuuucgcgagccuaccgaccugaaacaguucaagcaggaugccaaguacagccaugggaucgacgugacagaucuguuugccgcucaacccggacucaccucugccguuauugacgcgcugccgcggaauauggugaucacaugucagggcuccgaugacaucagaaaacuuuucgaaagccaggggcgcaaggauauuaaacugaucgacauugcucucuccaagaccgauucucggaaauaugagaacgccgucugggaccaguacaaggaucugugccacaugcauacgggaaucgugguugagaagaaaaagagaggcgggaaagaagagauuacaccucacugugcccugauggacugcaucauguuugaugcugccgugagcggcggacuuaauaccuccguccuccgcgcugugcugccccgggacauggucuucagaaccucuacaccucgcgugguucugugaggacuaguuauaagacugacuagcccgaugggccucccaacgggcccuccuccccuccuugcaccgagauuaauaaaaaaaaaaaaaaaaaaaaaaaaaaaaaaaaaaaaaaaaaaaaaaaaaaaaaaaaaaaaaaaaaaaaaaaaaaaaaaaaaaaaaaaaaaaaaaaaaaaa

SEQ ID NO: 20688 - skipped

SEQ ID NO: 20689 - protein, 586 aa, Artificial Sequence
  derived and/or modified protein sequence (wt) from LASV(Josiah;Clade IV)__NP_694869__SP-IgE_NP(2-569)
MDWTWILFLVAAATRVHSSASKEIKSFLWTQSLRRELSGYCSNIKLQVVKDAQALLHGLDFSEVSNVQRLMRKERRDDNDLKRLRDLNQAVNNLVELKSTQQKSILRVGTLTSDDLLILAADLEKLKSKVIRTERPLSAGVYMGNLSSQQLDQRRALLNMIGMSGGNQGARAGRDGVVRVWDVKNAELLNNQFGTMPSLTLACLTKQGQVDLNDAVQALTDLGLIYTAKYPNTSDLDRLTQSHPILNMIDTKKSSLNISGYNFSLGAAVKAGACMLDGGNMLETIKVSPQTMDGILKSILKVKKALGMFISDTPGERNPYENILYKICLSGDGWPYIASRTSITGRAWENTVVDLESDGKPQKADSNNSSKSLQSAGFTAGLTYSQLMTLKDAMLQLDPNAKTWMDIEGRPEDPVEIALYQPSSGCYIHFFREPTDLKQFKQDAKYSHGIDVTDLFATQPGLTSAVIDALPRNMVITCQGSDDIRKLLESQGRKDIKLIDIALSKTDSRKYENAVWDQYKDLCHMHTGVVVEKKKRGGKEEITPHCALMDCIMFDAAVSGGLNTSVLRAVLPRDMVFRTSTPRVVL

SEQ ID NO: 20690 - protein, 586 aa, Artificial Sequence
  derived and/or modified protein sequence (wt) from LASV(LP;Clade I)__AAF86702__SP-IgE_NP(2-569)
MDWTWILFLVAAATRVHSSNSKEIKSFLWTQSLRRELSGYCSNIKLQVVKDAQALLHGLDFSEVSNVQRLMRKQKRDDADLKRLRDLNQAVNNLVELKSTQQKNVLRVGTLSSDDLITLAADLEKLKSKVIRTERPLSSGVYMGNLSSQQLDQRRALLSMIGMSGGPQGNRTGGDGVVRVWDVKNAELLNNQFGTMPSLTLACLTKQGQVDLNDAVQALTDLGLIYTAKYPNSSDLDMLTQSHPILGMVDTKKSSLNISGYNFSLGAAVKAGACMLDGGNMLETIKVSPQTMDGILKSILKVKRSLGMFISDTPGERNPYENILYKICLSGEGWPYIASRTSITGRAWENTLVDLESDNKPPKLNSAGSNKSLQAAGLNAGLTYSQLMTLKDCMLQLDPSSKTWIDIEGRPEDPVEIALFQPSSGCYIHFFREPTDLKQFKQDAKYSHGIDVTDLFSTQPGLTSAVIEALPRNMVLTCQGSDDIKKLLESQGRRDIKLIDISLSKADSRKFENAVWDQYKDLCHMHTGVVVEKKKRGGKEEITPHCALLDCIMFDAATTGSLNITTLRAVLPRDMVFRTSTPKVVL

SEQ ID NO: 20691 - protein, 586 aa, Artificial Sequence
  derived and/or modified protein sequence (wt) from LASV(803213;Clade II)__AAF86704__SP-IgE_NP(2-569)
MDWTWILFLVAAATRVHSSASKEVKSFLWTQSLRRELSGYCSNIKLQVVKDAQALLHGLDFSEVNNVQRLMRKQKRDDGDLKRLRDLNQAVNNLVELKSTQQKSILRVGTLTSDDLLTLAADLEKLKSKVIRTERPLSSGVYMGNLSTQQLEQRRALLNMIGMVGGAQGTQPGRDGVVRVWDVKNPDLLNNQFGTMPSLTLACLTKQGQVDLNDAVLALTDLGLIYTAKYPNSSDLDRLSQSHPILNMVDTKKSSLNISGYNFSLGAAVKAGACMLDGGNMLETIKVTPQTMDGILKSILKVKRSLGMFVSDTPGERNPYENILYKICLSGDGWPYIASRTSIVGRAWENTTVDLESDGKPQKVGTAGSNKSLQSAGFPTGLTYSQLMTLKDSMMQLDPSAKTWIDIEGRPEDPVEIALYQPMSGCYIHFFREPTDLKQFKQDAKYSHGIDVADLFPAQPGLTSAVIEALPRNMVLTCQGSDDIKKLLDSQGRRDIKLIDISLSKVDSRKFENAVWDQCKDLCHMHTGVVVEKKKRGGKEEITPHCALMDCIMFDAAVSGGLNIPVLRAVLPRDMVFRTSSPKVVL

SEQ ID NO: 20692 - protein, 587 aa, Artificial Sequence
  derived and/or modified protein sequence (wt) from LASV(GA391;Clade III)__CAA36646__SP-IgE_NP(2-570)
MDWTWILFLVAAATRVHSSASKEVRSFLWTQSLRRELSGYCSNIKLQVVKDAQALLHGLDFSEVSNVQRLMRKQKRDDGDLKRLRDLNQAVNNLVELKSTQQKSVLRVGTLSSDDLLILAADLEKLKSKVTRTERPLSSGVYMGNLSSQQLDQRRALLNMIGMTGVSGGGKGASDGIVRVWDVKNAELLNNQFGTMPSLTLACLTKQGQVDLNDAVQALTDLGLIYTAKYPNSSDLDRLSQSHPILNMIDTKKSSLNISGYNFSLGAAVKAGACMLDGGNMLETIKVSPQTMDGILKSILKVKKSLGMFVSDTPGERNPYENILYKICLSGDGWPYIASRTSIVGRAWENTVVDLEQDNKPQKIGNGGSNKSLQSAGFAAGLTYSQLMTLKDFKCFNLIPNAKTWMDIEGRPEDPVEIALYQPSSGCYVHFFREPTDLKQFKQDAKYSHGIDVTDLFAAQPGLTSAVIEALPRNMVITCQGSEDIRKLLESQGRRDIKLIDITLSKADSRKFENAVWDQFKDLCHMHTGVVVEKKKRGGKEEITPHCALMDCIMFDAAVSGGLDAKVLRVVLPRDMVFRTSTPKVVL

SEQ ID NO: 20693 - protein, 586 aa, Artificial Sequence
  derived and/or modified protein sequence (wt) from LASV(AV;Clade V)__CCA30315__SP-IgE_NP(2-569)
MDWTWILFLVAAATRVHSSASKEVKSFLWTQSLRRELSGYCSNIKLQVVKDAQALLHGLDFSEVSNVQRLMRKQRRDDSDLKRLRDLNQAVNNLVELKSTQQKSVLRVGTLSSDDLLTLAADLEKLKSKVTRTERPLSSGVYMGNLSSQQLDQRRALLNLIGMTNGSQGSQAGRDGVVRVWDVKNAELLNNQFGTMPSLTLACLTKQGQVDLNDVVQALTDLGLIYTAKYPNTSDLDRLTQSHPILNMIDTKKSSLNISGYNFSLGAAVKAGACMLDGGNMLETIKVSPQSMDGILKSILKVKRALGMFVSDTPGERNPYENILYKICLSGDGWPYIASRTSIVGRAWENTVVDLETDGKPQKIGSGNSNKSLQSAGFSAGLTYSQLMTLKDAMLQLDPNAKTWMDIEGRPEDPVEVALYQPISGCYIHFFREPTDLKQFKQDAKYSHGIDIADLFAAQPGLTSAVIEALPRNMVITCQGSEDIKKLLESQGRKDIKLIDIALSKIDSRKFENAVWDQYKDLCHMHTGVVVEKKKRGGKEEITPHCALMDCIMFDAAVSGGLNTLVLRAVLPRDMVFRTSTPRVVL

SEQ ID NO: 20694 - protein, 586 aa, Artificial Sequence
  derived and/or modified protein sequence (wt) from LASV(Togo/2016/7082;Clade VI)__AMR44578__SP-IgE_NP(2-569)
MDWTWILFLVAAATRVHSSNSKEVKSFLWTQSLRRELSGYCSNIKLQVVKDAQALLHGLDFSEVSNVQRLMRKQKRDDGDLKRLRDLNQAVNNLVELKSVQQKSILRVGTLTSDDLLTLAADLEKLKSKVTRTERPLSSGVYMGNLSSQQLDQRRALLSMIGMSGGNQNSQPKGDGVVRVWDVKNADLLNNQFGTMPSLTLACLTKQGQVDLNDAVQALTDLGLIYTAKYPNSSDLDRLSQSHPILNMIDTKKSSLNISGYNFSLGAAIKTGACMLDGGNMLETIKVTPQTMDGILKSILKVKRSLGMFISDTPGERNPYENILYKICLSGDGWPYIASRTAIIGRAWENTVVDLESDSKPQKIGSNGSNKSLQSAGFAPGLTYSQLMTLKDSMLQLDPNAKTWIDIEGRPEDPVEVALFQPISGCYIHFFREPTDLKQFKQDAKYSHGIDVTDLFAAQPGLTSAVIEALPRNMVLTCQGSDDIKKLLDSQGRRDIKLIDVSLNKIDSRKFENAVWDQYKDLCHMHTGVVVEKKKKGGKEEITPHCALLDCIMFDAAVSGGLNATVLRAVLPRDMVFRTSSPKVVL

SEQ ID NO: 20695 - protein, 586 aa, Artificial Sequence
  derived and/or modified protein sequence (wt) from LASV(KAK-428;Clade n.d. (VII))__ANH09741__SP-IgE_NP(2-569)
MDWTWILFLVAAATRVHSSNSKEVKSFLWTQSLRRELSGYCTNIKLQVVKDAQALLHGLDFSEVSNVQRLMRKQKRDDNDLKRLRDLNQAVNNLVELKSVQQKSVLKVGTLNSDDLLTLAADLEKLKSKVVRTERPLSSGVYMGNLSSQQLDQRRALLNMIGMAGGSQGNQPSRDGVVRVWDVKNADLLNNQFGTMPSLTLACLTKQGQVDLNDVVLALTDLGLIYTAKYPNSSDLDRLSQNHPVLNMIDVNKSSLNISGYNFSLGAAVKAGACMLDGGNMLETIKISPQTVDGILKSILKVKRALGMFVSDTPGERNPYENILYKVCLSGNGWPYIASRTSIVGRAWENTVVDLESNKNQPKVGNNGSNKMLQSSGFATGLTYSQLMTLRDSMLQLDPTAKTWIDIEGRPEDPVELALFQPSSGCYIHFFREPTDLKQFKQDAKYSHGIDVNDLFSAQPGLTSAVLEALPRNMVLTCQGSDDIRKLLDSQDRKDIKLIDISLSKADARKFENDVWDQFKDLCHMHTGIVVEKKKKGGKQEMTPHCALLDCIMFDAAVSGGLNVPTLRAVLPTDMVFRTITTKVVL

SEQ ID NO: 20696 - protein, 586 aa, Artificial Sequence; identical to SEQ ID NO: 20690
  derived and/or modified protein sequence (wt) from LASV(Pinneo-NIG-1969;Clade I)__AIT17837__SP-IgE_NP(2-569)

SEQ ID NO: 20697 - protein, 586 aa, Artificial Sequence
  derived and/or modified protein sequence (wt) from LASV(ISTH0009-NIG-2011;Clade II)__AIT17405__SP-IgE_NP(2-569)
MDWTWILFLVAAATRVHSSVSKEVKSFLWTQSLRRELSGYCSNIKLQVVKDAQALLHGLDFSEVSNVQRLMRKQKRDDSDLKRLRDLNQAVNNLVELKSTQQKSILRVGTLTSDDLLTLAADLEKLKSKVIRTERPLSSGVYMGNLSTQQLEQRRALLNMIGMVGGAQGTQPGRDGVVRVWDVKNPDLLNNQFGTMPSLTLACLTKQGQVDLNDAVLALTDLGLIYTAKYPNSSDLDRLSQSHPILNMVDIKKSSLNISGYNFSLGAAVKAGACMLDGGNMLETIKVTPQTMDGILKSILKVKRSLGMFVSDTPGERNPYENILYKICLSGDGWPYIASRTSIVGRAWENTTVDLESDGKPQKVGSAGSNKSLQSAGFPTGLTYSQLMTLKDSMMQLDPSAKTWIDIEGRPEDPVEIALYQPMSGCYIHFFREPTDLKQFKQDAKYSHGIDVADLFPAQPGLTSAVIEALPRNMVLTCQGSDDIKRLLDSQGRRDIKLIDIALSKADSRRFENAVWDQCKDLCHMHTGVVVEKKKRGGKEEITPHCALMDCIMYDAAVSGGLNIPVLRAVLPRDMVFRTSSPKVVL

SEQ ID NO: 20698 - protein, 586 aa, Artificial Sequence
  derived and/or modified protein sequence (wt) from LASV(ISTH2010-NIG-2012;Clade II)__AIT17483__SP-IgE_NP(2-569)
MDWTWILFLVAAATRVHSSASKEVKSFLWTQSLRRELSGYCSNIKLQVVKDAQALLHGLDFSEVSNVQRLMRKQKRDDSDLKRLRDLNQAVNNLVELKSTQQKSILRVGTLTSDDLLTLAADLEKLKSKVIRTERPLSSGVYMGNLSTQQLEQRRALLNLIGMVGGAQGTQPGRDGVVRVWDVKNPDLLNNQFGTMPSLTLACLTKQGQVDLNDAVLALTDLGLIYTAKYPNSSDLDRLSQSHPILNMVDTKKSSLNISGFNFSLGAAVKAGACMLDGGNMLETIKVTPQTMDGILKSILKVKKSLGMFVSDTPGERNPYENILYKICLSGDGWPYIASRTSIVGRAWENTTVDLESDGKPHKVGTAGSNKSLQSAGFPTGLTYSQLMTLKDSMMQLDPSAKTWIDIEGRPEDPVEIALYQPMSGCYIHFFREPTDLKQFKQDAKYSHGIDVADLFPAQPGLTSAVIEALPRNMVLTCQGSDDIKRLLDSQGRRDIKLIDIALSKADSRRFENAVWDQCKDLCHMHTGVVVEKKKRGGKEEITPHCALMDCIMYDAAVSGGLNIPVLRAVLPRDMVFRTSSPKVVL

SEQ ID NO: 20699 - protein, 586 aa, Artificial Sequence
  derived and/or modified protein sequence (wt) from LASV(Lassa virus/H.sapiens-wt/NGA/2015/ISTH_0543;Clade II)__AVO03640__SP-IgE_NP(2-569)
MDWTWILFLVAAATRVHSSASKEVKSFLWTQSLRRELSGYCSNIKLQVVKDAQALLHGLDFSEVSNVQRLMRKQKRDDSDLKRLRDLNQAVNNLVELKSTQQKSILRVGTLTSDDLLTLAADLEKLKSKVIRTERPLSSGVYMGNLSTQQLEQRRALLNMIGMVGGAQGTQPGRDGVVRVWDVKNPDLLNNQFGTMPSLTLACLTKQGQVDLNDAVLALTDLGLIYTAKYPNSSDLDRLSQSHPILNMVDTKKSSLNISGYNFSLGAAVKAGACMLDGGNMLETIKVTPQTMDGILKSILKVKKSLGMFVSDTPGERNPYENILYKICLSGDGWPYIASRTSIVGRAWENTTVDLESDGKPQKVGSAGSNKSLQSAGFPTGLTYSQLMTLKDSMMQLDPSAKTWIDIEGRPEDPVEIALYQPMSGCYIHFFREPTDLKQFKQDAKYSHGIDVADLFPAQPGLTSAVIEALPRNMVLTCQGSDDIKRLLDSQGRKDIKLIDIALSKADSRRFENAVWDQCKDLCHMHTGVVVEKKKRGGKEEITPHCALMDCIMYDAAVSGGLNIPVLRAVLPRDMVFRTSSPKVVL

SEQ ID NO: 20700 - protein, 586 aa, Artificial Sequence
  derived and/or modified protein sequence (wt) from LASV(Lassa virus/H.sapiens-wt/NGA/2016/ISTH_0009;Clade II)__AVO03572__SP-IgE_NP(2-569)
MDWTWILFLVAAATRVHSSASKEVKSFLWTQSLRRELSGYCSNIKLQVVKDAQALLHGLDFSEVSNVQRLMRKQKRDDSDLKRLRDLNQAVNNLVELKSTQQKSILRVGTLTSDDLLTLAADLEKLKSKVIRTERPLSSGVYMGNLSTQQLEQRRALLNMIGMVGGAQGTQPGRDGVVRVWDVKNPDLLNNQFGTMPSLTLACLTKQGQVDLNDAVLALTDLGLIYTAKYPNSSDLDRLSQSHPILNMVDTKKSSLNISGYNFSLGAAVKAGACMLDGGNMLETIKVTPQTMDGILKSILKVKKSLGMFVSDTPGERNPYENILYKICLSGDGWPYIASRTSIVGRAWENTTVDLESDGKPQKVGSAGSNKSLQSAGFPTGLTYSQLMTLKDSMMQLDPSAKTWIDIEGRPEDPVEIALYQPMSGCYIHFFREPTDLKQFKQDAKYSHGIDVADLFPAQPGLTSAVIEALPRNMVLTCQGSDDIKRLLDSQGRRDIKLIDIALSKADSRRFENAVWDQCKDLCHMHTGVVVEKKKRGGKEEITPHCALMDCIMYDAAVSGGLNIPVLRAVLPRDMVFRTSSPKVVL

SEQ ID NO: 20701 - protein, 586 aa, Artificial Sequence
  derived and/or modified protein sequence (wt) from LASV(Lassa virus/H.sapiens-wt/NGA/2016/ISTH_0017;Clade II)__AVO03568__SP-IgE_NP(2-569)
MDWTWILFLVAAATRVHSSASKEVKSFLWTQSLRRELSGYCSSIKLQVVKDAQALLHGLDFSEVSNVQRLMRKQKRDDSDLKRLRDLNQAVNNLVELKSTQQKSILRVGTLTSDDLLTLAADLEKLKSKVIRTERPLSSGVYMGNLSTQQLEQRRALLNMIGMAGGAQGTQPGRDGVVRVWDVKNPDLLNNQFGTMPSLTLACLTKQGQVDLNDAVLALTDLGLIYTAKYPNSSDLDRLSQSHPILNMVDTKKSSLNISGYNFSLGAAVKAGACMLDGGNMLETIKVTPQTMDGILKSILKVKRSLGMFVSDAPGERNPYENILYKICLSGDGWPYIASRTSIVGRAWENTTVDLESDGKPQKVGATGSNKSLQSAGFPTGLTYSQLMTLKDSMMQLDPSAKTWIDIEGRPEDPVEVALYQPVSGCYIHFFREPTDLKQFKQDAKYSHGIDVADLFPAQPGLTSAVIEALPRNMVLTCQGSDDIKKLLDSQGRKDIKLIDIALSKADSRRFENAVWDQCKDLCHMHTGVVVEKKKRGGKEEITPHCALMDCIMYDAAVSGGLNIPVLRAVLPRDMVFRTSSPKVVL

SEQ ID NO: 20702 - protein, 586 aa, Artificial Sequence
  derived and/or modified protein sequence (wt) from LASV(Lassa virus/H.sapiens-wt/NGA/2018/ISTH_0959;Clade II)__AVV65100__SP-IgE_NP(2-569)
MDWTWILFLVAAATRVHSSASKEVKSFLWTQSLRRELSGYCSNIKLQVVKDAQALLHGLDFSEVSNVQRLMRKQKRDDSDLKRLRDLNQAVNNLVELKSTQQKSILRVGTLTSDDLLTLAADLEKLKSKVIRTERPLSSGVYMGNLSTQQLEQRRALLNLIGMVGGAQGTQPGRDGVVRVWDVKNPDLLNNQFGTMPSLTLACLTKQGQVDLNDVVLALTDLGLIYTAKYPNSSDLDRLSQSHPILNMVDTKKSSLNISGFNFSLGAAVKAGACMLDGGNMLETIKVTPQTMDGILKSILKVKKSLGMFVSDTPGERNPYENILYKICLSGDGWPYIASRTSIVGRAWENTTVDLESDGKPHKVGTAGSNKSLQSAGFPTGLTYSQLMTLKDSMMQLDPSAKTWIDIEGRPEDPVEIALYQPMSGCYIHFFREPTDLKQFKQDAKYSHGIDVADLFPAQPGLTSAVIEALPRNMVLTCQGSDDIKRLLDSQGRKDIKLIDIALSKTDSRRFENAVWDQCKDLCHMHTGVVVEKKKRGGKEEITPHCALMDCIMYDAAVSGGLNIPVLRAVLPRDMVFRTSSPKVVL

SEQ ID NO: 20703 - protein, 586 aa, Artificial Sequence
  derived and/or modified protein sequence (wt) from LASV(LASV003-NIG-2008;Clade II)__AIT17581__SP-IgE_NP(2-569)
MDWTWILFLVAAATRVHSSASKEVKSFLWTQSLRRELSGYCSSIKLQVVKDAQALLHGLDFSEVSNVQRLMRKQKRDDSDLKRLRDLNQAVNNLVELKSTQQKSVLRVGTLTSDDLLTLAADLEKLKSKVIRTERPLSSGVYMGNLSAQQLEQRRTLLNMIGMVGGAQGTQPGRDGVVRVWDVKNPDLLNNQFGTMPSLTLACLTKQGQVDLNDVVLALTDLGLIYTAKYPNSSDLDRLSQSHPILSMVDTKKSSLNISGYNFSLGAAVKAGACMLDGGNMLETIKVTPQTMDGILKSILKVKKSLGMFVSDTPGERNPYENILYKICLSGDGWPYIASRTSIVGRAWENTTVDLESDGKPQKVGTAGSNKSLQSAGFPTGLTYSQLMTLKDSMMQLDPSAKTWIDIEGRPEDPVEIALYQPMSGCYIHFFREPTDLKQFKQDAKYSHGIDVTDLFPAQPGLTSAVIEALPRNMVLTCQGSDDIKRLLDSQGRRDIKLIDIALSKADSRRFENAVWDQCKDLCHMHTGVVVEKKKRGGKEEITPHCALMDCIMYDAAVSGGLNIPVLRAVLPRDMVFRTSSPKVVL

SEQ ID NO: 20704 - protein, 586 aa, Artificial Sequence
  derived and/or modified protein sequence (wt) from LASV(LASV035-NIG-2009;Clade II)__AIT17589__SP-IgE_NP(2-569)
MDWTWILFLVAAATRVHSSASKEVKSFLWTQSLRRELSGYCSSIKLQVVKDAQALLHGLDFSEVSNVQRLMRKQKRDDSDLKRLRDLNQAVNNLVELKSTQQKSILRVGTLTSDDLLTLAADLEKLKSKVIRTERPLSSGVYMGNLSAQQLEQRRALLNMIGMVGGAQGTQPGRDGVVRVWDVKNPDLLNNQFGTMPSLTLACLTKQGQVDLNDAVLALTDLGLIYTAKYPNSSDLDRLSQSHPILNMVDTKKSSLNISGYNFSLGAAVKAGACMLDGGNMLETIKVTPQTMDGILKSILKVKRSLGMFVSDTPGERNPYENILYKICLSGDGWPYIASRTSIVGRAWENTTVDLESDGKPQKVGTTGSNKSLQSAGFPTGLTYSQLMTLKDSMMQLDPSAKTWIDIEGRPEDPVEIALYQPMSGCYIHFFREPTDLKQFKQDAKYSHGIDVADLFPAQPGLTSAVIEALPRNMVLTCQGSDDIKKLLDSQGRRDIKLIDIALSKADSRKFENAVWDQCKDLCHMHTGVVVEKKKRGGKEEITPHCALMDCIMYDAAVSGGLNIPVLRAVLPRDMVFRTSSPKVVL

SEQ ID NO: 20705 - protein, 586 aa, Artificial Sequence
  derived and/or modified protein sequence (wt) from LASV(LASV1000-NIG-2009;Clade II)__AIT17783__SP-IgE_NP(2-569)
MDWTWILFLVAAATRVHSSASKEVKSFLWTQSLRRELSGYCSNIKLQVVKDAQALLHGLDFSEVSNVQRLMRKQKRDDSDLKRLRDLNQAVNNLVELKSTQQKSILRVGTLTSDDLLTLAADLEKLKSKVIRTERPLSSGVYMGNLSTQQLEQRRALLNMIGMVGGAQGTQPGRDGVVRVWDVKNPDLLNNQFGTMPSLTLACLTKQGQVDLNDVVLALTDLGLIYTAKYPNSSDLDRLSQSHPILNMVDTKKSSLNISGYNFSLGAAVKAGACMLDGGNMLETIKVTPQTMDGILKSILKVKKSLGMFVSDTPGERNPYENILYKICLSGDGWPYIASRTSIVGRAWENTTVDLESDGKPQKVGTAGSNKSLQSAGFPTGLTYSQLMTLKDSMMQLDPSAKTWIDIEGRPEDPVEIALYQPVSGCYIHFFREPTDLKQFKQDAKYSHGIDVADLFPAQPGLTSAVIEALPRNMVLTCQGSDDIKRLLDSQGRRDIKLIDIALSKADSRRFENAVWDQCKDLCHMHTGVVVEKKKRGGKEEITPHCALMDCIMYDAAVSGGLNIPVLRAVLPRDMVFRTSSPKVVL

SEQ ID NO: 20706 - protein, 586 aa, Artificial Sequence
  derived and/or modified protein sequence (wt) from LASV(LASV221-NIG-2010;Clade II)__AIT17625__SP-IgE_NP(2-569)
MDWTWILFLVAAATRVHSSASKEVKSFLWTQSLRRELSGYCSSIKLQVVKDAQALLHGLDFSEVSNVQRLMRKQRRDDSDLKRLRDLNQAVNNLVELKSTQQKSILRVGTLTSDDLLTLAADLEKLKSKVIRTERPLSSGVYMGNLSTQQLEQRRALLNMIGMVGGAQGTQPGRDGVVRVWDVKNPDLLNNQFGTMPSLTLACLTKQGQVDLNDAVLALTDLGLIYTAKYPNSSDLDRLSQSHPILNMVDTKKSSLNISGYNFSLGAAVKAGACMLDGGNMLETIKVTPQTVDGILKSILKVKRSLGMFVSDTPGERNPYENILYKICLSGDGWPYIASRTSIVGRAWENTTVDLESDGKPQKVGTAGSNKSLQSAGFPTGLTYSQLMTLKDSMMQLDPSAKTWIDIEGRPEDPVEIALYQPMSGCYIHFFREPTDLKQFKQDAKYSHGIDVADLFPAQPGLTSAVIEALPRNMVLTCQGSDDIKRLLDSQGRRDIKLIDIALSKADSRKFENAVWDQCKDLCHMHTGVVVEKKKRGGKEEITPHCALMDCIMYDAAVSGGLNIPVLRAVLPRDMVFRTSSPKVVL

SEQ ID NO: 20707 - protein, 586 aa, Artificial Sequence
  derived and/or modified protein sequence (wt) from LASV(LASV237-NIG-2010;Clade II)__AIT17639__SP-IgE_NP(2-569)
MDWTWILFLVAAATRVHSSASKEVKSFLWTQSLRRELSGYCSNIKLQVVKDAQALLHGLDFSEVSNVQRLMRKQKRDDSDLKRLRDLNQAVNNLVELKSTQQKSILRVGTLTSDDLLTLAADLEKLKSKVIRTERPLSSGVYMGNLSTQQLEQRRALLNMIGMVGGAQGTQPGRDGVVRVWDVKNPDLLNNQFGTMPSLTLACLTKQGQVDLNDAVLALTDLGLIYTAKYPNSSDLDRLSQSHPILNMVDIKKSSLNISGYNFSLGAAVKAGACMLDGGNMLETIKVTPQTMDGILKSILKVKRSLGMFVSDTPGERNPYENILYKICLSGDGWPYIASRTSIVGRAWENTTVDLESDGKPQKVGSAGSNKSLQSAGFPTGLTYSQLMTLKDSMMQLDPSAKTWIDIEGRPEDPVEIALYQPMSGCYIHFFREPTDLKQFKQDAKYSHGIDVADLFPAQPGLTSAVIEALPRNMVLTCQGSDDIKRLLDSQGRRDIKLIDIALSKADSRRFENAVWDQCKDLCHMHTGVVVEKKKRGGKEEITPHCALMDCIMYDAAVSGGLNIPVLRAVLPRDMVFRTSSPKVVL

SEQ ID NO: 20708 - protein, 586 aa, Artificial Sequence
  derived and/or modified protein sequence (wt) from LASV(LASV253-NIG-2011;Clade II)__AIT17671__SP-IgE_NP(2-569)
MDWTWILFLVAAATRVHSSASKEVKSFLWTQSLRRELSGYCSSIKLQVVKDAQALLHGLDFSEVSNVQRLMRKQKRDDSDLKRLRDLNQAVNNLVELKSTQQKSVLRVGTLTSDDLLTLAADLEKLKSKVIRTERPLSSGVYMGNLSTQQLEQRRALLNMIGMVGGAQGTQPGRDGVVRVWDVKNPDLLNNQFGTMPSLTLACLTKQGQVDLNDVVLALTDLGLIYTAKYPNSSDLDRLSQSHPILNMVDTKKSSLNISGYNFSLGAAVKAGACMLDGGNMLETIKVTPQTMDGILKSILKVKKSLGMFVSDTPGERNPYENILYKICLSGDGWPYIASRTSIVGRAWENTTVDLESDGKPQKVGTAGSNKSLQSAGFPTGLTYSQLMTLKDSMMQLDPSAKTWIDIEGRPEDPVEIALYQPMSGCYIHFFREPTDLKQFKQDAKYSHGIDVTDLFPAQPGLTSAVIEALPRNMVLTCQGSDDIKRLLDSQGRRDIKLIDIALSKADSRRFENAVWDQCKDLCHMHTGVVVEKKKRGGKEEITPHCALMDCIMYDAAVSGGLNIPVLRAVLPRDMVFRTSSPKVVL

SEQ ID NO: 20709 - protein, 586 aa, Artificial Sequence
  derived and/or modified protein sequence (wt) from LASV(LASV254-NIG-2011;Clade II)__AIT17675__SP-IgE_NP(2-569)
MDWTWILFLVAAATRVHSSASKEVKSFLWTQSLRRELSGYCSSIKLQVVKDAQALLHGLDFSEVSNVQRLMRKQKRDDSDLKRLRDLNQAVNNLVELKSTQQKSVLRVGTLTSDDLLTLAADLEKLKSKVIRTERPLSSGVYMGNLSTQQLEQRRALLNMIGMVGGAQGTQPGRDGVVRVWDVKNPDLLNNQFGTMPSLTLACLTKQGQVDLNDAVLALTDLGLIYTAKYPNSSDLDRLSQSHPILNMVDTKKSSLNISGYNFSLGAAVKAGACMLDGGNMLETIKVTPQTMDGILKSILKVKKSLGMFVSDTPGERNPYENILYKICLSGDGWPYIASRTSIVGRAWENTIVDLESDGKPQKVGTAGSNKSLQSAGFPTGLTYSQLMTLKDSMMQLDPSAKTWIDIEGRPEDPVEIALYQPMSGCYIHFFREPTDLKQFKQDAKYSHGIDVADLFPAQPGLTSAVIEALPRNMVLTCQGSDDIKRLLDSQGRRDIKLIDIALSKADSRRFENAVWDQCKDLCHMHTGVVVEKKKRGGKEEITPHCALMDCIMYDAAVSGGLNIPVLRAVLPRDMVFRTSSPKVVL

SEQ ID NO: 20710 - protein, 586 aa, Artificial Sequence
  derived and/or modified protein sequence (wt) from LASV(Nig08-04;Clade II)__ADU56611__SP-IgE_NP(2-569)
MDWTWILFLVAAATRVHSSASKEVKSFLWTQSLRRELSGYCSNIKLQVVKDAQALLHGLDFSEVSNVQRLMRKQKRDDGDLKRLRDLNQAVNNLVELKSTQQKSVLRVGTLTSDDLLTLAADLEKLKSKVIRTERPLSSGVYMGNLSTQQLEQRKALLSMIGMVGGAQGTQPGRDGVVRVWDVKNPDLLNNQFGTMPSLTLACLTKQGQVDLNDAVLALTDLGLIYTAKYPNSSDLDRLSQSHPILNMVDTKKSSLNISGYNFSLGAAVKAGACMLDGGNMLETIKVTPQTMDGILKSILKVKRSLGMFVSDTPGERNPYENILYKICLSGDGWPYIASRTSIVGRAWENTTVDLESDGKPQKVGTAGSNKSLQSAGFPTGLTYSQLMTLKDSMMQLDPSAKTWIDIEGRPEDPVEIALYQPMSGCYIHFFREPTDLKQFKQDAKYSHGIDVTDLFSAQPGLTSAVIEALPRNMVLTCQGSDDIKKLLDSQGRRDIKLIDISLNKADSRRFENAVWDQCKDLCHMHTGVVVEKKKRGGKEEITPHCALMDCIMFDAAVSGGLNIPILRAVLPRDMVFRTSSPKVVL

SEQ ID NO: 20711 - protein, 587 aa, Artificial Sequence
  derived and/or modified protein sequence (wt) from LASV(GA391;Clade III)__AAA46284__SP-IgE_NP(2-570)
MDWTWILFLVAAATRVHSSASKEVRSCLWTQSLRRELSGYCSNIKLQVVKDAQALLHGLDFSEVSNVQRLMRKQKRDDGDLKRLRDLNQAVNNLVELKSTQQKSVLRVGTLSSDDLLILAADLEKLKSKVTRTERPLSSGVYMGNLSSQQLDQRRALLNMIGMTGVSGGGKGASNGIVRVWDVKNAELLNNQFGTMPSLTLACLTKQGQVDLNDAVQALTDLGLIYTAKYPNSSDLDRLSQSHPILNMIDTKKSSLNISGYNFSLGAAVKAGACMLDGGNMLETIKVSPQTMDGILKSILKVKKSLGMFVSDTPGERNPYENILYKICLSGDGWSYIASRTSIVGRAWENTVVDLEQDNKPQKIGNGGSNKSLQSAGFAAGLIYSQLMTLKDFKCFNLIPNAKTWMDIEGRPEDPVEIALYQPSSGCYVHFFREPTDLKQFKQDAKYSHGRDVTDLFAAQPGLTSAVIEALPRNMVITCQGSEDIRKLLESQGRRDIKLIDITLSKADSRKFENAVWDQFKDLCHMHTGVVVEKKKRGGKEEITPHCALMDCIMFDAAVSGGLDAKVLRVVLPRDMVFRTSTPKVVL

SEQ ID NO: 20712 - protein, 586 aa, Artificial Sequence
  derived and/or modified protein sequence (wt) from LASV(Nig08-A19;Clade III)__ADU56619__SP-IgE_NP(2-569)
MDWTWILFLVAAATRVHSSASKEVKSFLWTQSLRRELSGYCSNIKLQVVKDAQALLHGLDFSEVSNVQRLMRKQKRDDGDLKRLRDLNQAVNNLVELKSTQQKSVLRVGTLSSDDLLVLAADLEKLKSKVVRTERPLSSGIYMGNLSSQQLDQRKALLNMIGMTGGNGGRNTTSDGIVRVWDVKNAELLNNQFGTMPSLTLACLTKQGQVDLNDAVQALTDLGLIYTAKYPNSSDLDRLAQSHPILNMIDTKKSSLNISGYNFSLGAAVKAGACMLDGGNMLETIKVSPQTMDGILKSILKVKRSLGMFISDTPGERNPYENILYKICLSGDGWPYIASRTSIVGRAWENTVVDLESDNKPQKTGNGGSNKSLQSAGFAAGLTYSQLMTLKDSMLQLDPNAKTWMDIEGRPEDPVEIALYQPSSGCYIHFFREPTDLKQFKQDAKYSHGIDVTDLFAAQPGLTSAVIEALPRNMVITCQGSEDIRKLLESQGRRDIKLIDISLSKVDSRKFENAVWDQFKDLCHMHTGIVVEKKKRGGKEEITPHCALMDCIMFDAAVSGGVDAKVLRAVLPRDMVFRTSTPKVVL

SEQ ID NO: 20713 - protein, 586 aa, Artificial Sequence
  derived and/or modified protein sequence (wt) from LASV(G1180-SLE-2010;Clade IV)__AIT17169__SP-IgE_NP(2-569)
MDWTWILFLVAAATRVHSSASKEIKSFLWTQSLRRELSGYCSNIKLQVVKDAQALLHGLDFSEVSNVQRLMRKERRDDNDLKRLRDLNQAVNNLVELKSTQQKSILRVGTLTSDDLLILAADLEKLKSKVIRTERPLSAGVYMGNLSSQQLDQRRALLSMIGMSSGNQRAQAGRDGVVRVWDVKNVELLNNQFGTMPSLTLACLTKQGQVDLNDAVQALTDLGLIYTAKYPNTSDLDRLTQSHPILNMIDTKKSSLNISGYNFSLGAAVKAGACMLDGGNMLETIKVSPQTMDGILKSILKVKKALGMFISDTPGERNPYENILYKICLSGDGWPYIASRTSITGRAWENTVVDLESDGKPQKAGSNNSNKSLQSVGFTAGLTYSQLMTLKDAMLQLDPNAKTWMDIEGRPEDPVEIALYQPSSGCYIHFFREPTDLKQFKQDAKYSHGIDVTDLFAAQPGLTSAVIDALPRNMVITCQGSDDIRKLLESQGRKDIKLIDIALSKTDSRKYENAVWDQYKDLCHMHTGVVVEKKKRGGKEEITPHCALMDCIMFDAAVSGGLNTSVLRAVLPRDMVFRTSTPRVVL

SEQ ID NO: 20714 - protein, 586 aa, Artificial Sequence
  derived and/or modified protein sequence (wt) from LASV(G1442-SLE-2011;Clade IV)__AIT17181__SP-IgE_NP(2-569)
MDWTWILFLVAAATRVHSSASKEVKSFLWTQSLRRELSGYCSNIKLQVVKDAQALLHGLDFSEVSNVQRLMRKQRRDDNDLKRLRDLNQAVNNLVELKSTQQKSVLRVGTLTSDDLLVLAADLEKLKSKVIRTERPLSAGVYMGNLSSQQLDQRRALLNMIGMSGGIQGTRTGRDGVVRVWDVKNADLLNNQFGTMPSLTLACLTKQGQVDLNDVVQALTDLGLIYTAKYPNASDLDRLTQSHPILNMIDTKKSSLNISGYNFSLGAAVKAGACMLDGGNMLETIKVSPQTMDGILKSILKVKKTLGMFISDTPGERNPYENILYKICLSGDGWPYIASRTSITGRAWENTVVDLESDGKPQKAGSNNSNKSLQSAGFAAGLTYSQLMTLKDAMLQLDPNAKTWMDIEGRPEDPVEIALYQPSSGCYIHFFREPTDLKQFKQDAKYSHGIDVTDLFAAQPGLTSAVIEALPRNMVITCQGSDDIKKLLESQGRKDIKLIDIALSKTDSRKYENAVWDQYKDLCHMHTGVVVEKKKRGGKEEITPHCALMDCIMFDAAVSGGLNTLVLRAVLPRDMVFRTSTPRVVL

SEQ ID NO: 20715 - protein, 586 aa, Artificial Sequence
  derived and/or modified protein sequence (wt) from LASV(G3010-SLE-2013;Clade IV)__AIT17345__SP-IgE_NP(2-569)
MDWTWILFLVAAATRVHSSASKEIKSFLWTQSLRRELSGYCSNIKLQVVKDAQALLHGLDFSEVSNVQRLMRKERRDDNDLKRLRDLNQAVNNLVELKSTQQKSILRVGTLTSDDLLILAADLEKLKSKVTRTERPLSAGVYMGNLSSQQLDQRRALLSMIGMSSGVQGARAGRDGVVRVWDVKNAELLNNQFGTMPSLTLACLTKQGQVDLNDVVQALTDLGLIYTAKYPNTSDLDRLTQSHPILNMIDTKKSSLNISGYNFSLGAAVKAGACMLDGGNMLETIKVSPQTMDGILKSILKVKKALGMFISETPGERNPYENILYKICLSGDGWPYIASRTSITGRAWENTVVDLESDGKPQKAGSNNSNKSLQSAGFTAGLTYSQLMTLKDAMLQLDPNAKTWMDIEGRPEDPVEVALYQPSSGCYIHFFREPTDLKQFKQDAKYSHGIDVTDLFAAQPGLTSAVIDALPRNMVITCQGSDDIKKLLESQGRKDIKLIDIALSKTDSRKYENAVWDQYKDLCHMHTGVVVEKKKRGGKEEITPHCALMDCIMFDAAVSGGLNTSVLRAVLPRDMVFRTSTPRVVL

SEQ ID NO: 20716 - protein, 586 aa, Artificial Sequence
  derived and/or modified protein sequence (wt) from LASV(G502-SLE-2009;Clade IV)__AIT17127__SP-IgE_NP(2-569)
MDWTWILFLVAAATRVHSSASKEIKSFLWTQSLRRELSGYCSNIKLQVVKDAQALLHGLDFSEVSNVQRLMRKERRDDNDLKRLRDLNQAVNNLVELKSTQQKSILRVGTLTSDDLLILAADLEKLKSKVIRTERPLSAGVYMGNLSSQQLDQRRALLSMIGMSGGNQGVRAGKDGVVRVWDVKNAELLNNQFGTMPSLTLACLTKQGQVDLNDAVQALTDLGLIYTAKYPNTSDLDRLTQSHPILNMIDTKKSSLNISGYNFSLGAAVKAGACMLDGGNMLETIKVSPQTMDGILKSILKVKKALGMFISDTPGERNPYENILYKICLSGDGWPYIASRTSITGRAWENTVVDLESDGKPQKAGSNNSNKSLQSAGFTAGLTYSQLMTLKDAMLQLDPNTKTWMDIEGRPEDPVEIALYQPSSGCYIHFFREPTDLKQFKQDAKYSHGIDVTDLFAAQPGLTSAVIDALPRNMVITCQGSDDIRKLLESQGRKDIKLIDIALNKTDSRKYENAVWDQYKDLCHMHTGVVVEKKKRGGKEEITPHCALMDCIMFDAAVSGGLNTSVLRAVLPRDMVFRTSTPRVVL

SEQ ID NO: 20717 - protein, 586 aa, Artificial Sequence
  derived and/or modified protein sequence (wt) from LASV(G733-SLE-2010;Clade IV)__AIT17155__SP-IgE_NP(2-569)
MDWTWILFLVAAATRVHSSASKEIKSFLWTQSLRRELSGYCSNIKLQVVKDAQALLHGLDFSEVSNVQRLMRKERRDDNDLKRLRDLNQAVNNLVELKSTQQKSVLRVGTLTSDELLVLAADLEKLKSKVIRTERPLSAGVYMGNLSSQQLDQRRALLSMIGMSGGNQGARTGRDGVVRVWDVKNAELLNNQFGTMPSLTLACLTKQGQVDLNDAVQALTDLGLIYTAKYPNTSDLDRLTQSHPILNMIDTKKSSLNISGYNFSLGAAVKAGACMLDGGNMLETIKVSPQTMDGILKSILKVKKALGMFISDTPGERNPYENILYKICLSGDGWPYIASRTSITGRAWENTVVDLESDGKPQKAGSNNSNKSLQSAGFTAGLTYSQLMTLKDAMLQLDPNAKTWMDIEGRPEDPVEIALYQPSSGCYIHFFREPTDLKQFKQDAKYSHGIDVTDLFAAQPGLTSAVIDALPRNMVITCQGSDDIRKLLESQGRKDIKLIDIALSKIDSRKYENAVWDQYKDLCHMHTGVVVEKKKRGGKEEITPHCALMDCIMFDAAVSGGLNSLVLRAVLPRDMVFRTSTPRVVL

SEQ ID NO: 20718 - protein, 586 aa, Artificial Sequence
  derived and/or modified protein sequence (wt) from MOPV/LASV reassortant(IGS-1;Clade IV)__AFY05578__SP-IgE_NP(2-569)
MDWTWILFLVAAATRVHSSASKEIKSFLWTQSLRRELSGYCSNIKLQVVKDAQALLHGLDFSEVSNVQRLMRKERRDDNDLKRLRDLNQAVNNLVELKSTQQKSILRVGTLTSDDLLILAADLEKLRSKVIRTERPLSAGVYMGNLSSQQLDQRRALLNMIGMSGGNQGARAGRDGVVRVWDVKNAELLSNQFGTMPSLTLACLTKQGQVDLNDAVQALTDLGLIYTAKYPNTSDLDRLTQSHPILNMIDTKKSSLNISGYNFSLGAAVKAGACMLDGGNMLETIKVSPQTMDGILKSILKVKKALGMFISDTPGERNPYENILYKICLSGDGWPYIASRTSITGRAWENTVVDLESDGKPQKADSNNSSKSLQSAGFTAGLTYSQLMTLKDAMLQLDPNAKTWMDIEGRPEDPVEIALYQPSSGCYIHFFREPTDLKQFKQDAKYSHGIDVTDLFATQPGLTSAVIDALPRNMVITCQGSDDIRKLLESQGRKDIKLIDIDLSKTDSRKYENAVWDQYKDLCHMHTGVVVEKKKRGGKEEITPHCALMDCIMFDAAVSGGLNTSVLRAVLPRDMVFRTSTPRVVL

SEQ ID NO: 20719 - protein, 586 aa, Artificial Sequence
  derived and/or modified protein sequence (wt) from LASV(LM765-SLE-2012;Clade IV)__AIT17815__SP-IgE_NP(2-569)
MDWTWILFLVAAATRVHSSASKEIKSFLWTQSLRRELSGYCSNIKLQVVKDAQALLHGLDFSEVSNVQRLMRKERRDDNDLKRLRDLNQAVNNLVELKSTQQKSILRVGTLTSDDLLILAADLEKLKSKVTRTERPLSAGVYMGNLSSQQLDQRRALLDMIGMSGSNQGARAGRDGVVRVWDVKNAELLNNQFGTMPSLTLACLTKQGQVDLNDAVQALTDLGLIYTAKYPNTSDLDRLTQSHPILNMIDTKKSSLNISGYNFSLGAAVKAGACMLDGGNMLETIKVSPQTMDGILKSILKVKKALGMFISDAPGERNPYENILYKICLSGDGWPYIASRTSITGRAWENTVVDLESDGKPQKAGSNGSNKSLQSAGFTAGLTYSQLMTLKDAMLQLDPNAKTWMDIEGRPEDPVEIALYQPSSGCYIHFFREPTDLKQFKQDAKYSHGIDVTDLFAAQPGLTSAVIDALPRNMVITCQGSDDIRKLFESQGRKDIKLIDIALSKTDSRKYENAVWDQYKDLCHMHTGIVVEKKKRGGKEEITPHCALMDCIMFDAAVSGGLNTSVLRAVLPRDMVFRTSTPRVVL

SEQ ID NO: 20720 - protein, 586 aa, Artificial Sequence
  derived and/or modified protein sequence (wt) from LASV(LM776-SLE-2012;Clade IV)__AIT17825__SP-IgE_NP(2-569)
MDWTWILFLVAAATRVHSSASKEIKSFLWTQSLRRELSSYCSNIKLQVVKDAQALLHGLDFSEVSNVQRLMRKERRDDNDLKRLRDLNQAVNNLVELKSTQQKSILRVGTLTSDDLLILAADLEKLKSKVTRTERPLSAGVYMGNLSSQQLDQRRALLSMIGMSGSNQGARAGRDGVVRVWDVKNAELLNNQFGTMPSLTLACLTKQGQVDLNDAVQALTDLGLIYTAKYPNTSDLDRLTQSHPILNMIDTKKSSLNISGYNFSLGAAVKAGACMLDGGNMLETIKVSPQTMDGILKSILKVKKALGMFISDTPGERNPYENILYKICLSGDGWPYIASRTSITGRAWENTVVDLESDGKPQKAGSNNSNKSLQSAGFTAGLTYSQLMTLKDAMLQLDPNAKTWMDIEGRPEDPVEVALYQPSSGCYIHFFREPTDLKQFKQDAKYSHGIDVTDLFAAQPGLTSAVIDALPRNMVITCQGSDDIRKLLESQGRKDIKLIDIALSKTDSRKYENAVWDQYKDLCHMHTGVVVEKKKRGGKEEITPHCALMDCIMFDAAVSGGLNTSVLRAVLPRDMVFRTSTPRVVL

SEQ ID NO: 20721 - protein, 586 aa, Artificial Sequence
  derived and/or modified protein sequence (wt) from LASV(Mad39;Clade IV)__ANH09723__SP-IgE_NP(2-569)
MDWTWILFLVAAATRVHSSASKEIKSFLWTQSLRRELSGYCSNIKLQVVKDAQALLHGLDFSEVSNVQRLMRKQRRDDNDLKRLRDLNQAVNNLVELKSTQQKSVLRVGTLTSDDLLTLAADLEKLKSKVTRTERPLTAGVYMGNLSSQQLDQRRALLNMIGMSGGNQGARTGRDGVVRVWDVKNAELLNNQFGTMPSLTLACLTKQGQVDLNDVVQALTDLGLIYTAKYPNTSDLDRLTQSHPILNMIDTNKSSLNISGYNFSLGAAVKAGACMLDGGNMLETIKVSPQTMDGILKSILKVKKSLGMFISDTPGERNPYENILYKICLSGDGWPYIASRTSITGRAWENTVVDLESGGKPQKAGSNNSNKSLQSAGFAAGLTYSQLMTLKDAMLQLDPNAKTWMDIEGRPEDPVEIALYQPISGCYIHFFREPTDLKQFKQDAKYSHGIDVTDLFAAQPGLTSAVIEALPRNMVITCQGSDDIRKLFESQGRKDIKLIDIALSKTDSRKYENAVWDQYKDLCHMHTGVVVEKKKKGGKEEITPHCALMDCIMFDAAVSGGLNTLVLRAVLPRDMVFRTSTPKVVL

SEQ ID NO: 20722 - protein, 586 aa, Artificial Sequence
  derived and/or modified protein sequence (wt) from LASV(Z0947-SLE-2011;Clade IV)__AIT17841__SP-IgE_NP(2-569)
MDWTWILFLVAAATRVHSSASKEIKSFLWTQSLRRELSGYCSNIKLQVVKDAQALLHGLDFSEVSNVQRLMRKERRDDNDLKRLRDLNQAVNNLVELKSTQQKSILRVGTLTSDDLLILAADLEKLKSKVTRTERPLSAGVYMGNLSSQQLDQRRALLNMIGMSGSNQGARTGRDGVVRVWDVKNAELLNNQFGTMPSLTLACLTKQGQVDLNDAVQALTDLGLIYTAKYPNTSDLDRLTQSHPILNMIDTKKSSLNISGYNFSLGAAVKAGACMLDGGNMLETIKVSPQTMDGILKSILKVKKALGMFISDAPGERNPYENILYKICLSGDGWPYIASRTSITGRAWENTVVDLESDGKPQKAGSNGSNKSLQSAGFTAGLTYSQLMTLKDAMLQLDPNAKTWMDIEGRPEDPVEIALYQPSSGCYIHFFREPTDLKQFKQDAKYSHGIDVTDLFAAQPGLTSAVIDALPRNMVITCQGSDDIRKLFESQGRKDIKLIDIALSKTDSRKYENAVWDQYKDLCHMHTGIVVEKKKRGGKEEITPHCALMDCIMFDAAVSGGLNTSVLRAVLPRDMVFRTSTPRVVL

SEQ ID NO: 20723 - RNA, 1761 nt, Artificial Sequence
  derived and/or modified CDS sequence (opt1) from LASV(Josiah;Clade IV)__NP_694869__SP-IgE_NP(2-569)
auggacuggaccuggauccuguuccucguggccgccgcgacccgcguccacagcagcgccuccaaggagaucaagagcuuccuguggacccagucccuccgccgggagcugagcggcuacugcuccaacaucaagcuccagguggucaaggacgcccaggcgcugcugcacgggcuggacuucagcgagguguccaacgugcagcgccucaugcggaaggagcgccgggacgacaacgaccugaagcgccugcgggaccucaaccaggccgucaacaaccugguggagcucaagagcacccagcagaaguccauccugcgcgugggcacccugaccagcgacgaccugcucauccuggccgccgaccuggagaagcucaaguccaaggucauccggaccgagcgcccccugagcgccgggguguacaugggcaaccuguccagccagcagcucgaccagcggcgcgcgcugcugaacaugaucgggauguccggcggcaaccagggggcccgggccggccgcgacggggugguccgggugugggacgugaagaacgccgagcuccugaacaaccaguucggcaccaugccgagccugacgcucgcgugccugaccaagcaggggcaggucgaccugaacgacgccgugcaggcccucaccgaccugggccugaucuacaccgccaaguaccccaacacguccgaccucgaccgccugacccagagccaccccauccugaacaugaucgacaccaagaaguccagccucaacaucagcggcuacaacuucucccugggggccgcggugaaggccggcgccugcaugcuggacgggggcaacaugcucgagaccaucaaggucagcccccagacgauggacggcauccugaaguccauccugaaggugaagaaggcccucgggauguucaucagcgacaccccgggcgagcggaaccccuacgagaacauccuguacaagaucugccuguccggggacggcuggcccuacaucgccagccgcaccuccaucaccgggcgggcgugggagaacacgguggucgaccucgagagcgacggcaagccccagaaggccgacuccaacaacagcuccaagagccugcaguccgccggcuucaccgccgggcugaccuacagccagcucaugacccugaaggacgccaugcugcagcuggacccgaacgcgaagacguggauggacaucgagggccgccccgaggaccccguggagaucgcccucuaccagcccuccagcgggugcuacauccacuucuuccgggagccgaccgaccugaagcaguucaagcaggacgccaaguacucccacggcaucgacgugaccgaccuguucgccacccagcccgggcucacgagcgccgucaucgacgcgcugccccgcaacauggugaucacgugccagggcuccgacgacauccgcaagcugcucgagagccagggccggaaggacaucaagcugaucgacaucgcccugagcaagaccgacucccgcaaguacgagaacgccgugugggaccaguacaaggaccucugccacaugcacaccggggucguggucgagaagaagaagcggggcgggaaggaggagaucaccccgcacugcgcccugauggacugcaucauguucgacgcggccgugagcggcgggcugaacaccuccgugcuccgcgccguccugccccgggacaugguguuccgcaccagcacgccccgggugguccuguga

SEQ ID NO: 20724 - RNA, 1761 nt, Artificial Sequence
  derived and/or modified CDS sequence (opt1) from LASV(LP;Clade I)__AAF86702__SP-IgE_NP(2-569)
auggacuggaccuggauccuguuccucguggccgccgcgacccgcguccacagcagcaacuccaaggagaucaagagcuuccuguggacccagucccuccgccgggagcugagcggcuacugcuccaacaucaagcuccagguggucaaggacgcccaggcccugcugcacgggcuggacuucagcgagguguccaacgugcagcgccucaugcggaagcagaagcgcgacgacgcggaccugaagcggcugcgcgaccucaaccaggccgucaacaaccugguggagcucaagagcacccagcagaagaacgugcugcgggucggcacgcuguccagcgacgaccugaucacccucgccgccgaccuggagaagcugaaguccaaggugauccgcaccgagcggccccucagcuccgggguguacaugggcaaccugagcucccagcagcuggaccagcgccgggcccuccugagcaugaucgggauguccggcggcccgcaggggaaccgcaccggcggggacggcgucgugcgggugugggacgucaagaacgcggagcugcucaacaaccaguucgggacgaugcccagccugacccuggccugccucaccaagcagggccagguggaccugaacgacgccgugcaggcccugaccgaccucggccugaucuacacggcgaaguaccccaacuccagcgaccuggacaugcucacccagagccaccccauccuggggauggucgacaccaagaaguccagccugaacaucuccggcuacaacuucagccucggggccgccgugaaggccggcgccugcaugcuggacggcgggaacaugcuggagaccaucaagguguccccgcagacgauggacggcauccucaagagcauccugaaggucaagcgcucccuggggauguucaucagcgacacccccggcgagcggaaccccuacgagaacauccucuacaagaucugccuguccggggagggcuggcccuacaucgcgagccgcaccuccaucaccggccgggccugggagaacacgcugguggaccucgagagcgacaacaagccgcccaagcugaacuccgccgggagcaacaagucccugcaggccgccggccucaacgcggggcugaccuacagccagcugaugacccugaaggacugcaugcuccagcuggaccccuccagcaagaccuggaucgacaucgagggccgccccgaggacccgguggagaucgcccuguuccagcccuccagcgggugcuacauccacuucuuccgggagcccacggaccucaagcaguucaagcaggacgccaaguacagccacggcaucgacgucaccgaccuguucuccacccagcccggccugaccagcgccgugaucgaggcccucccgcgcaacauggugcugacgugccagggguccgacgacaucaagaagcugcucgagagccagggccggcgcgacaucaagcugaucgacaucucccugagcaaggcggacucccgcaaguucgagaacgccgucugggaccaguacaaggaccucugccacaugcacaccgggguggucguggagaagaagaagcggggcgggaaggaggagaucacgccccacugcgcccugcuggacugcaucauguucgacgccgccaccaccggcagccucaacaucaccacccugcgcgcggugcugccccgggacauggucuuccgcaccuccacgcccaagguggugcucuga

SEQ ID NO: 20725 - RNA, 1761 nt, Artificial Sequence
  derived and/or modified CDS sequence (opt1) from LASV(803213;Clade II)__AAF86704__SP-IgE_NP(2-569)
auggacuggaccuggauccuguuccucguggccgccgcgacccgcguccacagcagcgccuccaaggaggugaaguccuuccuguggacccagagccuccgccgggagcugagcggcuacugcuccaacaucaagcugcaggucgugaaggacgcccaggcgcuccugcacgggcuggacuucagcgaggugaacaacguccagcgccucaugcggaagcagaagcgcgacgacggcgaccugaagcggcugcgcgaccucaaccaggccgugaacaaccugguggagcugaaguccacccagcagaaguccauccuccgggucgggacgcugaccagcgacgaccugcucacccuggccgccgaccuggagaagcucaagagcaaggugauccgcaccgagcggccccuguccagcggcguguacauggggaaccuguccacgcagcagcucgagcagcgccgggcccugcugaacaugaucggcauggucggcggggcgcagggcacccagccggggcgcgacggcguggugcgggucugggacgugaagaaccccgaccuccugaacaaccaguucgggaccaugcccagccugacccucgccugccugacgaagcagggccagguggaccugaacgacgccguccucgcccugaccgaccugggccucaucuacaccgcgaaguaccccaacuccagcgaccuggaccgccugucccagagccacccgauccucaacaugguggacaccaagaaguccagccugaacaucagcggguacaacuucucccugggcgccgccgugaaggccggggccugcaugcucgacggcggcaacaugcuggagacgaucaaggucacgccccagaccauggacgggauccucaagagcauccugaaggugaagcggucccugggcauguucgugagcgacacccccggggagcgcaaccccuacgagaacauccuguacaagaucugccucuccggcgacggguggccguacaucgcgagccggaccuccaucgucggccgcgccugggagaacaccaccguggaccuggagagcgacggcaagccccagaagguggggaccgccggcuccaacaagagccugcaguccgccggguuccccacgggccucaccuacagccagcugaugacccugaaggacuccaugaugcagcuggaccccagcgccaagaccuggaucgacaucgaggggcggccggaggaccccgucgagaucgcgcucuaccagcccauguccggcugcuacauccacuucuuccgcgagcccacggaccugaagcaguucaagcaggacgccaaguacagccacggcaucgacguggccgaccuguucccggcccagcccgggcucaccuccgccgucaucgaggcgcugccccggaacauggugcugaccugccagggcagcgacgacaucaagaagcuccuggacucccaggggcgccgcgacaucaagcugaucgacaucagccucagcaagguggacucccggaaguucgagaacgccgucugggaccagugcaaggaccugugccacaugcacaccggcgugguggucgagaagaagaagcgcgggggcaaggaggagaucacgccccacugcgcccugauggacugcaucauguucgacgccgccgugagcggcgggcucaacaucccggugcugcgggcgguccugccccgcgacaugguguuccggaccuccagccccaaggugguccucuga

SEQ ID NO: 20726 - RNA, 1764 nt, Artificial Sequence
  derived and/or modified CDS sequence (opt1) from LASV(GA391;Clade III)__CAA36646__SP-IgE_NP(2-570)
auggacuggaccuggauccuguuccucguggccgccgcgacccgcguccacagcagcgccuccaaggaggugcgcagcuuccuguggacccagucccuccggcgcgagcugagcggcuacugcuccaacaucaagcugcaggucgugaaggacgcccaggcgcuccugcacgggcuggacuucagcgagguguccaacguccagcggcucaugcgcaagcagaagcgggacgacggcgaccugaagcgccugcgggaccucaaccaggccgugaacaaccugguggagcucaagagcacccagcagaaguccguccugcgcguggggacccugagcuccgacgaccugcucauccuggccgccgaccuggagaagcucaagagcaaggugacccggaccgagcgcccccuguccagcggcgucuacauggggaaccuguccagccagcagcucgaccagcggcgcgcccugcugaacaugaucggcaugaccggcguguccgggggcgggaagggcgcgagcgacgggaucgugcgggucugggacgugaagaacgccgagcuccugaacaaccaguucggcacgaugccgucccugacccucgccugccugaccaagcagggccagguggaccugaacgacgccguccaggcgcucaccgaccuggggcugaucuacacggccaaguaccccaacagcagcgaccucgaccgccugucccagagccaccccauccugaacaugaucgacaccaagaaguccagccucaacaucuccggcuacaacuucagccugggggccgccgugaaggccggcgcgugcaugcuggacggcgggaacaugcucgagaccaucaaggugagcccccagaccauggacggcauccucaaguccauccugaaggucaagaagucccuggggauguucgugagcgacacgccgggcgagcggaaccccuacgagaacauccuguacaagaucugccuguccggggacggcuggcccuacaucgccagccgcaccuccaucgugggccgggccugggagaacaccgucguggaccucgagcaggacaacaagccccagaagaucgggaacggcgggagcaacaagucccugcagagcgccggcuucgccgcggggcugaccuacucccagcucaugacgcugaaggacuucaagugcuucaaccugaucccgaacgccaagaccuggauggacaucgagggccgccccgaggaccccguggagaucgcccuguaccagcccagcuccggcugcuacguccacuucuuccgggagccgaccgaccucaagcaguucaagcaggacgccaaguacagccacgggaucgacgugaccgaccuguucgccgcgcagcccggccugacgagcgccgucaucgaggcccucccccgcaacauggugaucacgugccagggguccgaggacauccggaagcugcuggagagccagggccgccgcgacaucaagcucaucgacaucacccuguccaaggccgacagccggaaguucgagaacgccgugugggaccaguucaaggaccugugccacaugcacaccggggucgugguggagaagaagaagcgcggcggcaaggaggagaucacgccccacugcgcgcucauggacugcaucauguucgacgccgccgucuccgggggccuggacgccaaggugcugcgggugguccucccgcgcgacaugguguuccggaccagcacccccaaggugguccuguga

SEQ ID NO: 20727 - RNA, 1761 nt, Artificial Sequence
  derived and/or modified CDS sequence (opt1) from LASV(AV;Clade V)__CCA30315__SP-IgE_NP(2-569)
auggacuggaccuggauccuguuccucguggccgccgcgacccgcguccacagcagcgccuccaaggaggugaaguccuuccuguggacccagagccuccgccgggagcugagcggcuacugcuccaacaucaagcugcaggucgugaaggacgcccaggcgcuccugcacgggcuggacuucagcgagguguccaacguccagcgccucaugcggaagcagcgccgggacgacagcgaccugaagcgccugcgggaccucaaccaggccgugaacaaccugguggagcugaaguccacccagcagaaguccguccuccgcgugggcacgcugagcagcgacgaccugcucacccuggccgccgaccuggagaagcucaaguccaaggugacccggaccgagcgcccccugagcuccggggucuacaugggcaaccugagcucccagcagcucgaccagcggcgcgcccugcugaaccucaucgggaugacgaacggcagccagggcucccaggcggggcgggacggcguggugcgcgucugggacgugaagaacgccgagcugcugaacaaccaguucgggaccaugccgagccucacccuggccugccugaccaagcagggccagguggaccucaacgacgucgugcaggcccugacggaccuggggcucaucuacaccgcgaaguaccccaacaccagcgaccuggaccggcugacccagucccaccccauccucaacaugaucgacacgaagaaguccagccugaacaucagcggcuacaacuucucccugggcgccgccgugaaggccggggccugcaugcucgacggcgggaacaugcuggagaccaucaaggucagcccccaguccauggacggcauccucaagagcauccugaaggugaagcgcgcgcugggcauguucguguccgacaccccgggggagcggaaccccuacgagaacauccuguacaagaucugccucagcggcgacggguggcccuacaucgccucccgcaccagcaucgucggccgggccugggagaacacggugguggaccuggagaccgacgggaagccccagaagaucggcuccggcaacagcaacaagucccugcagagcgccggguucuccgccggccucaccuacagccagcugaugacccugaaggacgcgaugcugcagcucgacccgaacgccaagacguggauggacaucgaggggcgccccgaggaccccgucgagguggcccuguaccagcccaucuccggcugcuacauccacuucuuccgggagccgaccgaccugaagcaguucaagcaggacgccaaguacagccacgggaucgacaucgccgaccucuucgcggcccagcccggccugaccagcgccgucaucgaggcccugccccgcaacauggugaucacgugccagggcuccgaggacaucaagaagcuccuggagagccaggggcgcaaggacaucaagcugaucgacaucgcccucuccaagaucgacagccggaaguucgagaacgcggugugggaccaguacaaggaccugugccacaugcacaccggcgucgugguggagaagaagaagcgcgggggcaaggaggagaucaccccgcacugcgcccugauggacugcaucauguucgacgccgccgucuccgggggccucaacacccuggugcugcgggcggugcucccccgcgacauggucuuccggaccagcacgccccgcguggugcuguga

SEQ ID NO: 20728 - RNA, 1761 nt, Artificial Sequence
  derived and/or modified CDS sequence (opt1) from LASV(Togo/2016/7082;Clade VI)__AMR44578__SP-IgE_NP(2-569)
auggacuggaccuggauccuguuccucguggccgccgcgacccgcguccacagcagcaacuccaaggaggugaaguccuuccuguggacccagagccuccgccgggagcugagcggcuacugcuccaacaucaagcugcaggucgugaaggacgcccaggcccuccugcacgggcuggacuucagcgagguguccaacguccagcgccucaugcggaagcagaagcgcgacgacggcgaccugaagcggcugcgcgaccucaaccaggcggugaacaaccugguggagcucaagagcguccagcagaaguccauccugcggguggggacccugaccagcgacgaccugcucacccuggccgccgaccuggagaagcucaaguccaaggugacccgcaccgagcggccccugagcuccggcgucuacauggggaaccugagcucccagcagcucgaccagcgccgggcccugcugagcaugaucggcauguccggcgggaaccagaacagccagccgaagggcgacgggguggugcgcgucugggacgugaagaacgccgaccuccugaacaaccaguucggcacgaugcccucccugacccucgcgugccugaccaagcagggccagguggaccugaacgacgccguccaggcccucaccgaccuggggcugaucuacacggccaaguaccccaacagcagcgaccucgaccggcugucccagagccaccccauccugaacaugaucgacaccaagaaguccagccucaacaucuccggcuacaacuucagccugggggcggccaucaagaccggcgccugcaugcuggacgggggcaacaugcucgagaccaucaaggugacgccgcagaccauggacggcauccugaaguccauccugaaggugaagcgcagccucgggauguucaucuccgacacccccggcgagcggaaccccuacgagaacauccuguacaagaucugccugagcggggacggcuggcccuacaucgccucccgcaccgccaucaucgggcgggcgugggagaacacggucguggaccucgagagcgacuccaagccgcagaagaucggcagcaacggcuccaacaagagccugcaguccgccggguucgcccccggccugaccuacagccagcucaugacccugaaggacuccaugcugcagcuggaccccaacgccaagaccuggaucgacaucgaggggcgccccgaggacccgguggaggucgcccucuuccagcccaucagcggcugcuacauccacuucuuccgggagcccacggaccugaagcaguucaagcaggacgcgaaguacagccacgggaucgacgugaccgaccuguucgccgcccagcccggccucaccuccgccgugaucgaggcccugccgcgcaacaugguccugaccugccagggcagcgacgacaucaagaagcuccuggacucccaggggcggcgcgacaucaagcugaucgacgugagccucaacaagaucgacucccgcaaguucgagaacgcggucugggaccaguacaaggaccugugccacaugcacacgggcgugguggucgagaagaagaagaagggcgggaaggaggagaucacgccccacugcgcccugcucgacugcaucauguucgacgccgccgugagcgggggccugaacgccaccgugcugcgggcgguccucccccgcgacaugguguuccggaccuccagccccaaggugguccuguga

SEQ ID NO: 20729 - RNA, 1761 nt, Artificial Sequence
  derived and/or modified CDS sequence (opt1) from LASV(KAK-428;Clade n.d. (VII))__ANH09741__SP-IgE_NP(2-569)
auggacuggaccuggauccuguuccucguggccgccgcgacccgcguccacagcagcaacuccaaggaggugaaguccuuccuguggacccagagccuccgccgggagcugagcggcuacugcaccaacaucaagcugcaggucgugaaggacgcccaggcccuccugcacgggcuggacuucuccgaggugagcaacguccagcgccucaugcggaagcagaagcgcgacgacaacgaccugaagcggcugcgcgaccucaaccaggcggugaacaaccugguggagcugaaguccguccagcagaaguccgugcucaaggugggcacgcugaacagcgacgaccugcucacccuggccgccgaccuggagaagcucaagagcaaggucgugcggaccgagcgcccccuguccagcgggguguacaugggcaaccuguccagccagcagcucgaccagcggcgcgcccugcugaacaugaucgggauggccggcggcucccaggggaaccagccgagccgggacggcgucgugcgcgugugggacgucaagaacgcggaccuccugaacaaccaguucgggaccaugcccucccugacgcucgccugccugaccaagcagggccagguggaccugaacgacgugguccucgcccugaccgaccuggggcucaucuacaccgccaaguaccccaacagcuccgaccuggaccggcugagccagaaccaccccgugcucaacaugaucgacgugaacaagagcucccugaacaucagcggcuacaacuucucccugggcgcggccgucaaggccggggccugcaugcucgacggcgggaacaugcuggagacgaucaagaucagcccgcagaccguggacggcauccugaaguccauccucaaggugaagcgcgcccugggcauguucgucagcgacacccccggggagcggaaccccuacgagaacauccuguacaaggugugccucuccggcaacggguggcccuacaucgcgagccgcaccuccaucgucggccgggccugggagaacacggugguggaccuggagagcaacaagaaccagccgaaggucgggaacaacggcuccaacaagaugcugcagagcuccggcuucgccaccgggcucaccuacagccagcugaugacccugcgcgacuccaugcugcagcucgaccccacggccaagaccuggaucgacaucgagggccggcccgaggaccccguggagcuggcccuguuccagccgagcuccgggugcuacauccacuucuuccgcgagcccaccgaccucaagcaguucaagcaggacgcgaaguacagccacggcaucgacgugaacgaccuguucuccgcccagcccgggcugaccagcgccguccucgaggcccugccccggaacauggugcugacgugccagggcagcgacgacauccgcaagcuccuggacucccaggaccgcaaggacaucaagcugaucgacaucagccucuccaaggccgacgcgcggaaguucgagaacgacgugugggaccaguucaaggaccugugccacaugcacaccggcaucgucguggagaagaagaagaagggcgggaagcaggagaugaccccgcacugcgcccugcucgacugcaucauguucgacgccgccgugagcgggggccugaacguccccacccugcgcgccgugcuccccacggacaugguguuccggaccaucaccaccaaggucgugcuguga

SEQ ID NO: 20730 - RNA, 1761 nt, Artificial Sequence; identical to SEQ ID NO: 20724
  derived and/or modified CDS sequence (opt1) from LASV(Pinneo-NIG-1969;Clade I)__AIT17837__SP-IgE_NP(2-569)

SEQ ID NO: 20731 - RNA, 1761 nt, Artificial Sequence
  derived and/or modified CDS sequence (opt1) from LASV(ISTH0009-NIG-2011;Clade II)__AIT17405__SP-IgE_NP(2-569)
auggacuggaccuggauccuguuccucguggccgccgcgacccgcguccacagcagcguguccaaggaggucaagagcuuccuguggacccagucccuccgccgggagcugagcggcuacugcuccaacaucaagcuccagguggugaaggacgcccaggcccugcugcacgggcuggacuucagcgaggucuccaacgugcagcgccucaugcggaagcagaagcgcgacgacagcgaccugaagcggcugcgcgaccucaaccaggcggugaacaaccuggucgagcugaaguccacccagcagaaguccauccuccgggugggcacccugaccagcgacgaccugcucacccuggccgccgaccuggagaagcucaagagcaaggugauccgcaccgagcggccccuguccagcggggucuacaugggcaaccuguccacgcagcagcucgagcagcgccgggcccugcugaacaugaucgggauggugggcggcgcccaggggacccagccgggccgcgacggggugguccgggugugggacgugaagaaccccgaccuccugaacaaccaguucggcaccaugcccagccugacccucgcgugccugacgaagcaggggcaggucgaccugaacgacgccgugcucgcccugaccgaccugggccucaucuacaccgccaaguaccccaacuccagcgaccuggaccgccugucccagagccacccgauccucaacaugguggacaucaagaaguccagccugaacaucagcggcuacaacuucucccugggggcggccgucaaggccggcgccugcaugcucgacgggggcaacaugcuggagaccaucaaggugacgccccagaccauggacggcauccucaagagcauccugaaggugaagcggucccuggggauguucgucagcgacacccccggcgagcgcaaccccuacgagaacauccuguacaagaucugccucuccggggacggcuggccguacaucgccagccggaccuccaucguggggcgcgcgugggagaacacgaccguggaccuggagagcgacggcaagccccagaaggucggcuccgccgggagcaacaagucccugcagagcgccggcuuccccaccgggcucaccuacucccagcugaugacgcugaaggacagcaugaugcagcuggaccccuccgccaagaccuggaucgacaucgagggccggccggaggaccccguggagaucgcccucuaccagcccaugagcgggugcuacauccacuucuuccgcgagcccaccgaccugaagcaguucaagcaggacgcgaaguacucccacggcaucgacgucgccgaccuguucccggcccagcccggccucaccagcgccgugaucgaggcccugccccggaacauggugcugacgugccaggggagcgacgacaucaagcgccuccuggacucccagggccgccgggacaucaagcugaucgacaucgcgcucagcaaggccgacucccgccgguucgagaacgccgucugggaccagugcaaggaccugugccacaugcacaccggggugguggucgagaagaagaagcgcggcgggaaggaggagaucacgccccacugcgcccugauggacugcaucauguacgacgccgcggugagcggcggccucaacaucccggugcugcgggccguccugccccgcgacaugguguuccggaccuccagccccaaggugguccucuga

SEQ ID NO: 20732 - RNA, 1761 nt, Artificial Sequence
  derived and/or modified CDS sequence (opt1) from LASV(ISTH2010-NIG-2012;Clade II)__AIT17483__SP-IgE_NP(2-569)
auggacuggaccuggauccuguuccucguggccgccgcgacccgcguccacagcagcgccuccaaggaggugaaguccuuccuguggacccagagccuccgccgggagcugagcggcuacugcuccaacaucaagcugcaggucgugaaggacgcccaggcgcuccugcacgggcuggacuucagcgagguguccaacguccagcgccucaugcggaagcagaagcgcgacgacagcgaccugaagcggcugcgcgaccucaaccaggccgugaacaaccugguggagcugaaguccacccagcagaaguccauccuccgggucggcacgcugaccagcgacgaccugcucacccuggccgccgaccuggagaagcucaagagcaaggugauccgcaccgagcggccccuguccagcgggguguacaugggcaaccuguccacgcagcagcucgagcagcgccgggcccugcugaaccucaucgggauggucggcggcgcgcaggggacccagccgggccgcgacgggguggugcgggucugggacgugaagaaccccgaccugcugaacaaccaguucggcaccaugcccagccucacccuggccugccugacgaagcagggccagguggaccucaacgacgccguccuggcccugaccgaccucgggcugaucuacaccgcgaaguaccccaacuccagcgaccuggaccgccucucccagagccacccgauccugaacaugguggacaccaagaaguccagccugaacaucagcggcuucaacuucucccucggggccgccgugaaggccggcgccugcaugcuggacgggggcaacaugcuggagacgaucaaggucacgccccagaccauggacggcauccucaagagcauccugaaggugaagaagucccuggggauguucgugagcgacacccccggcgagcggaaccccuacgagaacauccucuacaagaucugccuguccggggacggcuggccguacaucgcgagccgcaccuccaucgucgggcgggccugggagaacaccaccguggaccuggagagcgacggcaagccccacaaggugggcaccgccggguccaacaagagccuccaguccgccggcuuccccacggggcugaccuacagccagcugaugacccugaaggacuccaugaugcagcucgaccccagcgccaagaccuggaucgacaucgagggccgcccggaggaccccgucgagaucgcgcuguaccagcccauguccgggugcuacauccacuucuuccgggagcccacggaccugaagcaguucaagcaggacgccaaguacagccacggcaucgacguggccgaccucuucccggcccagcccggccugaccuccgccgucaucgaggcgcugccccgcaacauggugcugaccugccaggggagcgacgacaucaagcggcuccuggacagccagggccgccgcgacaucaagcucaucgacaucgcccuguccaaggccgacagccggcgcuucgagaacgccgugugggaccagugcaaggaccugugccacaugcacaccggggucgugguggagaagaagaagcggggcgggaaggaggagaucacgccccacugcgcccucauggacugcaucauguacgacgcggccgucuccggcggccugaacaucccggugcugcgcgccgugcucccccgggacauggucuuccgcaccagcucccccaagguggugcuguga

SEQ ID NO: 20733 - RNA, 1761 nt, Artificial Sequence
  derived and/or modified CDS sequence (opt1) from LASV(Lassa virus/H.sapiens-wt/NGA/2015/ISTH_0543;Clade II)__AVO03640__SP-IgE_NP(2-569)
auggacuggaccuggauccuguuccucguggccgccgcgacccgcguccacagcagcgccuccaaggaggugaaguccuuccuguggacccagagccuccgccgggagcugagcggcuacugcuccaacaucaagcugcaggucgugaaggacgcccaggcgcuccugcacgggcuggacuucagcgagguguccaacguccagcgccucaugcggaagcagaagcgcgacgacagcgaccugaagcggcugcgcgaccucaaccaggccgugaacaaccugguggagcugaaguccacccagcagaaguccauccuccgggucggcacgcugaccagcgacgaccugcucacccuggccgccgaccuggagaagcucaagagcaaggugauccgcaccgagcggccccuguccagcgggguguacaugggcaaccuguccacgcagcagcucgagcagcgccgggcccugcugaacaugaucgggauggucggcggcgcgcaggggacccagccgggccgcgacgggguggugcgggucugggacgugaagaaccccgaccuccugaacaaccaguucggcaccaugcccagccugacccucgccugccugacgaagcagggccagguggaccugaacgacgccguccucgcccugaccgaccuggggcucaucuacaccgcgaaguaccccaacuccagcgaccuggaccgccugucccagagccacccgauccucaacaugguggacaccaagaaguccagccugaacaucagcggcuacaacuucucccugggggccgccgugaaggccggcgccugcaugcucgacgggggcaacaugcuggagacgaucaaggucacgccccagaccauggacggcauccucaagagcauccugaaggugaagaagucccuggggauguucgugagcgacacccccggcgagcggaaccccuacgagaacauccuguacaagaucugccucuccggggacggcuggccguacaucgcgagccgcaccuccaucgucgggcgggccugggagaacaccaccguggaccuggagagcgacggcaagccccagaaggugggcuccgccgggagcaacaagucccugcagagcgccggcuuccccaccgggcucacguacucccagcugaugacccugaaggacagcaugaugcagcuggaccccuccgccaagaccuggaucgacaucgagggccgcccggaggaccccgucgagaucgcgcucuaccagcccaugagcgggugcuacauccacuucuuccgggagcccaccgaccugaagcaguucaagcaggacgccaaguacucccacggcaucgacguggccgaccuguucccggcccagcccggccucacgagcgccgucaucgaggcgcugccccgcaacauggugcugaccugccaggggagcgacgacaucaagcggcuccuggacucccagggccgcaaggacaucaagcugaucgacaucgcccucagcaaggccgacucccgccgguucgagaacgccgugugggaccagugcaaggaccugugccacaugcacaccggggucgugguggagaagaagaagcgcggcgggaaggaggagaucacgccccacugcgcccugauggacugcaucauguacgacgcggccgucagcggcggccucaacaucccggugcugcgggccgugcugccccgcgacauggucuuccggaccuccagccccaagguggugcucuga

SEQ ID NO: 20734 - RNA, 1761 nt, Artificial Sequence
  derived and/or modified CDS sequence (opt1) from LASV(Lassa virus/H.sapiens-wt/NGA/2016/ISTH_0009;Clade II)__AVO03572__SP-IgE_NP(2-569)
auggacuggaccuggauccuguuccucguggccgccgcgacccgcguccacagcagcgccuccaaggaggugaaguccuuccuguggacccagagccuccgccgggagcugagcggcuacugcuccaacaucaagcugcaggucgugaaggacgcccaggcgcuccugcacgggcuggacuucagcgagguguccaacguccagcgccucaugcggaagcagaagcgcgacgacagcgaccugaagcggcugcgcgaccucaaccaggccgugaacaaccugguggagcugaaguccacccagcagaaguccauccuccgggucggcacgcugaccagcgacgaccugcucacccuggccgccgaccuggagaagcucaagagcaaggugauccgcaccgagcggccccuguccagcgggguguacaugggcaaccuguccacgcagcagcucgagcagcgccgggcccugcugaacaugaucgggauggucggcggcgcgcaggggacccagccgggccgcgacgggguggugcgggucugggacgugaagaaccccgaccuccugaacaaccaguucggcaccaugcccagccugacccucgccugccugacgaagcagggccagguggaccugaacgacgccguccucgcccugaccgaccuggggcucaucuacaccgcgaaguaccccaacuccagcgaccuggaccgccugucccagagccacccgauccucaacaugguggacaccaagaaguccagccugaacaucagcggcuacaacuucucccugggggccgccgugaaggccggcgccugcaugcucgacgggggcaacaugcuggagacgaucaaggucacgccccagaccauggacggcauccucaagagcauccugaaggugaagaagucccuggggauguucgugagcgacacccccggcgagcggaaccccuacgagaacauccuguacaagaucugccucuccggggacggcuggccguacaucgcgagccgcaccuccaucgucgggcgggccugggagaacaccaccguggaccuggagagcgacggcaagccccagaaggugggcuccgccgggagcaacaagucccugcagagcgccggcuuccccaccgggcucacguacucccagcugaugacccugaaggacagcaugaugcagcuggaccccuccgccaagaccuggaucgacaucgagggccgcccggaggaccccgucgagaucgcgcucuaccagcccaugagcgggugcuacauccacuucuuccgggagcccaccgaccugaagcaguucaagcaggacgccaaguacucccacggcaucgacguggccgaccuguucccggcccagcccggccucacgagcgccgucaucgaggcgcugccccgcaacauggugcugaccugccaggggagcgacgacaucaagcggcuccuggacucccagggccgccgcgacaucaagcugaucgacaucgcccucagcaaggccgacucccggcgcuucgagaacgccgugugggaccagugcaaggaccugugccacaugcacaccggggucgugguggagaagaagaagcggggcgggaaggaggagaucacgccccacugcgcccugauggacugcaucauguacgacgcggccgucagcggcggccucaacaucccggugcugcgcgccgugcugccccgggacauggucuuccgcaccuccagccccaagguggugcucuga

SEQ ID NO: 20735 - RNA, 1761 nt, Artificial Sequence
  derived and/or modified CDS sequence (opt1) from LASV(Lassa virus/H.sapiens-wt/NGA/2016/ISTH_0017;Clade II)__AVO03568__SP-IgE_NP(2-569)
auggacuggaccuggauccuguuccucguggccgccgcgacccgcguccacagcagcgccuccaaggaggugaaguccuuccuguggacccagagccuccgccgggagcugagcggcuacugcuccagcaucaagcugcaggucgugaaggacgcccaggcgcuccugcacgggcuggacuucuccgaggugagcaacguccagcgccucaugcggaagcagaagcgcgacgacuccgaccugaagcggcugcgcgaccucaaccaggccgugaacaaccugguggagcucaagagcacccagcagaaguccauccugcgggucggcacgcugaccagcgacgaccugcucacccuggccgccgaccuggagaagcucaaguccaaggugauccgcaccgagcggccccugagcuccgggguguacaugggcaaccugagcacgcagcagcucgagcagcgccgggcccugcugaacaugaucgggauggcgggcggcgcccaggggacccagccgggccgcgacggggucgugcgggugugggacgucaagaaccccgaccuccugaacaaccaguucggcaccaugcccucccugacccucgccugccugacgaagcagggccagguggaccugaacgacgccgugcucgcgcugaccgaccuggggcucaucuacaccgccaaguaccccaacagcuccgaccuggaccgccugagccagagccacccgauccucaacauggucgacaccaagaaguccagccugaacaucuccggcuacaacuucagccugggggccgccgugaaggccggcgcgugcaugcucgacgggggcaacaugcuggagacgaucaaggugacgccccagaccauggacggcauccugaaguccauccucaaggucaagcggagccuggggauguucguguccgacgcccccggcgagcgcaaccccuacgagaacauccuguacaagaucugccucagcggggacggcuggccguacaucgccucccggaccagcaucguggggcgcgccugggagaacaccaccgucgaccuggaguccgacggcaagccccagaaggugggcgccaccgggagcaacaagucccugcagagcgcgggcuuccccaccgggcucacguacucccagcugaugacccugaaggacagcaugaugcagcuggaccccuccgccaagaccuggaucgacaucgagggccggccggaggaccccguggaggucgcccucuaccagcccgugagcgggugcuacauccacuucuuccgcgagcccaccgaccugaagcaguucaagcaggacgccaaguacucccacggcaucgacgucgccgaccuguucccggcgcagcccggccucacgagcgccgugaucgaggcccugccccggaacauggugcugaccugccaggggagcgacgacaucaagaagcuccuggacucccagggccgcaaggacaucaagcugaucgacaucgcccucagcaaggccgacucccgccgguucgagaacgcggucugggaccagugcaaggaccugugccacaugcacaccggggugguggucgagaagaagaagcgcggcgggaaggaggagaucacgccccacugcgcccugauggacugcaucauguacgacgccgccgugagcggcggccucaacaucccggugcugcgggcgguccugccccgcgacaugguguuccggaccuccagccccaaggugguccucuga

SEQ ID NO: 20736 - RNA, 1761 nt, Artificial Sequence
  derived and/or modified CDS sequence (opt1) from LASV(Lassa virus/H.sapiens-wt/NGA/2018/ISTH_0959;Clade II)__AVV65100__SP-IgE_NP(2-569)
auggacuggaccuggauccuguuccucguggccgccgcgacccgcguccacagcagcgccuccaaggaggugaaguccuuccuguggacccagagccuccgccgggagcugagcggcuacugcuccaacaucaagcugcaggucgugaaggacgcccaggcgcuccugcacgggcuggacuucagcgagguguccaacguccagcgccucaugcggaagcagaagcgcgacgacagcgaccugaagcggcugcgcgaccucaaccaggccgugaacaaccugguggagcugaaguccacccagcagaaguccauccuccgggucggcacccugaccagcgacgaccugcucacccuggccgccgaccuggagaagcucaagagcaaggugauccgcaccgagcggccccuguccagcgggguguacaugggcaaccuguccacgcagcagcucgagcagcgccgggcccugcugaaccucaucgggauggucggcggcgcgcaggggacccagccgggccgcgacgggguggugcgggucugggacgugaagaaccccgaccugcugaacaaccaguucggcaccaugcccagccucacccuggccugccugacgaagcagggccagguggaccucaacgacgucgugcuggcccugaccgaccucgggcugaucuacaccgccaaguaccccaacuccagcgaccuggaccgccucucccagagccacccgauccugaacaugguggacaccaagaaguccagccugaacaucagcggcuucaacuucucccucggggcggccgucaaggccggcgccugcaugcuggacgggggcaacaugcuggagacgaucaaggugacgccccagaccauggacggcauccucaagagcauccugaaggugaagaagucccuggggauguucgucagcgacacccccggcgagcggaaccccuacgagaacauccucuacaagaucugccuguccggggacggcuggccguacaucgccagccgcaccuccaucguggggcgggcgugggagaacaccaccguggaccuggagagcgacggcaagccccacaaggucggcaccgccggguccaacaagagccuccaguccgccggcuuccccacggggcugaccuacagccagcugaugacccugaaggacuccaugaugcagcucgaccccagcgccaagaccuggaucgacaucgagggccgcccggaggaccccguggagaucgcccuguaccagcccauguccgggugcuacauccacuucuuccgggagcccacggaccugaagcaguucaagcaggacgcgaaguacagccacggcaucgacgucgccgaccucuucccggcccagcccggccugaccuccgccgugaucgaggcccugccccgcaacauggugcugaccugccaggggagcgacgacaucaagcggcuccuggacagccagggccgcaaggacaucaagcucaucgacaucgcgcuguccaagaccgacagccgccgguucgagaacgccgucugggaccagugcaaggaccugugccacaugcacacgggggugguggucgagaagaagaagcgcggcgggaaggaggagaucacgccccacugcgcccucauggacugcaucauguacgacgccgccguguccggcggccugaacaucccggugcugcgggcgguccucccccgcgacaugguguuccggaccagcucccccaaggugguccuguga

SEQ ID NO: 20737 - RNA, 1761 nt, Artificial Sequence
  derived and/or modified CDS sequence (opt1) from LASV(LASV003-NIG-2008;Clade II)__AIT17581__SP-IgE_NP(2-569)
auggacuggaccuggauccuguuccucguggccgccgcgacccgcguccacagcagcgccuccaaggaggugaaguccuuccuguggacccagagccuccgccgggagcugagcggcuacugcuccagcaucaagcugcaggucgugaaggacgcccaggcgcuccugcacgggcuggacuucuccgaggugagcaacguccagcgccucaugcggaagcagaagcgcgacgacuccgaccugaagcggcugcgcgaccucaaccaggccgugaacaaccugguggagcucaagagcacccagcagaaguccguccugcgggugggcacccugaccagcgacgaccugcucacccuggccgccgaccuggagaagcucaaguccaaggugauccgcaccgagcggccccugagcuccggggucuacaugggcaaccugagcgcccagcagcucgagcagcgccggacgcugcugaacaugaucgggauggugggcggcgcgcaggggacccagccgggccgcgacggggugguccgggugugggacgugaagaaccccgaccuccugaacaaccaguucggcaccaugcccucccugacccucgccugccugacgaagcaggggcaggucgaccugaacgacguggugcucgcccugaccgaccugggccucaucuacaccgccaaguaccccaacagcuccgaccuggaccgccugagccagagccacccgauccucuccauggucgacaccaagaaguccagccugaacaucagcggcuacaacuucucccugggggcggccgugaaggccggcgccugcaugcucgacgggggcaacaugcuggagacgaucaaggugacgccccagaccauggacggcauccucaagagcauccugaaggucaagaagucccuggggauguucgugagcgacacccccggcgagcggaaccccuacgagaacauccuguacaagaucugccucuccggggacggcuggccguacaucgccagccgcaccuccaucguggggcgggcgugggagaacaccaccgucgaccuggagagcgacggcaagccccagaaggugggcaccgccggguccaacaagagccugcaguccgccggcuuccccacggggcucaccuacagccagcugaugacccugaaggacuccaugaugcagcuggaccccagcgccaagaccuggaucgacaucgagggccgcccggaggaccccgucgagaucgcccucuaccagcccauguccgggugcuacauccacuucuuccgggagcccacggaccugaagcaguucaagcaggacgcgaaguacagccacggcaucgacgugaccgaccuguucccggcccagcccggccucaccagcgccgugaucgaggcccugccccgcaacaugguccugaccugccagggguccgacgacaucaagcggcuccuggacagccagggccgccgcgacaucaagcugaucgacaucgcccucuccaaggcggacagccggcgcuucgagaacgccgugugggaccagugcaaggaccugugccacaugcacacggggguggucguggagaagaagaagcggggcgggaaggaggagaucacgccccacugcgcccugauggacugcaucauguacgacgccgccguguccggcggccucaacaucccgguccugcgcgcggugcugccccgggacaugguguuccgcaccagcucccccaaggucgugcucuga

SEQ ID NO: 20738 - RNA, 1761 nt, Artificial Sequence
  derived and/or modified CDS sequence (opt1) from LASV(LASV035-NIG-2009;Clade II)__AIT17589__SP-IgE_NP(2-569)
auggacuggaccuggauccuguuccucguggccgccgcgacccgcguccacagcagcgccuccaaggaggugaaguccuuccuguggacccagagccuccgccgggagcugagcggcuacugcuccagcaucaagcugcaggucgugaaggacgcccaggcgcuccugcacgggcuggacuucuccgaggugagcaacguccagcgccucaugcggaagcagaagcgcgacgacuccgaccugaagcggcugcgcgaccucaaccaggccgugaacaaccugguggagcucaagagcacccagcagaaguccauccugcgggucggcacgcugaccagcgacgaccugcucacccuggccgccgaccuggagaagcucaaguccaaggugauccgcaccgagcggccccugagcuccgggguguacaugggcaaccugagcgcccagcagcucgagcagcgccgggcgcugcugaacaugaucgggauggucggcggcgcccaggggacgcagccgggccgcgacgggguggugcgggucugggacgugaagaaccccgaccuccugaacaaccaguucggcaccaugcccucccugacccucgccugccugaccaagcagggccagguggaccugaacgacgccguccucgcgcugacggaccuggggcucaucuacaccgccaaguaccccaacagcuccgaccuggaccgccugagccagagccacccgauccucaacaugguggacaccaagaaguccagccugaacaucuccggcuacaacuucagccugggggccgccgugaaggccggcgcgugcaugcucgacgggggcaacaugcuggagaccaucaaggucacgccccagaccauggacggcauccugaaguccauccucaaggugaagcggagccuggggauguucguguccgacacccccggcgagcgcaaccccuacgagaacauccuguacaagaucugccucagcggggacggcuggccguacaucgccucccggaccagcaucgucgggcgcgccugggagaacacgaccguggaccuggaguccgacggcaagccccagaaggugggcaccaccgggagcaacaagucccugcagagcgccggcuuccccacggggcucaccuacucccagcugaugacccugaaggacagcaugaugcagcuggaccccuccgccaagaccuggaucgacaucgagggccggccggaggaccccgucgagaucgcgcucuaccagcccaugagcgggugcuacauccacuucuuccgcgagcccacggaccugaagcaguucaagcaggacgccaaguacucccacggcaucgacguggccgaccuguucccggcccagcccggccucaccagcgccgucaucgaggcgcugccccggaacauggugcugaccugccaggggagcgacgacaucaagaagcuccuggacucccagggccgccgcgacaucaagcugaucgacaucgcccucagcaaggccgacucccggaaguucgagaacgccgugugggaccagugcaaggaccugugccacaugcacaccggggucgugguggagaagaagaagcgcggcgggaaggaggagaucacgccccacugcgcccugauggacugcaucauguacgacgcggccgucagcggcggccucaacaucccggugcugcgggccgugcugccccgcgacauggucuuccggaccuccagccccaagguggugcucuga

SEQ ID NO: 20739 - RNA, 1761 nt, Artificial Sequence
  derived and/or modified CDS sequence (opt1) from LASV(LASV1000-NIG-2009;Clade II)__AIT17783__SP-IgE_NP(2-569)
auggacuggaccuggauccuguuccucguggccgccgcgacccgcguccacagcagcgccuccaaggaggugaaguccuuccuguggacccagagccuccgccgggagcugagcggcuacugcuccaacaucaagcugcaggucgugaaggacgcccaggcgcuccugcacgggcuggacuucagcgagguguccaacguccagcgccucaugcggaagcagaagcgcgacgacagcgaccugaagcggcugcgcgaccucaaccaggccgugaacaaccugguggagcugaaguccacccagcagaaguccauccuccgggucggcacgcugaccagcgacgaccugcucacccuggccgccgaccuggagaagcucaagagcaaggugauccgcaccgagcggccccuguccagcgggguguacaugggcaaccuguccacgcagcagcucgagcagcgccgggcccugcugaacaugaucgggauggucggcggcgcgcaggggacccagccgggccgcgacgggguggugcgggucugggacgugaagaaccccgaccuccugaacaaccaguucggcaccaugcccagccugacccucgccugccugacgaagcagggccagguggaccugaacgacgucgugcucgcccugaccgaccuggggcucaucuacaccgccaaguaccccaacuccagcgaccuggaccgccugucccagagccacccgauccucaacaugguggacaccaagaaguccagccugaacaucagcggcuacaacuucucccugggggcggccgucaaggccggcgccugcaugcucgacgggggcaacaugcuggagacgaucaaggugacgccccagaccauggacggcauccucaagagcauccugaaggugaagaagucccuggggauguucgucagcgacacccccggcgagcggaaccccuacgagaacauccuguacaagaucugccucuccggggacggcuggccguacaucgccagccgcaccuccaucguggggcgggcgugggagaacaccaccguggaccuggagagcgacggcaagccccagaaggucggcaccgccggguccaacaagagccugcaguccgccggcuuccccacggggcucaccuacagccagcugaugacccugaaggacuccaugaugcagcuggaccccagcgccaagaccuggaucgacaucgagggccgcccggaggaccccguggagaucgcccucuaccagcccgucuccgggugcuacauccacuucuuccgggagcccacggaccugaagcaguucaagcaggacgcgaaguacagccacggcaucgacguggccgaccuguucccggcccagcccggccucaccuccgccgugaucgaggcccugccccgcaacaugguccugaccugccaggggagcgacgacaucaagcggcuccuggacagccagggccgccgcgacaucaagcugaucgacaucgcgcucuccaaggccgacagccggcgcuucgagaacgccgugugggaccagugcaaggaccugugccacaugcacaccgggguggucguggagaagaagaagcggggcgggaaggaggagaucacgccccacugcgcccugauggacugcaucauguacgacgccgcgguguccggcggccucaacaucccgguccugcgcgccgugcugccccgggacaugguguuccgcaccagcucccccaaggucgugcucuga

SEQ ID NO: 20740 - RNA, 1761 nt, Artificial Sequence
  derived and/or modified CDS sequence (opt1) from LASV(LASV221-NIG-2010;Clade II)__AIT17625__SP-IgE_NP(2-569)
auggacuggaccuggauccuguuccucguggccgccgcgacccgcguccacagcagcgccuccaaggaggugaaguccuuccuguggacccagagccuccgccgggagcugagcggcuacugcuccagcaucaagcugcaggucgugaaggacgcccaggcgcuccugcacgggcuggacuucuccgaggugagcaacguccagcgccucaugcggaagcagcgccgggacgacuccgaccugaagcgccugcgggaccucaaccaggccgugaacaaccugguggagcucaagagcacccagcagaaguccauccugcgcgucggcacgcugaccagcgacgaccugcucacccuggccgccgaccuggagaagcucaaguccaaggugauccggaccgagcgcccccugagcuccgggguguacaugggcaaccugagcacgcagcagcucgagcagcggcgcgcccugcugaacaugaucgggauggucggcggcgcgcaggggacccagccgggccgggacgggguggugcgcgucugggacgugaagaaccccgaccuccugaacaaccaguucggcaccaugcccucccugacccucgccugccugacgaagcagggccagguggaccugaacgacgccguccucgcccugaccgaccuggggcucaucuacaccgcgaaguaccccaacagcuccgaccuggaccggcugagccagagccacccgauccucaacaugguggacaccaagaaguccagccugaacaucuccggcuacaacuucagccugggggccgccgugaaggccggcgccugcaugcucgacgggggcaacaugcuggagacgaucaaggucacgccccagaccguggacggcauccugaaguccauccucaaggugaagcgcagccuggggauguucgucuccgacacccccggcgagcggaaccccuacgagaacauccuguacaagaucugccucagcggggacggcuggccguacaucgcgucccgcaccagcaucguggggcgggccugggagaacaccaccguggaccuggaguccgacggcaagccccagaaggucggcaccgccgggagcaacaagucccugcagagcgccggcuuccccacggggcucaccuacucccagcugaugacccugaaggacagcaugaugcagcuggaccccuccgccaagaccuggaucgacaucgagggccgcccggaggaccccguggagaucgcgcucuaccagcccaugagcgggugcuacauccacuucuuccgggagcccacggaccugaagcaguucaagcaggacgccaaguacucccacggcaucgacgucgccgaccuguucccggcccagcccggccucaccagcgccgugaucgaggcgcugccccgcaacauggugcugaccugccaggggagcgacgacaucaagcgccuccuggacucccagggccggcgcgacaucaagcugaucgacaucgcccucagcaaggccgacucccggaaguucgagaacgccgucugggaccagugcaaggaccugugccacaugcacaccggggugguggucgagaagaagaagcgcggcgggaaggaggagaucacgccccacugcgcccugauggacugcaucauguacgacgcggccgugagcggcggccucaacaucccggugcugcgggccguccugccccgcgacaugguguuccggaccuccagccccaaggugguccucuga

SEQ ID NO: 20741 - RNA, 1761 nt, Artificial Sequence
  derived and/or modified CDS sequence (opt1) from LASV(LASV237-NIG-2010;Clade II)__AIT17639__SP-IgE_NP(2-569)
auggacuggaccuggauccuguuccucguggccgccgcgacccgcguccacagcagcgccuccaaggaggugaaguccuuccuguggacccagagccuccgccgggagcugagcggcuacugcuccaacaucaagcugcaggucgugaaggacgcccaggcgcuccugcacgggcuggacuucagcgagguguccaacguccagcgccucaugcggaagcagaagcgcgacgacagcgaccugaagcggcugcgcgaccucaaccaggccgugaacaaccugguggagcugaaguccacccagcagaaguccauccuccgggucggcacccugaccagcgacgaccugcucacccuggccgccgaccuggagaagcucaagagcaaggugauccgcaccgagcggccccuguccagcgggguguacaugggcaaccuguccacgcagcagcucgagcagcgccgggcccugcugaacaugaucgggauggucggcggcgcgcaggggacccagccgggccgcgacgggguggugcgggucugggacgugaagaaccccgaccuccugaacaaccaguucggcaccaugcccagccugacccucgccugccugacgaagcagggccagguggaccugaacgacgccguccucgcccugaccgaccuggggcucaucuacaccgcgaaguaccccaacuccagcgaccuggaccgccugucccagagccacccgauccucaacaugguggacaucaagaaguccagccugaacaucagcggcuacaacuucucccugggggccgccgugaaggccggcgccugcaugcucgacgggggcaacaugcuggagaccaucaaggucacgccccagaccauggacggcauccucaagagcauccugaaggugaagcggucccuggggauguucgugagcgacacccccggcgagcgcaaccccuacgagaacauccuguacaagaucugccucuccggggacggcuggccguacaucgcgagccggaccuccaucgucgggcgcgccugggagaacacgaccguggaccuggagagcgacggcaagccccagaaggugggcuccgccgggagcaacaagucccugcagagcgccggcuuccccaccgggcucaccuacucccagcugaugacgcugaaggacagcaugaugcagcuggaccccuccgccaagaccuggaucgacaucgagggccggccggaggaccccgucgagaucgcgcucuaccagcccaugagcgggugcuacauccacuucuuccgcgagcccaccgaccugaagcaguucaagcaggacgccaaguacucccacggcaucgacguggccgaccuguucccggcccagcccggccucaccagcgccgucaucgaggcgcugccccggaacauggugcugacgugccaggggagcgacgacaucaagcgccuccuggacucccagggccgccgggacaucaagcugaucgacaucgcccucagcaaggccgacucccgccgguucgagaacgccgugugggaccagugcaaggaccugugccacaugcacaccggggucgugguggagaagaagaagcgcggcgggaaggaggagaucacgccccacugcgcccugauggacugcaucauguacgacgcggccgucagcggcggccucaacaucccggugcugcgggccgugcugccccgcgacauggucuuccggaccuccagccccaagguggugcucuga

SEQ ID NO: 20742 - RNA, 1761 nt, Artificial Sequence
  derived and/or modified CDS sequence (opt1) from LASV(LASV253-NIG-2011;Clade II)__AIT17671__SP-IgE_NP(2-569)
auggacuggaccuggauccuguuccucguggccgccgcgacccgcguccacagcagcgccuccaaggaggugaaguccuuccuguggacccagagccuccgccgggagcugagcggcuacugcuccagcaucaagcugcaggucgugaaggacgcccaggcgcuccugcacgggcuggacuucuccgaggugagcaacguccagcgccucaugcggaagcagaagcgcgacgacuccgaccugaagcggcugcgcgaccucaaccaggccgugaacaaccugguggagcucaagagcacccagcagaaguccguccugcgggugggcacccugaccagcgacgaccugcucacccuggccgccgaccuggagaagcucaaguccaaggugauccgcaccgagcggccccugagcuccggggucuacaugggcaaccugagcacgcagcagcucgagcagcgccgggcccugcugaacaugaucgggauggugggcggcgcgcaggggacccagccgggccgcgacggggugguccgggugugggacgugaagaaccccgaccuccugaacaaccaguucggcaccaugcccucccugacccucgccugccugacgaagcaggggcaggucgaccugaacgacguggugcucgcccugaccgaccugggccucaucuacaccgccaaguaccccaacagcuccgaccuggaccgccugagccagagccacccgauccucaacauggucgacaccaagaaguccagccugaacaucuccggcuacaacuucagccugggggcggccgugaaggccggcgccugcaugcucgacgggggcaacaugcuggagacgaucaaggugacgccccagaccauggacggcauccugaaguccauccucaaggucaagaagucccuggggauguucgugagcgacacccccggcgagcggaaccccuacgagaacauccuguacaagaucugccucagcggggacggcuggccguacaucgccucccgcaccagcaucguggggcgggcgugggagaacaccaccgucgaccuggaguccgacggcaagccccagaaggugggcaccgccgggagcaacaagucccugcagagcgccggcuuccccacggggcucaccuacucccagcugaugacccugaaggacagcaugaugcagcuggaccccuccgccaagaccuggaucgacaucgagggccgcccggaggaccccgucgagaucgcccucuaccagcccaugagcgggugcuacauccacuucuuccgggagcccacggaccugaagcaguucaagcaggacgcgaaguacucccacggcaucgacgugaccgaccuguucccggcccagcccggccucaccagcgccgugaucgaggcccugccccgcaacaugguccugaccugccaggggagcgacgacaucaagcggcuccuggacucccagggccgccgcgacaucaagcugaucgacaucgcccucagcaaggcggacucccggcgcuucgagaacgccgugugggaccagugcaaggaccugugccacaugcacacggggguggucguggagaagaagaagcggggcgggaaggaggagaucacgccccacugcgcccugauggacugcaucauguacgacgccgccgugagcggcggccucaacaucccgguccugcgcgcggugcugccccgggacaugguguuccgcaccuccagccccaaggucgugcucuga

SEQ ID NO: 20743 - RNA, 1761 nt, Artificial Sequence
  derived and/or modified CDS sequence (opt1) from LASV(LASV254-NIG-2011;Clade II)__AIT17675__SP-IgE_NP(2-569)
auggacuggaccuggauccuguuccucguggccgccgcgacccgcguccacagcagcgccuccaaggaggugaaguccuuccuguggacccagagccuccgccgggagcugagcggcuacugcuccagcaucaagcugcaggucgugaaggacgcccaggcgcuccugcacgggcuggacuucuccgaggugagcaacguccagcgccucaugcggaagcagaagcgcgacgacuccgaccugaagcggcugcgcgaccucaaccaggccgugaacaaccugguggagcucaagagcacccagcagaaguccguccugcgggugggcacgcugaccagcgacgaccugcucacccuggccgccgaccuggagaagcucaaguccaaggugauccgcaccgagcggccccugagcuccggggucuacaugggcaaccugagcacgcagcagcucgagcagcgccgggcccugcugaacaugaucgggauggugggcggcgcgcaggggacccagccgggccgcgacggggugguccgggugugggacgugaagaaccccgaccuccugaacaaccaguucggcaccaugcccucccugacccucgccugccugacgaagcaggggcaggucgaccugaacgacgccgugcucgcccugaccgaccugggccucaucuacaccgcgaaguaccccaacagcuccgaccuggaccgccugagccagagccacccgauccucaacaugguggacaccaagaaguccagccugaacaucuccggcuacaacuucagccugggggccgccgucaaggccggcgccugcaugcucgacgggggcaacaugcuggagacgaucaaggugacgccccagaccauggacggcauccugaaguccauccucaaggugaagaagucccuggggauguucgucagcgacacccccggcgagcggaaccccuacgagaacauccuguacaagaucugccucagcggggacggcuggccguacaucgcgucccgcaccagcaucguggggcgggccugggagaacaccaucguggaccuggaguccgacggcaagccccagaaggucggcaccgccgggagcaacaagucccugcagagcgccggcuuccccaccgggcucacguacucccagcugaugacccugaaggacagcaugaugcagcuggaccccuccgccaagaccuggaucgacaucgagggccgcccggaggaccccguggagaucgcgcucuaccagcccaugagcgggugcuacauccacuucuuccgggagcccaccgaccugaagcaguucaagcaggacgccaaguacucccacggcaucgacgucgccgaccuguucccggcccagcccggccucacgagcgccgugaucgaggcgcugccccgcaacauggugcugaccugccaggggagcgacgacaucaagcggcuccuggacucccagggccgccgcgacaucaagcugaucgacaucgcccucagcaaggccgacucccggcgcuucgagaacgccgucugggaccagugcaaggaccugugccacaugcacaccggggugguggucgagaagaagaagcggggcgggaaggaggagaucacgccccacugcgcccugauggacugcaucauguacgacgcggccgugagcggcggccucaacaucccggugcugcgcgccguccugccccgggacaugguguuccgcaccuccagccccaaggugguccucuga

SEQ ID NO: 20744 - RNA, 1761 nt, Artificial Sequence
  derived and/or modified CDS sequence (opt1) from LASV(Nig08-04;Clade II)__ADU56611__SP-IgE_NP(2-569)
auggacuggaccuggauccuguuccucguggccgccgcgacccgcguccacagcagcgccuccaaggaggugaaguccuuccuguggacccagagccuccgccgggagcugagcggcuacugcuccaacaucaagcugcaggucgugaaggacgcccaggcgcuccugcacgggcuggacuucagcgagguguccaacguccagcgccucaugcggaagcagaagcgcgacgacggcgaccugaagcggcugcgcgaccucaaccaggccgugaacaaccugguggagcucaagagcacccagcagaaguccguccugcggguggggacccugaccagcgacgaccugcucacccuggccgccgaccuggagaagcucaaguccaaggugauccgcaccgagcggccccugagcuccggcgucuacauggggaaccugagcacgcagcagcucgagcagcgcaaggcccugcuguccaugaucggcauggugggcggggcgcagggcacccagccggggcgggacggcgugguccgcgugugggacgugaagaaccccgaccuccugaacaaccaguucgggaccaugcccagccugacccucgccugccugacgaagcagggccaggucgaccugaacgacgccgugcucgcccugaccgaccugggccucaucuacaccgcgaaguaccccaacuccagcgaccuggaccggcugucccagagccacccgauccucaacaugguggacaccaagaaguccagccugaacaucagcggguacaacuucucccugggcgccgccgucaaggccggggccugcaugcucgacggcggcaacaugcuggagacgaucaaggugacgccccagaccauggacgggauccucaagagcauccugaaggugaagcgcucccugggcauguucgucagcgacacccccggggagcggaaccccuacgagaacauccuguacaagaucugccucuccggcgacggguggccguacaucgcgagccgcaccuccaucgugggccgggccugggagaacaccaccguggaccuggagagcgacggcaagccccagaaggucgggaccgccggcuccaacaagagccugcaguccgccggguuccccacgggccucaccuacagccagcugaugacccugaaggacuccaugaugcagcuggaccccagcgccaagaccuggaucgacaucgaggggcgcccggaggaccccguggagaucgcgcucuaccagcccauguccggcugcuacauccacuucuuccgggagcccacggaccugaagcaguucaagcaggacgccaaguacagccacggcaucgacgucaccgaccuguucuccgcccagccggggcucaccagcgccgugaucgaggcccugccccgcaacauggugcugaccugccagggcagcgacgacaucaagaagcuccuggacucccaggggcggcgcgacaucaagcugaucgacaucagccucaacaaggcggacucccgccgguucgagaacgccgucugggaccagugcaaggaccugugccacaugcacacgggcgugguggucgagaagaagaagcgcgggggcaaggaggagaucacgccccacugcgcccugauggacugcaucauguucgacgccgccgugagcggcgggcucaacauccccauccugcgggcggugcugccgcgcgacauggucuuccggaccuccagccccaagguggugcucuga

SEQ ID NO: 20745 - RNA, 1764 nt, Artificial Sequence
  derived and/or modified CDS sequence (opt1) from LASV(GA391;Clade III)__AAA46284__SP-IgE_NP(2-570)
auggacuggaccuggauccuguuccucguggccgccgcgacccgcguccacagcagcgccuccaaggaggugcgcagcugccuguggacccagucccuccggcgcgagcugagcggcuacugcuccaacaucaagcugcaggucgugaaggacgcccaggcgcuccugcacgggcuggacuucagcgagguguccaacguccagcggcucaugcgcaagcagaagcgggacgacggcgaccugaagcgccugcgggaccucaaccaggccgugaacaaccugguggagcugaaguccacccagcagaaguccguccuccgcguggggacgcugagcuccgacgaccugcucauccuggccgccgaccuggagaagcucaagagcaaggugacccggaccgagcgcccccuguccagcggcgucuacauggggaaccuguccagccagcagcucgaccagcggcgcgcccugcugaacaugaucggcaugaccggcguguccgggggcgggaagggcgcgagcaacgggaucgugcgggucugggacgugaagaacgccgagcuccugaacaaccaguucggcacgaugccgucccugacccucgccugccugaccaagcagggccagguggaccugaacgacgccguccaggcgcucaccgaccuggggcugaucuacacggccaaguaccccaacagcagcgaccucgaccgccugucccagagccaccccauccugaacaugaucgacaccaagaaguccagccucaacaucuccggcuacaacuucagccugggggccgccgugaaggccggcgcgugcaugcuggacggcgggaacaugcucgagaccaucaaggugagcccccagaccauggacggcauccucaagagcauccugaaggucaagaagucccuggggauguucgugagcgacacgccgggcgagcggaaccccuacgagaacauccuguacaagaucugccuguccggggacggcuggagcuacaucgccucccgcaccagcaucgugggccgggccugggagaacaccgucguggaccucgagcaggacaacaagccccagaagaucgggaacggcggguccaacaagagccugcaguccgccggcuucgccgcggggcugaucuacagccagcucaugacccugaaggacuucaagugcuucaaccugauccccaacgccaagacguggauggacaucgagggccgcccggaggaccccguggagaucgcccuguaccagcccuccagcggcugcuacguccacuucuuccgggagcccaccgaccucaagcaguucaagcaggacgccaaguacagccacgggcgcgacgugaccgaccuguucgccgcgcagccgggccugaccuccgccgucaucgaggcccucccccggaacauggugaucacgugccaggggagcgaggacauccgcaagcugcuggagucccagggccgccgggacaucaagcucaucgacaucacccugagcaaggccgacucccgcaaguucgagaacgccgugugggaccaguucaaggaccugugccacaugcacaccggggucgugguggagaagaagaagcggggcggcaaggaggagaucacgccccacugcgcgcucauggacugcaucauguucgacgccgccgucagcgggggccuggacgccaaggugcugcgcgugguccucccccgggacaugguguuccgcaccuccaccccgaaggugguccuguga

SEQ ID NO: 20746 - RNA, 1761 nt, Artificial Sequence
  derived and/or modified CDS sequence (opt1) from LASV(Nig08-A19;Clade III)__ADU56619__SP-IgE_NP(2-569)
auggacuggaccuggauccuguuccucguggccgccgcgacccgcguccacagcagcgccuccaaggaggugaaguccuuccuguggacccagucccuccgccgggagcugagcggcuacugcuccaacaucaagcugcaggucgugaaggacgcccaggcgcuccugcacgggcuggacuucagcgagguguccaacguccagcgccucaugcggaagcagaagcgcgacgacggcgaccugaagcggcugcgcgaccucaaccaggccgugaacaaccugguggagcucaagagcacccagcagaaguccguccugcggguggggacccugagcuccgacgaccugcucgugcuggccgccgaccuggagaagcucaagagcaaggucgugcgcaccgagcggccccuguccagcggcaucuacauggggaaccuguccagccagcagcucgaccagcgcaaggcccugcugaacaugaucggcaugaccggcgggaacggcgggcggaacaccacguccgacggcaucgugcgcgucugggacgugaagaacgcggagcuccugaacaaccaguucgggaccaugccgagccugacccucgccugccugaccaagcagggccagguggaccugaacgacgccguccaggcccucacggaccugggccugaucuacaccgcgaaguaccccaacuccagcgaccucgaccggcuggcccagagccaccccauccugaacaugaucgacaccaagaaguccagccucaacaucuccggguacaacuucagccugggcgccgccgugaaggccggggcgugcaugcuggacggcggcaacaugcucgagaccaucaaggugagcccccagacgauggacgggauccucaagagcauccugaaggucaagcgcucccugggcauguucaucagcgacaccccgggggagcggaaccccuacgagaacauccuguacaagaucugccuguccggcgacggguggcccuacaucgccagccgcaccuccaucgugggccgggccugggagaacaccguggucgaccucgagagcgacaacaagccccagaagacgggcaacgggggcuccaacaagagccugcaguccgccggguucgccgcgggccugaccuacagccagcucaugacccugaaggacuccaugcugcagcuggacccgaacgccaagaccuggauggacaucgaggggcgccccgaggaccccguggagaucgcccucuaccagcccagcuccggcugcuacauccacuucuuccgggagccgacggaccugaagcaguucaagcaggacgccaaguacagccacggcaucgacgugaccgaccuguucgccgcgcagcccgggcucaccagcgccgucaucgaggcccugccccgcaacauggugaucacgugccagggcuccgaggacauccggaagcugcucgagagccaggggcgccgcgacaucaagcugaucgacaucucccugagcaaggucgacucccggaaguucgagaacgccgugugggaccaguucaaggaccucugccacaugcacaccggcaucguggucgagaagaagaagcgcgggggcaaggaggagaucacgccccacugcgcccugauggacugcaucauguucgacgcggccgugagcggcgggguggacgccaagguccugcgggccgugcucccgcgcgacaugguguuccggaccuccacccccaaggucgugcuguga

SEQ ID NO: 20747 - RNA, 1761 nt, Artificial Sequence
  derived and/or modified CDS sequence (opt1) from LASV(G1180-SLE-2010;Clade IV)__AIT17169__SP-IgE_NP(2-569)
auggacuggaccuggauccuguuccucguggccgccgcgacccgcguccacagcagcgccuccaaggagaucaagagcuuccuguggacccagucccuccgccgggagcugagcggcuacugcuccaacaucaagcuccagguggucaaggacgcccaggcgcugcugcacgggcuggacuucagcgagguguccaacgugcagcgccucaugcggaaggagcgccgggacgacaacgaccugaagcgccugcgggaccucaaccaggccgucaacaaccugguggagcucaagagcacccagcagaaguccauccugcgcgugggcacccugaccagcgacgaccugcucauccuggccgccgaccuggagaagcucaaguccaaggucauccggaccgagcgcccccugagcgccgggguguacaugggcaaccuguccagccagcagcucgaccagcggcgcgcgcugcuguccaugaucgggaugagcuccggcaaccagcgggcccaggccggccgcgacggggugguccgggugugggacgugaagaacgucgagcuccugaacaaccaguucggcaccaugccgagccugacgcucgccugccugaccaagcagggccagguggaccugaacgacgcggugcaggcccucaccgaccuggggcugaucuacaccgccaaguaccccaacacguccgaccucgaccgccugacccagagccaccccauccugaacaugaucgacaccaagaaguccagccucaacaucagcggguacaacuucucccugggcgccgccgucaaggcgggcgccugcaugcuggacgggggcaacaugcucgagaccaucaaggugagcccccagacgauggacgggauccugaaguccauccugaaggugaagaaggcccucggcauguucaucagcgacaccccgggcgagcggaaccccuacgagaacauccuguacaagaucugccuguccggggacggcuggcccuacaucgccagccgcaccuccaucaccgggcgggccugggagaacacggucguggaccucgagagcgacggcaagccccagaaggcgggguccaacaacagcaacaagucccugcagagcgugggcuucaccgccggccugaccuacucccagcucaugacccugaaggacgccaugcugcagcuggacccgaacgccaagacguggauggacaucgaggggcgccccgaggaccccgucgagaucgcccucuaccagcccagcuccggcugcuacauccacuucuuccgggagccgaccgaccugaagcaguucaagcaggacgcgaaguacagccacgggaucgacgugaccgaccuguucgccgcccagcccggccucaccuccgccgugaucgacgcccugccccgcaacauggucaucacgugccaggggagcgacgacauccgcaagcugcucgagagccagggccggaaggacaucaagcugaucgacaucgcgcuguccaagaccgacagccgcaaguacgagaacgccgugugggaccaguacaaggaccucugccacaugcacaccggcgucgugguggagaagaagaagcgcgggggcaaggaggagaucacgccccacugcgcccugauggacugcaucauguucgacgccgcggucuccgggggccugaacaccagcgugcuccgggccgugcugccgcgggacauggucuuccgcaccuccacgccccggguggugcuguga

SEQ ID NO: 20748 - RNA, 1761 nt, Artificial Sequence
  derived and/or modified CDS sequence (opt1) from LASV(G1442-SLE-2011;Clade IV)__AIT17181__SP-IgE_NP(2-569)
auggacuggaccuggauccuguuccucguggccgccgcgacccgcguccacagcagcgccuccaaggaggugaaguccuuccuguggacccagagccuccgccgggagcugagcggcuacugcuccaacaucaagcugcaggucgugaaggacgcccaggcgcuccugcacgggcuggacuucagcgagguguccaacguccagcgccucaugcggaagcagcgccgggacgacaacgaccugaagcgccugcgggaccucaaccaggccgugaacaaccugguggagcucaagagcacccagcagaaguccguccugcgcgugggcacccugaccagcgacgaccugcucgugcuggccgccgaccuggagaagcucaaguccaaggucauccggaccgagcgcccccugagcgccgggguguacaugggcaaccuguccagccagcagcucgaccagcggcgcgcgcugcugaacaugaucgggauguccggcggcauccaggggacccggacgggccgcgacggggugguccgggugugggacgugaagaacgccgaccuccugaacaaccaguucggcaccaugccgagccugacccucgccugccugaccaagcaggggcaggucgaccugaacgacguggugcaggcccucacggaccugggccugaucuacaccgcgaaguaccccaacgccuccgaccucgaccgccugacccagagccaccccauccugaacaugaucgacaccaagaaguccagccucaacaucagcggcuacaacuucucccugggggccgccgucaaggccggcgcgugcaugcuggacgggggcaacaugcucgagacgaucaaggugagcccccagaccauggacggcauccugaaguccauccugaaggugaagaagacccucgggauguucaucagcgacaccccgggcgagcggaaccccuacgagaacauccuguacaagaucugccuguccggggacggcuggcccuacaucgccagccgcacguccaucaccgggcgggccugggagaacaccgucguggaccucgagagcgacggcaagccccagaaggccggcuccaacaacagcaacaagucccugcagagcgccggguucgcggccggccugaccuacucccagcucaugacgcugaaggacgccaugcugcagcuggacccgaacgccaagaccuggauggacaucgaggggcgccccgaggaccccguggagaucgcccucuaccagcccagcuccggcugcuacauccacuucuuccgggagccgaccgaccugaagcaguucaagcaggacgcgaaguacagccacgggaucgacgucaccgaccuguucgccgcccagcccggccucacguccgccgugaucgaggcccugccccgcaacauggucaucacgugccagggcagcgacgacaucaagaagcugcucgagucccaggggcgcaaggacaucaagcugaucgacaucgcgcugagcaagaccgacagccggaaguacgagaacgccgugugggaccaguacaaggaccucugccacaugcacaccggcguggucguggagaagaagaagcgcgggggcaaggaggagaucaccccgcacugcgcccugauggacugcaucauguucgacgccgcgguguccgggggccugaacacccucguccugcgggccgugcugccccgcgacaugguguuccggaccagcacgccccgcgucgugcucuga

SEQ ID NO: 20749 - RNA, 1761 nt, Artificial Sequence
  derived and/or modified CDS sequence (opt1) from LASV(G3010-SLE-2013;Clade IV)__AIT17345__SP-IgE_NP(2-569)
auggacuggaccuggauccuguuccucguggccgccgcgacccgcguccacagcagcgccuccaaggagaucaagagcuuccuguggacccagucccuccgccgggagcugagcggcuacugcuccaacaucaagcuccagguggucaaggacgcccaggcgcugcugcacgggcuggacuucagcgagguguccaacgugcagcgccucaugcggaaggagcgccgggacgacaacgaccugaagcgccugcgggaccucaaccaggccgucaacaaccugguggagcucaagagcacccagcagaaguccauccugcgcgugggcacccugaccagcgacgaccugcucauccuggccgccgaccuggagaagcucaaguccaaggucacccggaccgagcgcccccugagcgccgggguguacaugggcaaccuguccagccagcagcucgaccagcggcgcgcgcugcuguccaugaucgggaugagcuccggcgugcagggcgcccgggccgggcgcgacggcgucgugcgggugugggacgucaagaacgccgagcuccugaacaaccaguucgggacgaugccgagccugacccucgcgugccugaccaagcagggccagguggaccugaacgacgugguccaggcccucaccgaccuggggcugaucuacacggccaaguaccccaacaccuccgaccucgaccgccugacccagagccaccccauccugaacaugaucgacaccaagaaguccagccucaacaucagcggcuacaacuucucccugggcgccgccgugaaggcgggggccugcaugcuggacggcgggaacaugcucgagacgaucaaggugagcccccagaccauggacggcauccugaaguccauccugaaggucaagaaggcccucggcauguucaucagcgagaccccgggggagcggaaccccuacgagaacauccuguacaagaucugccuguccggcgacggguggcccuacaucgccagccgcaccuccaucacgggccgggccugggagaacaccgugguggaccucgagagcgacgggaagccccagaaggcgggcuccaacaacagcaacaagucccugcagagcgccggcuucaccgccgggcugaccuacucccagcucaugacgcugaaggacgccaugcugcagcuggacccgaacgccaagaccuggauggacaucgagggccgccccgaggaccccgucgagguggcgcucuaccagcccagcuccgggugcuacauccacuucuuccgggagccgaccgaccugaagcaguucaagcaggacgccaaguacagccacggcaucgacgugaccgaccuguucgccgcccagcccgggcucacguccgccgucaucgacgcgcugccccgcaacauggugaucacgugccagggcagcgacgacaucaagaagcugcucgagagccagggccgcaaggacaucaagcugaucgacaucgcccuguccaagaccgacagccggaaguacgagaacgccgucugggaccaguacaaggaccucugccacaugcacaccggggugguggucgagaagaagaagcgcggcgggaaggaggagaucaccccgcacugcgcccugauggacugcaucauguucgacgcggccguguccggcgggcugaacaccagcgugcuccgggccguccugccccgcgacaugguguuccggaccuccacgccccgcgugguccuguga

SEQ ID NO: 20750 - RNA, 1761 nt, Artificial Sequence
  derived and/or modified CDS sequence (opt1) from LASV(G502-SLE-2009;Clade IV)__AIT17127__SP-IgE_NP(2-569)
auggacuggaccuggauccuguuccucguggccgccgcgacccgcguccacagcagcgccuccaaggagaucaagagcuuccuguggacccagucccuccgccgggagcugagcggcuacugcuccaacaucaagcuccagguggucaaggacgcccaggcgcugcugcacgggcuggacuucagcgagguguccaacgugcagcgccucaugcggaaggagcgccgggacgacaacgaccugaagcgccugcgggaccucaaccaggccgucaacaaccugguggagcucaagagcacccagcagaaguccauccugcgcgugggcacccugaccagcgacgaccugcucauccuggccgccgaccuggagaagcucaaguccaaggucauccggaccgagcgcccccugagcgccgggguguacaugggcaaccuguccagccagcagcucgaccagcggcgcgcgcugcuguccaugaucgggaugagcggcggcaaccagggggugcgggccggcaaggacggggucgugcgcgugugggacgucaagaacgccgagcuccugaacaaccaguucggcaccaugccgucccugacgcucgccugccugaccaagcagggccagguggaccugaacgacgcggugcaggcccucaccgaccuggggcugaucuacaccgccaaguaccccaacacgagcgaccucgaccggcugacccagucccaccccauccugaacaugaucgacaccaagaaguccagccucaacaucuccggcuacaacuucagccugggggccgccgucaaggcgggcgccugcaugcuggacgggggcaacaugcucgagaccaucaaggugagcccccagacgauggacggcauccucaagagcauccugaaggugaagaaggcccuggggauguucaucuccgacaccccgggcgagcgcaaccccuacgagaacauccuguacaagaucugccugagcggggacggcuggcccuacaucgccucccggaccagcaucaccgggcgcgccugggagaacacggucguggaccucgaguccgacggcaagccccagaaggcgggcagcaacaacuccaacaagagccugcaguccgccggguucaccgccggccugaccuacagccagcucaugacccugaaggacgccaugcugcagcuggacccgaacacgaagaccuggauggacaucgaggggcggcccgaggaccccguggagaucgcccucuaccagcccuccagcggcugcuacauccacuucuuccgcgagccgaccgaccugaagcaguucaagcaggacgcgaaguacucccacgggaucgacgucaccgaccuguucgccgcccagcccggccucacgagcgccgugaucgacgcccugccccggaacauggugaucacgugccagggcuccgacgacauccgcaagcugcucgagagccaggggcgcaaggacaucaagcugaucgacaucgcgcugaacaagaccgacagccggaaguacgagaacgccgucugggaccaguacaaggaccucugccacaugcacaccggcguggucguggagaagaagaagcgcgggggcaaggaggagaucaccccgcacugcgcccugauggacugcaucauguucgacgccgcgguguccgggggccugaacaccagcguccuccgggccgugcugccccgcgacaugguguuccggaccuccacgccccgcgucgugcuguga

SEQ ID NO: 20751 - RNA, 1761 nt, Artificial Sequence
  derived and/or modified CDS sequence (opt1) from LASV(G733-SLE-2010;Clade IV)__AIT17155__SP-IgE_NP(2-569)
auggacuggaccuggauccuguuccucguggccgccgcgacccgcguccacagcagcgccuccaaggagaucaagagcuuccuguggacccagucccuccgccgggagcugagcggcuacugcuccaacaucaagcuccagguggucaaggacgcccaggcgcugcugcacgggcuggacuucagcgagguguccaacgugcagcgccucaugcggaaggagcgccgggacgacaacgaccugaagcgccugcgggaccucaaccaggccgucaacaaccugguggagcucaagagcacccagcagaaguccgugcugcgcgucggcacccugaccagcgacgagcugcucgugcuggccgccgaccuggagaagcucaaguccaaggugauccggaccgagcgcccccugagcgccggggucuacaugggcaaccuguccagccagcagcucgaccagcggcgcgcgcugcuguccaugaucgggaugagcggcggcaaccagggggcccggaccggccgcgacgggguggugcgggucugggacgugaagaacgccgagcuccugaacaaccaguucggcaccaugccgucccugacccucgccugccugaccaagcagggccagguggaccugaacgacgcgguccaggcccucaccgaccuggggcugaucuacacggccaaguaccccaacaccagcgaccucgaccgccugacccagucccaccccauccugaacaugaucgacaccaagaaguccagccucaacaucuccggcuacaacuucagccugggggccgccgugaaggcgggcgccugcaugcuggacgggggcaacaugcucgagacgaucaaggugagcccccagaccauggacggcauccucaagagcauccugaaggucaagaaggcccuggggauguucaucuccgacaccccgggcgagcggaaccccuacgagaacauccuguacaagaucugccugagcggggacggcuggcccuacaucgccucccgcaccagcaucacggggcgggccugggagaacaccgugguggaccucgaguccgacggcaagccccagaaggcgggcagcaacaacuccaacaagagccugcaguccgccggguucaccgccggccugaccuacagccagcucaugacgcugaaggacgccaugcugcagcuggacccgaacgccaagaccuggauggacaucgaggggcgccccgaggaccccgucgagaucgcgcucuaccagcccuccagcggcugcuacauccacuucuuccgggagccgaccgaccugaagcaguucaagcaggacgccaaguacucccacgggaucgacgugaccgaccuguucgccgcccagcccggccucacgagcgccgugaucgacgcgcugccccgcaacauggucaucacgugccagggcuccgacgacauccgcaagcugcucgagagccaggggcggaaggacaucaagcugaucgacaucgcccugagcaagaucgacucccgcaaguacgagaacgccgugugggaccaguacaaggaccucugccacaugcacaccggcgucgugguggagaagaagaagcgcgggggcaaggaggagaucacgccccacugcgcccugauggacugcaucauguucgacgcggccgucagcgggggccugaacucccucgugcugcgggccgugcugccgcgggacauggucuuccgcaccagcacgccccggguggugcucuga

SEQ ID NO: 20752 - RNA, 1761 nt, Artificial Sequence
  derived and/or modified CDS sequence (opt1) from MOPV/LASV reassortant(IGS-1;Clade IV)__AFY05578__SP-IgE_NP(2-569)
auggacuggaccuggauccuguuccucguggccgccgcgacccgcguccacagcagcgccuccaaggagaucaagagcuuccuguggacccagucccuccgccgggagcugagcggcuacugcuccaacaucaagcuccagguggucaaggacgcccaggcgcugcugcacgggcuggacuucagcgagguguccaacgugcagcgccucaugcggaaggagcgccgggacgacaacgaccugaagcgccugcgggaccucaaccaggccgucaacaaccugguggagcucaagagcacccagcagaaguccauccugcgcgugggcacccugaccagcgacgaccugcucauccuggccgccgaccuggagaagcuccgguccaaggucauccgcaccgagcggccccugagcgccgggguguacaugggcaaccuguccagccagcagcucgaccagcgccgggcgcugcugaacaugaucgggauguccggcggcaaccagggggcccgcgccggccgggacggggugguccgcgugugggacgugaagaacgccgagcuccugagcaaccaguucggcaccaugccgucccugacgcucgcgugccugaccaagcaggggcaggucgaccugaacgacgccgugcaggcccucaccgaccugggccugaucuacaccgccaaguaccccaacacgagcgaccucgaccggcugacccagucccaccccauccugaacaugaucgacaccaagaaguccagccucaacaucuccggcuacaacuucagccugggggccgcggugaaggccggcgccugcaugcuggacgggggcaacaugcucgagaccaucaaggucagcccccagacgauggacggcauccucaagagcauccugaaggugaagaaggcccuggggauguucaucuccgacaccccgggcgagcgcaaccccuacgagaacauccuguacaagaucugccugagcggggacggcuggcccuacaucgccucccggaccagcaucaccgggcgcgcgugggagaacacgguggucgaccucgaguccgacggcaagccccagaaggccgacagcaacaacuccagcaagucccugcagagcgccggcuucaccgccgggcugaccuacucccagcucaugacccugaaggacgccaugcugcagcuggacccgaacgcgaagacguggauggacaucgagggccggcccgaggaccccguggagaucgcccucuaccagcccagcuccgggugcuacauccacuucuuccgcgagccgaccgaccugaagcaguucaagcaggacgccaaguacagccacggcaucgacgugaccgaccuguucgccacccagcccgggcucacguccgccgucaucgacgcgcugccccgcaacauggugaucacgugccagggcagcgacgacauccggaagcugcucgagagccagggccgcaaggacaucaagcugaucgacaucgaccuguccaagaccgacagccggaaguacgagaacgccgugugggaccaguacaaggaccucugccacaugcacaccggggucguggucgagaagaagaagcgcggcgggaaggaggagaucaccccgcacugcgcccugauggacugcaucauguucgacgccgcgguguccggcgggcugaacaccagcgugcuccgggccguccugccccgcgacaugguguuccggaccuccacgccccgcgugguccuguga

SEQ ID NO: 20753 - RNA, 1761 nt, Artificial Sequence
  derived and/or modified CDS sequence (opt1) from LASV(LM765-SLE-2012;Clade IV)__AIT17815__SP-IgE_NP(2-569)
auggacuggaccuggauccuguuccucguggccgccgcgacccgcguccacagcagcgccuccaaggagaucaagagcuuccuguggacccagucccuccgccgggagcugagcggcuacugcuccaacaucaagcuccagguggucaaggacgcccaggcgcugcugcacgggcuggacuucagcgagguguccaacgugcagcgccucaugcggaaggagcgccgggacgacaacgaccugaagcgccugcgggaccucaaccaggccgucaacaaccugguggagcucaagagcacccagcagaaguccauccugcgcgugggcacccugaccagcgacgaccugcucauccuggccgccgaccuggagaagcucaaguccaaggucacccggaccgagcgcccccugagcgccgggguguacaugggcaaccuguccagccagcagcucgaccagcggcgcgcgcugcuggacaugaucgggauguccggcagcaaccagggcgcccgggccgggcgcgacggcgugguccgggugugggacgugaagaacgccgagcuccugaacaaccaguucgggacgaugccgucccugacccucgcgugccugaccaagcagggccaggucgaccugaacgacgccgugcaggcccucaccgaccuggggcugaucuacacggccaaguaccccaacaccagcgaccucgaccgccugacccagucccaccccauccugaacaugaucgacaccaagaaguccagccucaacaucuccggcuacaacuucagccugggcgccgcggugaaggccggggccugcaugcuggacggcgggaacaugcucgagacgaucaaggucagcccccagaccauggacggcauccucaagagcauccugaaggugaagaaggcccugggcauguucaucuccgacgccccgggggagcggaaccccuacgagaacauccuguacaagaucugccugagcggcgacggguggcccuacaucgcgucccgcaccagcaucaccggccgggccugggagaacacgguggucgaccucgaguccgacgggaagccccagaaggccggcagcaacggcuccaacaagagccugcaguccgccggguucaccgccggccugaccuacagccagcucaugacccugaaggacgcgaugcugcagcuggacccgaacgccaagacguggauggacaucgaggggcgccccgaggaccccguggagaucgcccucuaccagcccuccagcggcugcuacauccacuucuuccgggagccgaccgaccugaagcaguucaagcaggacgccaaguacucccacgggaucgacgugaccgaccuguucgccgcgcagcccggccucaccagcgccgucaucgacgcccugccccgcaacauggugaucacgugccagggcuccgacgacauccgcaagcuguucgagagccaggggcggaaggacaucaagcucaucgacaucgcccugagcaagaccgacucccgcaaguacgagaacgcggugugggaccaguacaaggaccugugccacaugcacaccggcaucgucguggagaagaagaagcgcgggggcaaggaggagaucacgccccacugcgcccucauggacugcaucauguucgacgccgccgucagcgggggccugaacaccuccgugcugcgggccgugcucccgcgggacauggucuuccgcaccagcacgccccggguggugcuguga

SEQ ID NO: 20754 - RNA, 1761 nt, Artificial Sequence
  derived and/or modified CDS sequence (opt1) from LASV(LM776-SLE-2012;Clade IV)__AIT17825__SP-IgE_NP(2-569)
auggacuggaccuggauccuguuccucguggccgccgcgacccgcguccacagcagcgccuccaaggagaucaagagcuuccuguggacccagucccuccgccgggagcugagcuccuacugcagcaacaucaagcuccagguggucaaggacgcccaggcgcugcugcacggccuggacuucuccgaggugagcaacgugcagcgccucaugcggaaggagcgccgggacgacaacgaccugaagcgccugcgggaccucaaccaggccgucaacaaccugguggagcugaaguccacccagcagaaguccauccuccgcguggggacccugaccuccgacgaccugcucauccuggccgccgaccuggagaagcucaagagcaaggucacccggaccgagcgcccccuguccgccggcguguacauggggaaccugagcucccagcagcucgaccagcggcgcgcgcugcugagcaugaucggcauguccgggagcaaccagggcgcccgggccggccgcgacggggugguccgggugugggacgugaagaacgccgagcuccugaacaaccaguucggcacgaugccgucccugacccucgcgugccugaccaagcaggggcaggucgaccugaacgacgccgugcaggcccucaccgaccugggccugaucuacacggccaaguaccccaacaccagcgaccucgaccgccugacccagagccaccccauccugaacaugaucgacaccaagaaguccagccucaacaucuccggguacaacuucagccugggcgccgcggugaaggccggcgccugcaugcuggacgggggcaacaugcucgagacgaucaaggucagcccccagaccauggacgggauccucaagagcauccugaaggugaagaaggcccugggcauguucaucuccgacaccccgggcgagcggaaccccuacgagaacauccuguacaagaucugccugagcggggacggcuggcccuacaucgccucccgcaccagcaucacggggcgggcgugggagaacaccguggucgaccucgaguccgacggcaagccccagaaggccgggagcaacaacuccaacaagagccugcaguccgccggcuucaccgccggccugaccuacagccagcucaugacgcugaaggacgccaugcugcagcuggacccgaacgcgaagaccuggauggacaucgaggggcgccccgaggaccccguggagguggcccucuaccagcccuccagcggcugcuacauccacuucuuccgggagccgaccgaccugaagcaguucaagcaggacgccaaguacucccacgggaucgacgucaccgaccuguucgccgcccagcccggccucacgagcgcggugaucgacgcccugccccgcaacauggugaucacgugccaggggagcgacgacauccgcaagcugcucgagucccagggccggaaggacaucaagcugaucgacaucgcccugagcaagaccgacucccgcaaguacgagaacgccgucugggaccaguacaaggaccucugccacaugcacaccggcguggucguggagaagaagaagcgcgggggcaaggaggagaucaccccgcacugcgcgcugauggacugcaucauguucgacgccgccgugagcgggggccugaacaccuccguccuccgggccgugcugccccgggacaugguguuccgcaccagcacgccccgggucgugcuguga

SEQ ID NO: 20755 - RNA, 1761 nt, Artificial Sequence
  derived and/or modified CDS sequence (opt1) from LASV(Mad39;Clade IV)__ANH09723__SP-IgE_NP(2-569)
auggacuggaccuggauccuguuccucguggccgccgcgacccgcguccacagcagcgccuccaaggagaucaagagcuuccuguggacccagucccuccgccgggagcugagcggcuacugcuccaacaucaagcuccagguggucaaggacgcccaggcgcugcugcacgggcuggacuucagcgagguguccaacgugcagcgccucaugcggaagcagcgccgggacgacaacgaccugaagcgccugcgggaccucaaccaggccgucaacaaccugguggagcugaaguccacccagcagaaguccgugcuccgcgucggcacgcugaccagcgacgaccugcucacccuggccgccgaccuggagaagcucaaguccaaggugacccggacggagcgcccccugaccgccgggguguacaugggcaaccugagcucccagcagcucgaccagcggcgcgcgcugcugaacaugaucgggaugagcggcggcaaccagggggcccggaccggccgcgacggggucgugcgggugugggacgucaagaacgccgagcuccugaacaaccaguucggcaccaugccgucccugacgcucgccugccugaccaagcagggccagguggaccugaacgacgugguccaggcgcucaccgaccuggggcugaucuacaccgccaaguaccccaacacgagcgaccucgaccgccugacccagucccaccccauccugaacaugaucgacaccaacaagagcucccucaacaucagcggcuacaacuucagccugggggccgccgugaaggccggcgcgugcaugcuggacgggggcaacaugcucgagaccaucaaggugagcccccagacgauggacggcauccucaagagcauccugaaggucaagaagucccuggggauguucaucagcgacaccccgggcgagcggaaccccuacgagaacauccuguacaagaucugccuguccggggacggcuggcccuacaucgccagccgcaccuccaucaccgggcgggccugggagaacacggugguggaccucgagagcggcggcaagccccagaaggccggguccaacaacagcaacaagucccugcagagcgccggcuucgcggccgggcugaccuacucccagcucaugacccugaaggacgccaugcugcagcuggacccgaacgccaagaccuggauggacaucgagggccgccccgaggaccccgucgagaucgcccucuaccagcccaucagcgggugcuacauccacuucuuccgggagccgacggaccugaagcaguucaagcaggacgcgaaguacucccacggcaucgacgugaccgaccuguucgccgcccagcccggccucaccagcgccgugaucgaggcccugccccgcaacauggucaucacgugccagggguccgacgacauccgcaagcuguucgagagccagggccggaaggacaucaagcucaucgacaucgcgcuguccaagaccgacagccgcaaguacgagaacgccgugugggaccaguacaaggaccugugccacaugcacaccggggucgugguggagaagaagaagaagggcgggaaggaggagaucacgccccacugcgcccucauggacugcaucauguucgacgccgcggucagcggcggccugaacacccuggugcuccgggccgugcugccgcgcgacauggucuuccggaccuccacccccaagguggugcuguga

SEQ ID NO: 20756 - RNA, 1761 nt, Artificial Sequence
  derived and/or modified CDS sequence (opt1) from LASV(Z0947-SLE-2011;Clade IV)__AIT17841__SP-IgE_NP(2-569)
auggacuggaccuggauccuguuccucguggccgccgcgacccgcguccacagcagcgccuccaaggagaucaagagcuuccuguggacccagucccuccgccgggagcugagcggcuacugcuccaacaucaagcuccagguggucaaggacgcccaggcgcugcugcacgggcuggacuucagcgagguguccaacgugcagcgccucaugcggaaggagcgccgggacgacaacgaccugaagcgccugcgggaccucaaccaggccgucaacaaccugguggagcucaagagcacccagcagaaguccauccugcgcgugggcacccugaccagcgacgaccugcucauccuggccgccgaccuggagaagcucaaguccaaggucacccggaccgagcgcccccugagcgccgggguguacaugggcaaccuguccagccagcagcucgaccagcggcgcgcgcugcugaacaugaucgggauguccggcagcaaccagggcgcccggacggggcgcgacggcgugguccgggugugggacgugaagaacgccgagcuccugaacaaccaguucgggaccaugccgucccugacccucgccugccugaccaagcagggccaggucgaccugaacgacgcggugcaggcccucacggaccuggggcugaucuacaccgccaaguaccccaacaccagcgaccucgaccgccugacccagucccaccccauccugaacaugaucgacacgaagaaguccagccucaacaucuccggcuacaacuucagccugggcgccgccgugaaggcgggggccugcaugcuggacggcgggaacaugcucgagaccaucaaggucagcccccagaccauggacggcauccucaagagcauccugaaggugaagaaggcccugggcauguucaucuccgacgccccgggggagcggaaccccuacgagaacauccuguacaagaucugccugagcggcgacggguggcccuacaucgccucccgcaccagcaucacgggccgggcgugggagaacaccguggucgaccucgaguccgacgggaagccccagaaggccggcagcaacggcuccaacaagagccugcaguccgccggguucaccgccggccugaccuacagccagcucaugacgcugaaggacgccaugcugcagcuggacccgaacgcgaagaccuggauggacaucgaggggcgccccgaggaccccguggagaucgcccucuaccagcccuccagcggcugcuacauccacuucuuccgggagccgaccgaccugaagcaguucaagcaggacgccaaguacucccacgggaucgacgugaccgaccuguucgccgcccagcccggccucacgagcgcggucaucgacgcccugccccgcaacauggugaucacgugccagggcuccgacgacauccgcaagcuguucgagagccaggggcggaaggacaucaagcucaucgacaucgcccugagcaagaccgacucccgcaaguacgagaacgccgugugggaccaguacaaggaccugugccacaugcacaccggcaucgucguggagaagaagaagcgcgggggcaaggaggagaucaccccgcacugcgcgcucauggacugcaucauguucgacgccgccgucagcgggggccugaacaccuccgugcugcgggccgugcucccccgggacauggucuuccgcaccagcacgccccggguggugcuguga

SEQ ID NO: 20757 - RNA, 1761 nt, Artificial Sequence
  derived and/or modified CDS sequence (opt4) from LASV(Josiah;Clade IV)__NP_694869__SP-IgE_NP(2-569)
auggacuggaccuggauccuguuccugguggccgccgccaccagagugcacagcagcgccagcaaggagaucaagagcuuccuguggacccagagccugagaagagagcugagcggcuacugcagcaacaucaagcugcagguggugaaggacgcccaggcccugcugcacggccuggacuucagcgaggugagcaacgugcagagacugaugagaaaggagagaagagacgacaacgaccugaagagacugagagaccugaaccaggccgugaacaaccugguggagcugaagagcacccagcagaagagcauccugagagugggcacccugaccagcgacgaccugcugauccuggccgccgaccuggagaagcugaagagcaaggugaucagaaccgagagaccccugagcgccggcguguacaugggcaaccugagcagccagcagcuggaccagagaagagcccugcugaacaugaucggcaugagcggcggcaaccagggcgccagagccggcagagacggcguggugagagugugggacgugaagaacgccgagcugcugaacaaccaguucggcaccaugcccagccugacccuggccugccugaccaagcagggccagguggaccugaacgacgccgugcaggcccugaccgaccugggccugaucuacaccgccaaguaccccaacaccagcgaccuggacagacugacccagagccaccccauccugaacaugaucgacaccaagaagagcagccugaacaucagcggcuacaacuucagccugggcgccgccgugaaggccggcgccugcaugcuggacggcggcaacaugcuggagaccaucaaggugagcccccagaccauggacggcauccugaagagcauccugaaggugaagaaggcccugggcauguucaucagcgacacccccggcgagagaaaccccuacgagaacauccuguacaagaucugccugagcggcgacggcuggcccuacaucgccagcagaaccagcaucaccggcagagccugggagaacaccgugguggaccuggagagcgacggcaagccccagaaggccgacagcaacaacagcagcaagagccugcagagcgccggcuucaccgccggccugaccuacagccagcugaugacccugaaggacgccaugcugcagcuggaccccaacgccaagaccuggauggacaucgagggcagacccgaggaccccguggagaucgcccuguaccagcccagcagcggcugcuacauccacuucuucagagagcccaccgaccugaagcaguucaagcaggacgccaaguacagccacggcaucgacgugaccgaccuguucgccacccagcccggccugaccagcgccgugaucgacgcccugcccagaaacauggugaucaccugccagggcagcgacgacaucagaaagcugcuggagagccagggcagaaaggacaucaagcugaucgacaucgcccugagcaagaccgacagcagaaaguacgagaacgccgugugggaccaguacaaggaccugugccacaugcacaccggcguggugguggagaagaagaagagaggcggcaaggaggagaucaccccccacugcgcccugauggacugcaucauguucgacgccgccgugagcggcggccugaacaccagcgugcugagagccgugcugcccagagacaugguguucagaaccagcacccccagaguggugcuguga

SEQ ID NO: 20758 - RNA, 1761 nt, Artificial Sequence
  derived and/or modified CDS sequence (opt4) from LASV(LP;Clade I)__AAF86702__SP-IgE_NP(2-569)
auggacuggaccuggauccuguuccugguggccgccgccaccagagugcacagcagcaacagcaaggagaucaagagcuuccuguggacccagagccugagaagagagcugagcggcuacugcagcaacaucaagcugcagguggugaaggacgcccaggcccugcugcacggccuggacuucagcgaggugagcaacgugcagagacugaugagaaagcagaagagagacgacgccgaccugaagagacugagagaccugaaccaggccgugaacaaccugguggagcugaagagcacccagcagaagaacgugcugagagugggcacccugagcagcgacgaccugaucacccuggccgccgaccuggagaagcugaagagcaaggugaucagaaccgagagaccccugagcagcggcguguacaugggcaaccugagcagccagcagcuggaccagagaagagcccugcugagcaugaucggcaugagcggcggcccccagggcaacagaaccggcggcgacggcguggugagagugugggacgugaagaacgccgagcugcugaacaaccaguucggcaccaugcccagccugacccuggccugccugaccaagcagggccagguggaccugaacgacgccgugcaggcccugaccgaccugggccugaucuacaccgccaaguaccccaacagcagcgaccuggacaugcugacccagagccaccccauccugggcaugguggacaccaagaagagcagccugaacaucagcggcuacaacuucagccugggcgccgccgugaaggccggcgccugcaugcuggacggcggcaacaugcuggagaccaucaaggugagcccccagaccauggacggcauccugaagagcauccugaaggugaagagaagccugggcauguucaucagcgacacccccggcgagagaaaccccuacgagaacauccuguacaagaucugccugagcggcgagggcuggcccuacaucgccagcagaaccagcaucaccggcagagccugggagaacacccugguggaccuggagagcgacaacaagccccccaagcugaacagcgccggcagcaacaagagccugcaggccgccggccugaacgccggccugaccuacagccagcugaugacccugaaggacugcaugcugcagcuggaccccagcagcaagaccuggaucgacaucgagggcagacccgaggaccccguggagaucgcccuguuccagcccagcagcggcugcuacauccacuucuucagagagcccaccgaccugaagcaguucaagcaggacgccaaguacagccacggcaucgacgugaccgaccuguucagcacccagcccggccugaccagcgccgugaucgaggcccugcccagaaacauggugcugaccugccagggcagcgacgacaucaagaagcugcuggagagccagggcagaagagacaucaagcugaucgacaucagccugagcaaggccgacagcagaaaguucgagaacgccgugugggaccaguacaaggaccugugccacaugcacaccggcguggugguggagaagaagaagagaggcggcaaggaggagaucaccccccacugcgcccugcuggacugcaucauguucgacgccgccaccaccggcagccugaacaucaccacccugagagccgugcugcccagagacaugguguucagaaccagcacccccaagguggugcuguga

SEQ ID NO: 20759 - RNA, 1761 nt, Artificial Sequence
  derived and/or modified CDS sequence (opt4) from LASV(803213;Clade II)__AAF86704__SP-IgE_NP(2-569)
auggacuggaccuggauccuguuccugguggccgccgccaccagagugcacagcagcgccagcaaggaggugaagagcuuccuguggacccagagccugagaagagagcugagcggcuacugcagcaacaucaagcugcagguggugaaggacgcccaggcccugcugcacggccuggacuucagcgaggugaacaacgugcagagacugaugagaaagcagaagagagacgacggcgaccugaagagacugagagaccugaaccaggccgugaacaaccugguggagcugaagagcacccagcagaagagcauccugagagugggcacccugaccagcgacgaccugcugacccuggccgccgaccuggagaagcugaagagcaaggugaucagaaccgagagaccccugagcagcggcguguacaugggcaaccugagcacccagcagcuggagcagagaagagcccugcugaacaugaucggcauggugggcggcgcccagggcacccagcccggcagagacggcguggugagagugugggacgugaagaaccccgaccugcugaacaaccaguucggcaccaugcccagccugacccuggccugccugaccaagcagggccagguggaccugaacgacgccgugcuggcccugaccgaccugggccugaucuacaccgccaaguaccccaacagcagcgaccuggacagacugagccagagccaccccauccugaacaugguggacaccaagaagagcagccugaacaucagcggcuacaacuucagccugggcgccgccgugaaggccggcgccugcaugcuggacggcggcaacaugcuggagaccaucaaggugaccccccagaccauggacggcauccugaagagcauccugaaggugaagagaagccugggcauguucgugagcgacacccccggcgagagaaaccccuacgagaacauccuguacaagaucugccugagcggcgacggcuggcccuacaucgccagcagaaccagcaucgugggcagagccugggagaacaccaccguggaccuggagagcgacggcaagccccagaaggugggcaccgccggcagcaacaagagccugcagagcgccggcuuccccaccggccugaccuacagccagcugaugacccugaaggacagcaugaugcagcuggaccccagcgccaagaccuggaucgacaucgagggcagacccgaggaccccguggagaucgcccuguaccagcccaugagcggcugcuacauccacuucuucagagagcccaccgaccugaagcaguucaagcaggacgccaaguacagccacggcaucgacguggccgaccuguuccccgcccagcccggccugaccagcgccgugaucgaggcccugcccagaaacauggugcugaccugccagggcagcgacgacaucaagaagcugcuggacagccagggcagaagagacaucaagcugaucgacaucagccugagcaagguggacagcagaaaguucgagaacgccgugugggaccagugcaaggaccugugccacaugcacaccggcguggugguggagaagaagaagagaggcggcaaggaggagaucaccccccacugcgcccugauggacugcaucauguucgacgccgccgugagcggcggccugaacauccccgugcugagagccgugcugcccagagacaugguguucagaaccagcagccccaagguggugcuguga

SEQ ID NO: 20760 - RNA, 1764 nt, Artificial Sequence
  derived and/or modified CDS sequence (opt4) from LASV(GA391;Clade III)__CAA36646__SP-IgE_NP(2-570)
auggacuggaccuggauccuguuccugguggccgccgccaccagagugcacagcagcgccagcaaggaggugagaagcuuccuguggacccagagccugagaagagagcugagcggcuacugcagcaacaucaagcugcagguggugaaggacgcccaggcccugcugcacggccuggacuucagcgaggugagcaacgugcagagacugaugagaaagcagaagagagacgacggcgaccugaagagacugagagaccugaaccaggccgugaacaaccugguggagcugaagagcacccagcagaagagcgugcugagagugggcacccugagcagcgacgaccugcugauccuggccgccgaccuggagaagcugaagagcaaggugaccagaaccgagagaccccugagcagcggcguguacaugggcaaccugagcagccagcagcuggaccagagaagagcccugcugaacaugaucggcaugaccggcgugagcggcggcggcaagggcgccagcgacggcaucgugagagugugggacgugaagaacgccgagcugcugaacaaccaguucggcaccaugcccagccugacccuggccugccugaccaagcagggccagguggaccugaacgacgccgugcaggcccugaccgaccugggccugaucuacaccgccaaguaccccaacagcagcgaccuggacagacugagccagagccaccccauccugaacaugaucgacaccaagaagagcagccugaacaucagcggcuacaacuucagccugggcgccgccgugaaggccggcgccugcaugcuggacggcggcaacaugcuggagaccaucaaggugagcccccagaccauggacggcauccugaagagcauccugaaggugaagaagagccugggcauguucgugagcgacacccccggcgagagaaaccccuacgagaacauccuguacaagaucugccugagcggcgacggcuggcccuacaucgccagcagaaccagcaucgugggcagagccugggagaacaccgugguggaccuggagcaggacaacaagccccagaagaucggcaacggcggcagcaacaagagccugcagagcgccggcuucgccgccggccugaccuacagccagcugaugacccugaaggacuucaagugcuucaaccugauccccaacgccaagaccuggauggacaucgagggcagacccgaggaccccguggagaucgcccuguaccagcccagcagcggcugcuacgugcacuucuucagagagcccaccgaccugaagcaguucaagcaggacgccaaguacagccacggcaucgacgugaccgaccuguucgccgcccagcccggccugaccagcgccgugaucgaggcccugcccagaaacauggugaucaccugccagggcagcgaggacaucagaaagcugcuggagagccagggcagaagagacaucaagcugaucgacaucacccugagcaaggccgacagcagaaaguucgagaacgccgugugggaccaguucaaggaccugugccacaugcacaccggcguggugguggagaagaagaagagaggcggcaaggaggagaucaccccccacugcgcccugauggacugcaucauguucgacgccgccgugagcggcggccuggacgccaaggugcugagaguggugcugcccagagacaugguguucagaaccagcacccccaagguggugcuguga

SEQ ID NO: 20761 - RNA, 1761 nt, Artificial Sequence
  derived and/or modified CDS sequence (opt4) from LASV(AV;Clade V)__CCA30315__SP-IgE_NP(2-569)
auggacuggaccuggauccuguuccugguggccgccgccaccagagugcacagcagcgccagcaaggaggugaagagcuuccuguggacccagagccugagaagagagcugagcggcuacugcagcaacaucaagcugcagguggugaaggacgcccaggcccugcugcacggccuggacuucagcgaggugagcaacgugcagagacugaugagaaagcagagaagagacgacagcgaccugaagagacugagagaccugaaccaggccgugaacaaccugguggagcugaagagcacccagcagaagagcgugcugagagugggcacccugagcagcgacgaccugcugacccuggccgccgaccuggagaagcugaagagcaaggugaccagaaccgagagaccccugagcagcggcguguacaugggcaaccugagcagccagcagcuggaccagagaagagcccugcugaaccugaucggcaugaccaacggcagccagggcagccaggccggcagagacggcguggugagagugugggacgugaagaacgccgagcugcugaacaaccaguucggcaccaugcccagccugacccuggccugccugaccaagcagggccagguggaccugaacgacguggugcaggcccugaccgaccugggccugaucuacaccgccaaguaccccaacaccagcgaccuggacagacugacccagagccaccccauccugaacaugaucgacaccaagaagagcagccugaacaucagcggcuacaacuucagccugggcgccgccgugaaggccggcgccugcaugcuggacggcggcaacaugcuggagaccaucaaggugagcccccagagcauggacggcauccugaagagcauccugaaggugaagagagcccugggcauguucgugagcgacacccccggcgagagaaaccccuacgagaacauccuguacaagaucugccugagcggcgacggcuggcccuacaucgccagcagaaccagcaucgugggcagagccugggagaacaccgugguggaccuggagaccgacggcaagccccagaagaucggcagcggcaacagcaacaagagccugcagagcgccggcuucagcgccggccugaccuacagccagcugaugacccugaaggacgccaugcugcagcuggaccccaacgccaagaccuggauggacaucgagggcagacccgaggaccccguggagguggcccuguaccagcccaucagcggcugcuacauccacuucuucagagagcccaccgaccugaagcaguucaagcaggacgccaaguacagccacggcaucgacaucgccgaccuguucgccgcccagcccggccugaccagcgccgugaucgaggcccugcccagaaacauggugaucaccugccagggcagcgaggacaucaagaagcugcuggagagccagggcagaaaggacaucaagcugaucgacaucgcccugagcaagaucgacagcagaaaguucgagaacgccgugugggaccaguacaaggaccugugccacaugcacaccggcguggugguggagaagaagaagagaggcggcaaggaggagaucaccccccacugcgcccugauggacugcaucauguucgacgccgccgugagcggcggccugaacacccuggugcugagagccgugcugcccagagacaugguguucagaaccagcacccccagaguggugcuguga

SEQ ID NO: 20762 - RNA, 1761 nt, Artificial Sequence
  derived and/or modified CDS sequence (opt4) from LASV(Togo/2016/7082;Clade VI)__AMR44578__SP-IgE_NP(2-569)
auggacuggaccuggauccuguuccugguggccgccgccaccagagugcacagcagcaacagcaaggaggugaagagcuuccuguggacccagagccugagaagagagcugagcggcuacugcagcaacaucaagcugcagguggugaaggacgcccaggcccugcugcacggccuggacuucagcgaggugagcaacgugcagagacugaugagaaagcagaagagagacgacggcgaccugaagagacugagagaccugaaccaggccgugaacaaccugguggagcugaagagcgugcagcagaagagcauccugagagugggcacccugaccagcgacgaccugcugacccuggccgccgaccuggagaagcugaagagcaaggugaccagaaccgagagaccccugagcagcggcguguacaugggcaaccugagcagccagcagcuggaccagagaagagcccugcugagcaugaucggcaugagcggcggcaaccagaacagccagcccaagggcgacggcguggugagagugugggacgugaagaacgccgaccugcugaacaaccaguucggcaccaugcccagccugacccuggccugccugaccaagcagggccagguggaccugaacgacgccgugcaggcccugaccgaccugggccugaucuacaccgccaaguaccccaacagcagcgaccuggacagacugagccagagccaccccauccugaacaugaucgacaccaagaagagcagccugaacaucagcggcuacaacuucagccugggcgccgccaucaagaccggcgccugcaugcuggacggcggcaacaugcuggagaccaucaaggugaccccccagaccauggacggcauccugaagagcauccugaaggugaagagaagccugggcauguucaucagcgacacccccggcgagagaaaccccuacgagaacauccuguacaagaucugccugagcggcgacggcuggcccuacaucgccagcagaaccgccaucaucggcagagccugggagaacaccgugguggaccuggagagcgacagcaagccccagaagaucggcagcaacggcagcaacaagagccugcagagcgccggcuucgcccccggccugaccuacagccagcugaugacccugaaggacagcaugcugcagcuggaccccaacgccaagaccuggaucgacaucgagggcagacccgaggaccccguggagguggcccuguuccagcccaucagcggcugcuacauccacuucuucagagagcccaccgaccugaagcaguucaagcaggacgccaaguacagccacggcaucgacgugaccgaccuguucgccgcccagcccggccugaccagcgccgugaucgaggcccugcccagaaacauggugcugaccugccagggcagcgacgacaucaagaagcugcuggacagccagggcagaagagacaucaagcugaucgacgugagccugaacaagaucgacagcagaaaguucgagaacgccgugugggaccaguacaaggaccugugccacaugcacaccggcguggugguggagaagaagaagaagggcggcaaggaggagaucaccccccacugcgcccugcuggacugcaucauguucgacgccgccgugagcggcggccugaacgccaccgugcugagagccgugcugcccagagacaugguguucagaaccagcagccccaagguggugcuguga

SEQ ID NO: 20763 - RNA, 1761 nt, Artificial Sequence
  derived and/or modified CDS sequence (opt4) from LASV(KAK-428;Clade n.d. (VII))__ANH09741__SP-IgE_NP(2-569)
auggacuggaccuggauccuguuccugguggccgccgccaccagagugcacagcagcaacagcaaggaggugaagagcuuccuguggacccagagccugagaagagagcugagcggcuacugcaccaacaucaagcugcagguggugaaggacgcccaggcccugcugcacggccuggacuucagcgaggugagcaacgugcagagacugaugagaaagcagaagagagacgacaacgaccugaagagacugagagaccugaaccaggccgugaacaaccugguggagcugaagagcgugcagcagaagagcgugcugaaggugggcacccugaacagcgacgaccugcugacccuggccgccgaccuggagaagcugaagagcaagguggugagaaccgagagaccccugagcagcggcguguacaugggcaaccugagcagccagcagcuggaccagagaagagcccugcugaacaugaucggcauggccggcggcagccagggcaaccagcccagcagagacggcguggugagagugugggacgugaagaacgccgaccugcugaacaaccaguucggcaccaugcccagccugacccuggccugccugaccaagcagggccagguggaccugaacgacguggugcuggcccugaccgaccugggccugaucuacaccgccaaguaccccaacagcagcgaccuggacagacugagccagaaccaccccgugcugaacaugaucgacgugaacaagagcagccugaacaucagcggcuacaacuucagccugggcgccgccgugaaggccggcgccugcaugcuggacggcggcaacaugcuggagaccaucaagaucagcccccagaccguggacggcauccugaagagcauccugaaggugaagagagcccugggcauguucgugagcgacacccccggcgagagaaaccccuacgagaacauccuguacaaggugugccugagcggcaacggcuggcccuacaucgccagcagaaccagcaucgugggcagagccugggagaacaccgugguggaccuggagagcaacaagaaccagcccaaggugggcaacaacggcagcaacaagaugcugcagagcagcggcuucgccaccggccugaccuacagccagcugaugacccugagagacagcaugcugcagcuggaccccaccgccaagaccuggaucgacaucgagggcagacccgaggaccccguggagcuggcccuguuccagcccagcagcggcugcuacauccacuucuucagagagcccaccgaccugaagcaguucaagcaggacgccaaguacagccacggcaucgacgugaacgaccuguucagcgcccagcccggccugaccagcgccgugcuggaggcccugcccagaaacauggugcugaccugccagggcagcgacgacaucagaaagcugcuggacagccaggacagaaaggacaucaagcugaucgacaucagccugagcaaggccgacgccagaaaguucgagaacgacgugugggaccaguucaaggaccugugccacaugcacaccggcaucgugguggagaagaagaagaagggcggcaagcaggagaugaccccccacugcgcccugcuggacugcaucauguucgacgccgccgugagcggcggccugaacgugcccacccugagagccgugcugcccaccgacaugguguucagaaccaucaccaccaagguggugcuguga

SEQ ID NO: 20764 - RNA, 1761 nt, Artificial Sequence; identical to SEQ ID NO: 20758
  derived and/or modified CDS sequence (opt4) from LASV(Pinneo-NIG-1969;Clade I)__AIT17837__SP-IgE_NP(2-569)

SEQ ID NO: 20765 - RNA, 1761 nt, Artificial Sequence
  derived and/or modified CDS sequence (opt4) from LASV(ISTH0009-NIG-2011;Clade II)__AIT17405__SP-IgE_NP(2-569)
auggacuggaccuggauccuguuccugguggccgccgccaccagagugcacagcagcgugagcaaggaggugaagagcuuccuguggacccagagccugagaagagagcugagcggcuacugcagcaacaucaagcugcagguggugaaggacgcccaggcccugcugcacggccuggacuucagcgaggugagcaacgugcagagacugaugagaaagcagaagagagacgacagcgaccugaagagacugagagaccugaaccaggccgugaacaaccugguggagcugaagagcacccagcagaagagcauccugagagugggcacccugaccagcgacgaccugcugacccuggccgccgaccuggagaagcugaagagcaaggugaucagaaccgagagaccccugagcagcggcguguacaugggcaaccugagcacccagcagcuggagcagagaagagcccugcugaacaugaucggcauggugggcggcgcccagggcacccagcccggcagagacggcguggugagagugugggacgugaagaaccccgaccugcugaacaaccaguucggcaccaugcccagccugacccuggccugccugaccaagcagggccagguggaccugaacgacgccgugcuggcccugaccgaccugggccugaucuacaccgccaaguaccccaacagcagcgaccuggacagacugagccagagccaccccauccugaacaugguggacaucaagaagagcagccugaacaucagcggcuacaacuucagccugggcgccgccgugaaggccggcgccugcaugcuggacggcggcaacaugcuggagaccaucaaggugaccccccagaccauggacggcauccugaagagcauccugaaggugaagagaagccugggcauguucgugagcgacacccccggcgagagaaaccccuacgagaacauccuguacaagaucugccugagcggcgacggcuggcccuacaucgccagcagaaccagcaucgugggcagagccugggagaacaccaccguggaccuggagagcgacggcaagccccagaaggugggcagcgccggcagcaacaagagccugcagagcgccggcuuccccaccggccugaccuacagccagcugaugacccugaaggacagcaugaugcagcuggaccccagcgccaagaccuggaucgacaucgagggcagacccgaggaccccguggagaucgcccuguaccagcccaugagcggcugcuacauccacuucuucagagagcccaccgaccugaagcaguucaagcaggacgccaaguacagccacggcaucgacguggccgaccuguuccccgcccagcccggccugaccagcgccgugaucgaggcccugcccagaaacauggugcugaccugccagggcagcgacgacaucaagagacugcuggacagccagggcagaagagacaucaagcugaucgacaucgcccugagcaaggccgacagcagaagauucgagaacgccgugugggaccagugcaaggaccugugccacaugcacaccggcguggugguggagaagaagaagagaggcggcaaggaggagaucaccccccacugcgcccugauggacugcaucauguacgacgccgccgugagcggcggccugaacauccccgugcugagagccgugcugcccagagacaugguguucagaaccagcagccccaagguggugcuguga

SEQ ID NO: 20766 - RNA, 1761 nt, Artificial Sequence
  derived and/or modified CDS sequence (opt4) from LASV(ISTH2010-NIG-2012;Clade II)__AIT17483__SP-IgE_NP(2-569)
auggacuggaccuggauccuguuccugguggccgccgccaccagagugcacagcagcgccagcaaggaggugaagagcuuccuguggacccagagccugagaagagagcugagcggcuacugcagcaacaucaagcugcagguggugaaggacgcccaggcccugcugcacggccuggacuucagcgaggugagcaacgugcagagacugaugagaaagcagaagagagacgacagcgaccugaagagacugagagaccugaaccaggccgugaacaaccugguggagcugaagagcacccagcagaagagcauccugagagugggcacccugaccagcgacgaccugcugacccuggccgccgaccuggagaagcugaagagcaaggugaucagaaccgagagaccccugagcagcggcguguacaugggcaaccugagcacccagcagcuggagcagagaagagcccugcugaaccugaucggcauggugggcggcgcccagggcacccagcccggcagagacggcguggugagagugugggacgugaagaaccccgaccugcugaacaaccaguucggcaccaugcccagccugacccuggccugccugaccaagcagggccagguggaccugaacgacgccgugcuggcccugaccgaccugggccugaucuacaccgccaaguaccccaacagcagcgaccuggacagacugagccagagccaccccauccugaacaugguggacaccaagaagagcagccugaacaucagcggcuucaacuucagccugggcgccgccgugaaggccggcgccugcaugcuggacggcggcaacaugcuggagaccaucaaggugaccccccagaccauggacggcauccugaagagcauccugaaggugaagaagagccugggcauguucgugagcgacacccccggcgagagaaaccccuacgagaacauccuguacaagaucugccugagcggcgacggcuggcccuacaucgccagcagaaccagcaucgugggcagagccugggagaacaccaccguggaccuggagagcgacggcaagccccacaaggugggcaccgccggcagcaacaagagccugcagagcgccggcuuccccaccggccugaccuacagccagcugaugacccugaaggacagcaugaugcagcuggaccccagcgccaagaccuggaucgacaucgagggcagacccgaggaccccguggagaucgcccuguaccagcccaugagcggcugcuacauccacuucuucagagagcccaccgaccugaagcaguucaagcaggacgccaaguacagccacggcaucgacguggccgaccuguuccccgcccagcccggccugaccagcgccgugaucgaggcccugcccagaaacauggugcugaccugccagggcagcgacgacaucaagagacugcuggacagccagggcagaagagacaucaagcugaucgacaucgcccugagcaaggccgacagcagaagauucgagaacgccgugugggaccagugcaaggaccugugccacaugcacaccggcguggugguggagaagaagaagagaggcggcaaggaggagaucaccccccacugcgcccugauggacugcaucauguacgacgccgccgugagcggcggccugaacauccccgugcugagagccgugcugcccagagacaugguguucagaaccagcagccccaagguggugcuguga

SEQ ID NO: 20767 - RNA, 1761 nt, Artificial Sequence
  derived and/or modified CDS sequence (opt4) from LASV(Lassa virus/H.sapiens-wt/NGA/2015/ISTH_0543;Clade II)__AVO03640__SP-IgE_NP(2-569)
auggacuggaccuggauccuguuccugguggccgccgccaccagagugcacagcagcgccagcaaggaggugaagagcuuccuguggacccagagccugagaagagagcugagcggcuacugcagcaacaucaagcugcagguggugaaggacgcccaggcccugcugcacggccuggacuucagcgaggugagcaacgugcagagacugaugagaaagcagaagagagacgacagcgaccugaagagacugagagaccugaaccaggccgugaacaaccugguggagcugaagagcacccagcagaagagcauccugagagugggcacccugaccagcgacgaccugcugacccuggccgccgaccuggagaagcugaagagcaaggugaucagaaccgagagaccccugagcagcggcguguacaugggcaaccugagcacccagcagcuggagcagagaagagcccugcugaacaugaucggcauggugggcggcgcccagggcacccagcccggcagagacggcguggugagagugugggacgugaagaaccccgaccugcugaacaaccaguucggcaccaugcccagccugacccuggccugccugaccaagcagggccagguggaccugaacgacgccgugcuggcccugaccgaccugggccugaucuacaccgccaaguaccccaacagcagcgaccuggacagacugagccagagccaccccauccugaacaugguggacaccaagaagagcagccugaacaucagcggcuacaacuucagccugggcgccgccgugaaggccggcgccugcaugcuggacggcggcaacaugcuggagaccaucaaggugaccccccagaccauggacggcauccugaagagcauccugaaggugaagaagagccugggcauguucgugagcgacacccccggcgagagaaaccccuacgagaacauccuguacaagaucugccugagcggcgacggcuggcccuacaucgccagcagaaccagcaucgugggcagagccugggagaacaccaccguggaccuggagagcgacggcaagccccagaaggugggcagcgccggcagcaacaagagccugcagagcgccggcuuccccaccggccugaccuacagccagcugaugacccugaaggacagcaugaugcagcuggaccccagcgccaagaccuggaucgacaucgagggcagacccgaggaccccguggagaucgcccuguaccagcccaugagcggcugcuacauccacuucuucagagagcccaccgaccugaagcaguucaagcaggacgccaaguacagccacggcaucgacguggccgaccuguuccccgcccagcccggccugaccagcgccgugaucgaggcccugcccagaaacauggugcugaccugccagggcagcgacgacaucaagagacugcuggacagccagggcagaaaggacaucaagcugaucgacaucgcccugagcaaggccgacagcagaagauucgagaacgccgugugggaccagugcaaggaccugugccacaugcacaccggcguggugguggagaagaagaagagaggcggcaaggaggagaucaccccccacugcgcccugauggacugcaucauguacgacgccgccgugagcggcggccugaacauccccgugcugagagccgugcugcccagagacaugguguucagaaccagcagccccaagguggugcuguga

SEQ ID NO: 20768 - RNA, 1761 nt, Artificial Sequence
  derived and/or modified CDS sequence (opt4) from LASV(Lassa virus/H.sapiens-wt/NGA/2016/ISTH_0009;Clade II)__AVO03572__SP-IgE_NP(2-569)
auggacuggaccuggauccuguuccugguggccgccgccaccagagugcacagcagcgccagcaaggaggugaagagcuuccuguggacccagagccugagaagagagcugagcggcuacugcagcaacaucaagcugcagguggugaaggacgcccaggcccugcugcacggccuggacuucagcgaggugagcaacgugcagagacugaugagaaagcagaagagagacgacagcgaccugaagagacugagagaccugaaccaggccgugaacaaccugguggagcugaagagcacccagcagaagagcauccugagagugggcacccugaccagcgacgaccugcugacccuggccgccgaccuggagaagcugaagagcaaggugaucagaaccgagagaccccugagcagcggcguguacaugggcaaccugagcacccagcagcuggagcagagaagagcccugcugaacaugaucggcauggugggcggcgcccagggcacccagcccggcagagacggcguggugagagugugggacgugaagaaccccgaccugcugaacaaccaguucggcaccaugcccagccugacccuggccugccugaccaagcagggccagguggaccugaacgacgccgugcuggcccugaccgaccugggccugaucuacaccgccaaguaccccaacagcagcgaccuggacagacugagccagagccaccccauccugaacaugguggacaccaagaagagcagccugaacaucagcggcuacaacuucagccugggcgccgccgugaaggccggcgccugcaugcuggacggcggcaacaugcuggagaccaucaaggugaccccccagaccauggacggcauccugaagagcauccugaaggugaagaagagccugggcauguucgugagcgacacccccggcgagagaaaccccuacgagaacauccuguacaagaucugccugagcggcgacggcuggcccuacaucgccagcagaaccagcaucgugggcagagccugggagaacaccaccguggaccuggagagcgacggcaagccccagaaggugggcagcgccggcagcaacaagagccugcagagcgccggcuuccccaccggccugaccuacagccagcugaugacccugaaggacagcaugaugcagcuggaccccagcgccaagaccuggaucgacaucgagggcagacccgaggaccccguggagaucgcccuguaccagcccaugagcggcugcuacauccacuucuucagagagcccaccgaccugaagcaguucaagcaggacgccaaguacagccacggcaucgacguggccgaccuguuccccgcccagcccggccugaccagcgccgugaucgaggcccugcccagaaacauggugcugaccugccagggcagcgacgacaucaagagacugcuggacagccagggcagaagagacaucaagcugaucgacaucgcccugagcaaggccgacagcagaagauucgagaacgccgugugggaccagugcaaggaccugugccacaugcacaccggcguggugguggagaagaagaagagaggcggcaaggaggagaucaccccccacugcgcccugauggacugcaucauguacgacgccgccgugagcggcggccugaacauccccgugcugagagccgugcugcccagagacaugguguucagaaccagcagccccaagguggugcuguga

SEQ ID NO: 20769 - RNA, 1761 nt, Artificial Sequence
  derived and/or modified CDS sequence (opt4) from LASV(Lassa virus/H.sapiens-wt/NGA/2016/ISTH_0017;Clade II)__AVO03568__SP-IgE_NP(2-569)
auggacuggaccuggauccuguuccugguggccgccgccaccagagugcacagcagcgccagcaaggaggugaagagcuuccuguggacccagagccugagaagagagcugagcggcuacugcagcagcaucaagcugcagguggugaaggacgcccaggcccugcugcacggccuggacuucagcgaggugagcaacgugcagagacugaugagaaagcagaagagagacgacagcgaccugaagagacugagagaccugaaccaggccgugaacaaccugguggagcugaagagcacccagcagaagagcauccugagagugggcacccugaccagcgacgaccugcugacccuggccgccgaccuggagaagcugaagagcaaggugaucagaaccgagagaccccugagcagcggcguguacaugggcaaccugagcacccagcagcuggagcagagaagagcccugcugaacaugaucggcauggccggcggcgcccagggcacccagcccggcagagacggcguggugagagugugggacgugaagaaccccgaccugcugaacaaccaguucggcaccaugcccagccugacccuggccugccugaccaagcagggccagguggaccugaacgacgccgugcuggcccugaccgaccugggccugaucuacaccgccaaguaccccaacagcagcgaccuggacagacugagccagagccaccccauccugaacaugguggacaccaagaagagcagccugaacaucagcggcuacaacuucagccugggcgccgccgugaaggccggcgccugcaugcuggacggcggcaacaugcuggagaccaucaaggugaccccccagaccauggacggcauccugaagagcauccugaaggugaagagaagccugggcauguucgugagcgacgcccccggcgagagaaaccccuacgagaacauccuguacaagaucugccugagcggcgacggcuggcccuacaucgccagcagaaccagcaucgugggcagagccugggagaacaccaccguggaccuggagagcgacggcaagccccagaaggugggcgccaccggcagcaacaagagccugcagagcgccggcuuccccaccggccugaccuacagccagcugaugacccugaaggacagcaugaugcagcuggaccccagcgccaagaccuggaucgacaucgagggcagacccgaggaccccguggagguggcccuguaccagcccgugagcggcugcuacauccacuucuucagagagcccaccgaccugaagcaguucaagcaggacgccaaguacagccacggcaucgacguggccgaccuguuccccgcccagcccggccugaccagcgccgugaucgaggcccugcccagaaacauggugcugaccugccagggcagcgacgacaucaagaagcugcuggacagccagggcagaaaggacaucaagcugaucgacaucgcccugagcaaggccgacagcagaagauucgagaacgccgugugggaccagugcaaggaccugugccacaugcacaccggcguggugguggagaagaagaagagaggcggcaaggaggagaucaccccccacugcgcccugauggacugcaucauguacgacgccgccgugagcggcggccugaacauccccgugcugagagccgugcugcccagagacaugguguucagaaccagcagccccaagguggugcuguga

SEQ ID NO: 20770 - RNA, 1761 nt, Artificial Sequence
  derived and/or modified CDS sequence (opt4) from LASV(Lassa virus/H.sapiens-wt/NGA/2018/ISTH_0959;Clade II)__AVV65100__SP-IgE_NP(2-569)
auggacuggaccuggauccuguuccugguggccgccgccaccagagugcacagcagcgccagcaaggaggugaagagcuuccuguggacccagagccugagaagagagcugagcggcuacugcagcaacaucaagcugcagguggugaaggacgcccaggcccugcugcacggccuggacuucagcgaggugagcaacgugcagagacugaugagaaagcagaagagagacgacagcgaccugaagagacugagagaccugaaccaggccgugaacaaccugguggagcugaagagcacccagcagaagagcauccugagagugggcacccugaccagcgacgaccugcugacccuggccgccgaccuggagaagcugaagagcaaggugaucagaaccgagagaccccugagcagcggcguguacaugggcaaccugagcacccagcagcuggagcagagaagagcccugcugaaccugaucggcauggugggcggcgcccagggcacccagcccggcagagacggcguggugagagugugggacgugaagaaccccgaccugcugaacaaccaguucggcaccaugcccagccugacccuggccugccugaccaagcagggccagguggaccugaacgacguggugcuggcccugaccgaccugggccugaucuacaccgccaaguaccccaacagcagcgaccuggacagacugagccagagccaccccauccugaacaugguggacaccaagaagagcagccugaacaucagcggcuucaacuucagccugggcgccgccgugaaggccggcgccugcaugcuggacggcggcaacaugcuggagaccaucaaggugaccccccagaccauggacggcauccugaagagcauccugaaggugaagaagagccugggcauguucgugagcgacacccccggcgagagaaaccccuacgagaacauccuguacaagaucugccugagcggcgacggcuggcccuacaucgccagcagaaccagcaucgugggcagagccugggagaacaccaccguggaccuggagagcgacggcaagccccacaaggugggcaccgccggcagcaacaagagccugcagagcgccggcuuccccaccggccugaccuacagccagcugaugacccugaaggacagcaugaugcagcuggaccccagcgccaagaccuggaucgacaucgagggcagacccgaggaccccguggagaucgcccuguaccagcccaugagcggcugcuacauccacuucuucagagagcccaccgaccugaagcaguucaagcaggacgccaaguacagccacggcaucgacguggccgaccuguuccccgcccagcccggccugaccagcgccgugaucgaggcccugcccagaaacauggugcugaccugccagggcagcgacgacaucaagagacugcuggacagccagggcagaaaggacaucaagcugaucgacaucgcccugagcaagaccgacagcagaagauucgagaacgccgugugggaccagugcaaggaccugugccacaugcacaccggcguggugguggagaagaagaagagaggcggcaaggaggagaucaccccccacugcgcccugauggacugcaucauguacgacgccgccgugagcggcggccugaacauccccgugcugagagccgugcugcccagagacaugguguucagaaccagcagccccaagguggugcuguga

SEQ ID NO: 20771 - RNA, 1761 nt, Artificial Sequence
  derived and/or modified CDS sequence (opt4) from LASV(LASV003-NIG-2008;Clade II)__AIT17581__SP-IgE_NP(2-569)
auggacuggaccuggauccuguuccugguggccgccgccaccagagugcacagcagcgccagcaaggaggugaagagcuuccuguggacccagagccugagaagagagcugagcggcuacugcagcagcaucaagcugcagguggugaaggacgcccaggcccugcugcacggccuggacuucagcgaggugagcaacgugcagagacugaugagaaagcagaagagagacgacagcgaccugaagagacugagagaccugaaccaggccgugaacaaccugguggagcugaagagcacccagcagaagagcgugcugagagugggcacccugaccagcgacgaccugcugacccuggccgccgaccuggagaagcugaagagcaaggugaucagaaccgagagaccccugagcagcggcguguacaugggcaaccugagcgcccagcagcuggagcagagaagaacccugcugaacaugaucggcauggugggcggcgcccagggcacccagcccggcagagacggcguggugagagugugggacgugaagaaccccgaccugcugaacaaccaguucggcaccaugcccagccugacccuggccugccugaccaagcagggccagguggaccugaacgacguggugcuggcccugaccgaccugggccugaucuacaccgccaaguaccccaacagcagcgaccuggacagacugagccagagccaccccauccugagcaugguggacaccaagaagagcagccugaacaucagcggcuacaacuucagccugggcgccgccgugaaggccggcgccugcaugcuggacggcggcaacaugcuggagaccaucaaggugaccccccagaccauggacggcauccugaagagcauccugaaggugaagaagagccugggcauguucgugagcgacacccccggcgagagaaaccccuacgagaacauccuguacaagaucugccugagcggcgacggcuggcccuacaucgccagcagaaccagcaucgugggcagagccugggagaacaccaccguggaccuggagagcgacggcaagccccagaaggugggcaccgccggcagcaacaagagccugcagagcgccggcuuccccaccggccugaccuacagccagcugaugacccugaaggacagcaugaugcagcuggaccccagcgccaagaccuggaucgacaucgagggcagacccgaggaccccguggagaucgcccuguaccagcccaugagcggcugcuacauccacuucuucagagagcccaccgaccugaagcaguucaagcaggacgccaaguacagccacggcaucgacgugaccgaccuguuccccgcccagcccggccugaccagcgccgugaucgaggcccugcccagaaacauggugcugaccugccagggcagcgacgacaucaagagacugcuggacagccagggcagaagagacaucaagcugaucgacaucgcccugagcaaggccgacagcagaagauucgagaacgccgugugggaccagugcaaggaccugugccacaugcacaccggcguggugguggagaagaagaagagaggcggcaaggaggagaucaccccccacugcgcccugauggacugcaucauguacgacgccgccgugagcggcggccugaacauccccgugcugagagccgugcugcccagagacaugguguucagaaccagcagccccaagguggugcuguga

SEQ ID NO: 20772 - RNA, 1761 nt, Artificial Sequence
  derived and/or modified CDS sequence (opt4) from LASV(LASV035-NIG-2009;Clade II)__AIT17589__SP-IgE_NP(2-569)
auggacuggaccuggauccuguuccugguggccgccgccaccagagugcacagcagcgccagcaaggaggugaagagcuuccuguggacccagagccugagaagagagcugagcggcuacugcagcagcaucaagcugcagguggugaaggacgcccaggcccugcugcacggccuggacuucagcgaggugagcaacgugcagagacugaugagaaagcagaagagagacgacagcgaccugaagagacugagagaccugaaccaggccgugaacaaccugguggagcugaagagcacccagcagaagagcauccugagagugggcacccugaccagcgacgaccugcugacccuggccgccgaccuggagaagcugaagagcaaggugaucagaaccgagagaccccugagcagcggcguguacaugggcaaccugagcgcccagcagcuggagcagagaagagcccugcugaacaugaucggcauggugggcggcgcccagggcacccagcccggcagagacggcguggugagagugugggacgugaagaaccccgaccugcugaacaaccaguucggcaccaugcccagccugacccuggccugccugaccaagcagggccagguggaccugaacgacgccgugcuggcccugaccgaccugggccugaucuacaccgccaaguaccccaacagcagcgaccuggacagacugagccagagccaccccauccugaacaugguggacaccaagaagagcagccugaacaucagcggcuacaacuucagccugggcgccgccgugaaggccggcgccugcaugcuggacggcggcaacaugcuggagaccaucaaggugaccccccagaccauggacggcauccugaagagcauccugaaggugaagagaagccugggcauguucgugagcgacacccccggcgagagaaaccccuacgagaacauccuguacaagaucugccugagcggcgacggcuggcccuacaucgccagcagaaccagcaucgugggcagagccugggagaacaccaccguggaccuggagagcgacggcaagccccagaaggugggcaccaccggcagcaacaagagccugcagagcgccggcuuccccaccggccugaccuacagccagcugaugacccugaaggacagcaugaugcagcuggaccccagcgccaagaccuggaucgacaucgagggcagacccgaggaccccguggagaucgcccuguaccagcccaugagcggcugcuacauccacuucuucagagagcccaccgaccugaagcaguucaagcaggacgccaaguacagccacggcaucgacguggccgaccuguuccccgcccagcccggccugaccagcgccgugaucgaggcccugcccagaaacauggugcugaccugccagggcagcgacgacaucaagaagcugcuggacagccagggcagaagagacaucaagcugaucgacaucgcccugagcaaggccgacagcagaaaguucgagaacgccgugugggaccagugcaaggaccugugccacaugcacaccggcguggugguggagaagaagaagagaggcggcaaggaggagaucaccccccacugcgcccugauggacugcaucauguacgacgccgccgugagcggcggccugaacauccccgugcugagagccgugcugcccagagacaugguguucagaaccagcagccccaagguggugcuguga

SEQ ID NO: 20773 - RNA, 1761 nt, Artificial Sequence
  derived and/or modified CDS sequence (opt4) from LASV(LASV1000-NIG-2009;Clade II)__AIT17783__SP-IgE_NP(2-569)
auggacuggaccuggauccuguuccugguggccgccgccaccagagugcacagcagcgccagcaaggaggugaagagcuuccuguggacccagagccugagaagagagcugagcggcuacugcagcaacaucaagcugcagguggugaaggacgcccaggcccugcugcacggccuggacuucagcgaggugagcaacgugcagagacugaugagaaagcagaagagagacgacagcgaccugaagagacugagagaccugaaccaggccgugaacaaccugguggagcugaagagcacccagcagaagagcauccugagagugggcacccugaccagcgacgaccugcugacccuggccgccgaccuggagaagcugaagagcaaggugaucagaaccgagagaccccugagcagcggcguguacaugggcaaccugagcacccagcagcuggagcagagaagagcccugcugaacaugaucggcauggugggcggcgcccagggcacccagcccggcagagacggcguggugagagugugggacgugaagaaccccgaccugcugaacaaccaguucggcaccaugcccagccugacccuggccugccugaccaagcagggccagguggaccugaacgacguggugcuggcccugaccgaccugggccugaucuacaccgccaaguaccccaacagcagcgaccuggacagacugagccagagccaccccauccugaacaugguggacaccaagaagagcagccugaacaucagcggcuacaacuucagccugggcgccgccgugaaggccggcgccugcaugcuggacggcggcaacaugcuggagaccaucaaggugaccccccagaccauggacggcauccugaagagcauccugaaggugaagaagagccugggcauguucgugagcgacacccccggcgagagaaaccccuacgagaacauccuguacaagaucugccugagcggcgacggcuggcccuacaucgccagcagaaccagcaucgugggcagagccugggagaacaccaccguggaccuggagagcgacggcaagccccagaaggugggcaccgccggcagcaacaagagccugcagagcgccggcuuccccaccggccugaccuacagccagcugaugacccugaaggacagcaugaugcagcuggaccccagcgccaagaccuggaucgacaucgagggcagacccgaggaccccguggagaucgcccuguaccagcccgugagcggcugcuacauccacuucuucagagagcccaccgaccugaagcaguucaagcaggacgccaaguacagccacggcaucgacguggccgaccuguuccccgcccagcccggccugaccagcgccgugaucgaggcccugcccagaaacauggugcugaccugccagggcagcgacgacaucaagagacugcuggacagccagggcagaagagacaucaagcugaucgacaucgcccugagcaaggccgacagcagaagauucgagaacgccgugugggaccagugcaaggaccugugccacaugcacaccggcguggugguggagaagaagaagagaggcggcaaggaggagaucaccccccacugcgcccugauggacugcaucauguacgacgccgccgugagcggcggccugaacauccccgugcugagagccgugcugcccagagacaugguguucagaaccagcagccccaagguggugcuguga

SEQ ID NO: 20774 - RNA, 1761 nt, Artificial Sequence
  derived and/or modified CDS sequence (opt4) from LASV(LASV221-NIG-2010;Clade II)__AIT17625__SP-IgE_NP(2-569)
auggacuggaccuggauccuguuccugguggccgccgccaccagagugcacagcagcgccagcaaggaggugaagagcuuccuguggacccagagccugagaagagagcugagcggcuacugcagcagcaucaagcugcagguggugaaggacgcccaggcccugcugcacggccuggacuucagcgaggugagcaacgugcagagacugaugagaaagcagagaagagacgacagcgaccugaagagacugagagaccugaaccaggccgugaacaaccugguggagcugaagagcacccagcagaagagcauccugagagugggcacccugaccagcgacgaccugcugacccuggccgccgaccuggagaagcugaagagcaaggugaucagaaccgagagaccccugagcagcggcguguacaugggcaaccugagcacccagcagcuggagcagagaagagcccugcugaacaugaucggcauggugggcggcgcccagggcacccagcccggcagagacggcguggugagagugugggacgugaagaaccccgaccugcugaacaaccaguucggcaccaugcccagccugacccuggccugccugaccaagcagggccagguggaccugaacgacgccgugcuggcccugaccgaccugggccugaucuacaccgccaaguaccccaacagcagcgaccuggacagacugagccagagccaccccauccugaacaugguggacaccaagaagagcagccugaacaucagcggcuacaacuucagccugggcgccgccgugaaggccggcgccugcaugcuggacggcggcaacaugcuggagaccaucaaggugaccccccagaccguggacggcauccugaagagcauccugaaggugaagagaagccugggcauguucgugagcgacacccccggcgagagaaaccccuacgagaacauccuguacaagaucugccugagcggcgacggcuggcccuacaucgccagcagaaccagcaucgugggcagagccugggagaacaccaccguggaccuggagagcgacggcaagccccagaaggugggcaccgccggcagcaacaagagccugcagagcgccggcuuccccaccggccugaccuacagccagcugaugacccugaaggacagcaugaugcagcuggaccccagcgccaagaccuggaucgacaucgagggcagacccgaggaccccguggagaucgcccuguaccagcccaugagcggcugcuacauccacuucuucagagagcccaccgaccugaagcaguucaagcaggacgccaaguacagccacggcaucgacguggccgaccuguuccccgcccagcccggccugaccagcgccgugaucgaggcccugcccagaaacauggugcugaccugccagggcagcgacgacaucaagagacugcuggacagccagggcagaagagacaucaagcugaucgacaucgcccugagcaaggccgacagcagaaaguucgagaacgccgugugggaccagugcaaggaccugugccacaugcacaccggcguggugguggagaagaagaagagaggcggcaaggaggagaucaccccccacugcgcccugauggacugcaucauguacgacgccgccgugagcggcggccugaacauccccgugcugagagccgugcugcccagagacaugguguucagaaccagcagccccaagguggugcuguga

SEQ ID NO: 20775 - RNA, 1761 nt, Artificial Sequence
  derived and/or modified CDS sequence (opt4) from LASV(LASV237-NIG-2010;Clade II)__AIT17639__SP-IgE_NP(2-569)
auggacuggaccuggauccuguuccugguggccgccgccaccagagugcacagcagcgccagcaaggaggugaagagcuuccuguggacccagagccugagaagagagcugagcggcuacugcagcaacaucaagcugcagguggugaaggacgcccaggcccugcugcacggccuggacuucagcgaggugagcaacgugcagagacugaugagaaagcagaagagagacgacagcgaccugaagagacugagagaccugaaccaggccgugaacaaccugguggagcugaagagcacccagcagaagagcauccugagagugggcacccugaccagcgacgaccugcugacccuggccgccgaccuggagaagcugaagagcaaggugaucagaaccgagagaccccugagcagcggcguguacaugggcaaccugagcacccagcagcuggagcagagaagagcccugcugaacaugaucggcauggugggcggcgcccagggcacccagcccggcagagacggcguggugagagugugggacgugaagaaccccgaccugcugaacaaccaguucggcaccaugcccagccugacccuggccugccugaccaagcagggccagguggaccugaacgacgccgugcuggcccugaccgaccugggccugaucuacaccgccaaguaccccaacagcagcgaccuggacagacugagccagagccaccccauccugaacaugguggacaucaagaagagcagccugaacaucagcggcuacaacuucagccugggcgccgccgugaaggccggcgccugcaugcuggacggcggcaacaugcuggagaccaucaaggugaccccccagaccauggacggcauccugaagagcauccugaaggugaagagaagccugggcauguucgugagcgacacccccggcgagagaaaccccuacgagaacauccuguacaagaucugccugagcggcgacggcuggcccuacaucgccagcagaaccagcaucgugggcagagccugggagaacaccaccguggaccuggagagcgacggcaagccccagaaggugggcagcgccggcagcaacaagagccugcagagcgccggcuuccccaccggccugaccuacagccagcugaugacccugaaggacagcaugaugcagcuggaccccagcgccaagaccuggaucgacaucgagggcagacccgaggaccccguggagaucgcccuguaccagcccaugagcggcugcuacauccacuucuucagagagcccaccgaccugaagcaguucaagcaggacgccaaguacagccacggcaucgacguggccgaccuguuccccgcccagcccggccugaccagcgccgugaucgaggcccugcccagaaacauggugcugaccugccagggcagcgacgacaucaagagacugcuggacagccagggcagaagagacaucaagcugaucgacaucgcccugagcaaggccgacagcagaagauucgagaacgccgugugggaccagugcaaggaccugugccacaugcacaccggcguggugguggagaagaagaagagaggcggcaaggaggagaucaccccccacugcgcccugauggacugcaucauguacgacgccgccgugagcggcggccugaacauccccgugcugagagccgugcugcccagagacaugguguucagaaccagcagccccaagguggugcuguga

SEQ ID NO: 20776 - RNA, 1761 nt, Artificial Sequence
  derived and/or modified CDS sequence (opt4) from LASV(LASV253-NIG-2011;Clade II)__AIT17671__SP-IgE_NP(2-569)
auggacuggaccuggauccuguuccugguggccgccgccaccagagugcacagcagcgccagcaaggaggugaagagcuuccuguggacccagagccugagaagagagcugagcggcuacugcagcagcaucaagcugcagguggugaaggacgcccaggcccugcugcacggccuggacuucagcgaggugagcaacgugcagagacugaugagaaagcagaagagagacgacagcgaccugaagagacugagagaccugaaccaggccgugaacaaccugguggagcugaagagcacccagcagaagagcgugcugagagugggcacccugaccagcgacgaccugcugacccuggccgccgaccuggagaagcugaagagcaaggugaucagaaccgagagaccccugagcagcggcguguacaugggcaaccugagcacccagcagcuggagcagagaagagcccugcugaacaugaucggcauggugggcggcgcccagggcacccagcccggcagagacggcguggugagagugugggacgugaagaaccccgaccugcugaacaaccaguucggcaccaugcccagccugacccuggccugccugaccaagcagggccagguggaccugaacgacguggugcuggcccugaccgaccugggccugaucuacaccgccaaguaccccaacagcagcgaccuggacagacugagccagagccaccccauccugaacaugguggacaccaagaagagcagccugaacaucagcggcuacaacuucagccugggcgccgccgugaaggccggcgccugcaugcuggacggcggcaacaugcuggagaccaucaaggugaccccccagaccauggacggcauccugaagagcauccugaaggugaagaagagccugggcauguucgugagcgacacccccggcgagagaaaccccuacgagaacauccuguacaagaucugccugagcggcgacggcuggcccuacaucgccagcagaaccagcaucgugggcagagccugggagaacaccaccguggaccuggagagcgacggcaagccccagaaggugggcaccgccggcagcaacaagagccugcagagcgccggcuuccccaccggccugaccuacagccagcugaugacccugaaggacagcaugaugcagcuggaccccagcgccaagaccuggaucgacaucgagggcagacccgaggaccccguggagaucgcccuguaccagcccaugagcggcugcuacauccacuucuucagagagcccaccgaccugaagcaguucaagcaggacgccaaguacagccacggcaucgacgugaccgaccuguuccccgcccagcccggccugaccagcgccgugaucgaggcccugcccagaaacauggugcugaccugccagggcagcgacgacaucaagagacugcuggacagccagggcagaagagacaucaagcugaucgacaucgcccugagcaaggccgacagcagaagauucgagaacgccgugugggaccagugcaaggaccugugccacaugcacaccggcguggugguggagaagaagaagagaggcggcaaggaggagaucaccccccacugcgcccugauggacugcaucauguacgacgccgccgugagcggcggccugaacauccccgugcugagagccgugcugcccagagacaugguguucagaaccagcagccccaagguggugcuguga

SEQ ID NO: 20777 - RNA, 1761 nt, Artificial Sequence
  derived and/or modified CDS sequence (opt4) from LASV(LASV254-NIG-2011;Clade II)__AIT17675__SP-IgE_NP(2-569)
auggacuggaccuggauccuguuccugguggccgccgccaccagagugcacagcagcgccagcaaggaggugaagagcuuccuguggacccagagccugagaagagagcugagcggcuacugcagcagcaucaagcugcagguggugaaggacgcccaggcccugcugcacggccuggacuucagcgaggugagcaacgugcagagacugaugagaaagcagaagagagacgacagcgaccugaagagacugagagaccugaaccaggccgugaacaaccugguggagcugaagagcacccagcagaagagcgugcugagagugggcacccugaccagcgacgaccugcugacccuggccgccgaccuggagaagcugaagagcaaggugaucagaaccgagagaccccugagcagcggcguguacaugggcaaccugagcacccagcagcuggagcagagaagagcccugcugaacaugaucggcauggugggcggcgcccagggcacccagcccggcagagacggcguggugagagugugggacgugaagaaccccgaccugcugaacaaccaguucggcaccaugcccagccugacccuggccugccugaccaagcagggccagguggaccugaacgacgccgugcuggcccugaccgaccugggccugaucuacaccgccaaguaccccaacagcagcgaccuggacagacugagccagagccaccccauccugaacaugguggacaccaagaagagcagccugaacaucagcggcuacaacuucagccugggcgccgccgugaaggccggcgccugcaugcuggacggcggcaacaugcuggagaccaucaaggugaccccccagaccauggacggcauccugaagagcauccugaaggugaagaagagccugggcauguucgugagcgacacccccggcgagagaaaccccuacgagaacauccuguacaagaucugccugagcggcgacggcuggcccuacaucgccagcagaaccagcaucgugggcagagccugggagaacaccaucguggaccuggagagcgacggcaagccccagaaggugggcaccgccggcagcaacaagagccugcagagcgccggcuuccccaccggccugaccuacagccagcugaugacccugaaggacagcaugaugcagcuggaccccagcgccaagaccuggaucgacaucgagggcagacccgaggaccccguggagaucgcccuguaccagcccaugagcggcugcuacauccacuucuucagagagcccaccgaccugaagcaguucaagcaggacgccaaguacagccacggcaucgacguggccgaccuguuccccgcccagcccggccugaccagcgccgugaucgaggcccugcccagaaacauggugcugaccugccagggcagcgacgacaucaagagacugcuggacagccagggcagaagagacaucaagcugaucgacaucgcccugagcaaggccgacagcagaagauucgagaacgccgugugggaccagugcaaggaccugugccacaugcacaccggcguggugguggagaagaagaagagaggcggcaaggaggagaucaccccccacugcgcccugauggacugcaucauguacgacgccgccgugagcggcggccugaacauccccgugcugagagccgugcugcccagagacaugguguucagaaccagcagccccaagguggugcuguga

SEQ ID NO: 20778 - RNA, 1761 nt, Artificial Sequence
  derived and/or modified CDS sequence (opt4) from LASV(Nig08-04;Clade II)__ADU56611__SP-IgE_NP(2-569)
auggacuggaccuggauccuguuccugguggccgccgccaccagagugcacagcagcgccagcaaggaggugaagagcuuccuguggacccagagccugagaagagagcugagcggcuacugcagcaacaucaagcugcagguggugaaggacgcccaggcccugcugcacggccuggacuucagcgaggugagcaacgugcagagacugaugagaaagcagaagagagacgacggcgaccugaagagacugagagaccugaaccaggccgugaacaaccugguggagcugaagagcacccagcagaagagcgugcugagagugggcacccugaccagcgacgaccugcugacccuggccgccgaccuggagaagcugaagagcaaggugaucagaaccgagagaccccugagcagcggcguguacaugggcaaccugagcacccagcagcuggagcagagaaaggcccugcugagcaugaucggcauggugggcggcgcccagggcacccagcccggcagagacggcguggugagagugugggacgugaagaaccccgaccugcugaacaaccaguucggcaccaugcccagccugacccuggccugccugaccaagcagggccagguggaccugaacgacgccgugcuggcccugaccgaccugggccugaucuacaccgccaaguaccccaacagcagcgaccuggacagacugagccagagccaccccauccugaacaugguggacaccaagaagagcagccugaacaucagcggcuacaacuucagccugggcgccgccgugaaggccggcgccugcaugcuggacggcggcaacaugcuggagaccaucaaggugaccccccagaccauggacggcauccugaagagcauccugaaggugaagagaagccugggcauguucgugagcgacacccccggcgagagaaaccccuacgagaacauccuguacaagaucugccugagcggcgacggcuggcccuacaucgccagcagaaccagcaucgugggcagagccugggagaacaccaccguggaccuggagagcgacggcaagccccagaaggugggcaccgccggcagcaacaagagccugcagagcgccggcuuccccaccggccugaccuacagccagcugaugacccugaaggacagcaugaugcagcuggaccccagcgccaagaccuggaucgacaucgagggcagacccgaggaccccguggagaucgcccuguaccagcccaugagcggcugcuacauccacuucuucagagagcccaccgaccugaagcaguucaagcaggacgccaaguacagccacggcaucgacgugaccgaccuguucagcgcccagcccggccugaccagcgccgugaucgaggcccugcccagaaacauggugcugaccugccagggcagcgacgacaucaagaagcugcuggacagccagggcagaagagacaucaagcugaucgacaucagccugaacaaggccgacagcagaagauucgagaacgccgugugggaccagugcaaggaccugugccacaugcacaccggcguggugguggagaagaagaagagaggcggcaaggaggagaucaccccccacugcgcccugauggacugcaucauguucgacgccgccgugagcggcggccugaacauccccauccugagagccgugcugcccagagacaugguguucagaaccagcagccccaagguggugcuguga

SEQ ID NO: 20779 - RNA, 1764 nt, Artificial Sequence
  derived and/or modified CDS sequence (opt4) from LASV(GA391;Clade III)__AAA46284__SP-IgE_NP(2-570)
auggacuggaccuggauccuguuccugguggccgccgccaccagagugcacagcagcgccagcaaggaggugagaagcugccuguggacccagagccugagaagagagcugagcggcuacugcagcaacaucaagcugcagguggugaaggacgcccaggcccugcugcacggccuggacuucagcgaggugagcaacgugcagagacugaugagaaagcagaagagagacgacggcgaccugaagagacugagagaccugaaccaggccgugaacaaccugguggagcugaagagcacccagcagaagagcgugcugagagugggcacccugagcagcgacgaccugcugauccuggccgccgaccuggagaagcugaagagcaaggugaccagaaccgagagaccccugagcagcggcguguacaugggcaaccugagcagccagcagcuggaccagagaagagcccugcugaacaugaucggcaugaccggcgugagcggcggcggcaagggcgccagcaacggcaucgugagagugugggacgugaagaacgccgagcugcugaacaaccaguucggcaccaugcccagccugacccuggccugccugaccaagcagggccagguggaccugaacgacgccgugcaggcccugaccgaccugggccugaucuacaccgccaaguaccccaacagcagcgaccuggacagacugagccagagccaccccauccugaacaugaucgacaccaagaagagcagccugaacaucagcggcuacaacuucagccugggcgccgccgugaaggccggcgccugcaugcuggacggcggcaacaugcuggagaccaucaaggugagcccccagaccauggacggcauccugaagagcauccugaaggugaagaagagccugggcauguucgugagcgacacccccggcgagagaaaccccuacgagaacauccuguacaagaucugccugagcggcgacggcuggagcuacaucgccagcagaaccagcaucgugggcagagccugggagaacaccgugguggaccuggagcaggacaacaagccccagaagaucggcaacggcggcagcaacaagagccugcagagcgccggcuucgccgccggccugaucuacagccagcugaugacccugaaggacuucaagugcuucaaccugauccccaacgccaagaccuggauggacaucgagggcagacccgaggaccccguggagaucgcccuguaccagcccagcagcggcugcuacgugcacuucuucagagagcccaccgaccugaagcaguucaagcaggacgccaaguacagccacggcagagacgugaccgaccuguucgccgcccagcccggccugaccagcgccgugaucgaggcccugcccagaaacauggugaucaccugccagggcagcgaggacaucagaaagcugcuggagagccagggcagaagagacaucaagcugaucgacaucacccugagcaaggccgacagcagaaaguucgagaacgccgugugggaccaguucaaggaccugugccacaugcacaccggcguggugguggagaagaagaagagaggcggcaaggaggagaucaccccccacugcgcccugauggacugcaucauguucgacgccgccgugagcggcggccuggacgccaaggugcugagaguggugcugcccagagacaugguguucagaaccagcacccccaagguggugcuguga

SEQ ID NO: 20780 - RNA, 1761 nt, Artificial Sequence
  derived and/or modified CDS sequence (opt4) from LASV(Nig08-A19;Clade III)__ADU56619__SP-IgE_NP(2-569)
auggacuggaccuggauccuguuccugguggccgccgccaccagagugcacagcagcgccagcaaggaggugaagagcuuccuguggacccagagccugagaagagagcugagcggcuacugcagcaacaucaagcugcagguggugaaggacgcccaggcccugcugcacggccuggacuucagcgaggugagcaacgugcagagacugaugagaaagcagaagagagacgacggcgaccugaagagacugagagaccugaaccaggccgugaacaaccugguggagcugaagagcacccagcagaagagcgugcugagagugggcacccugagcagcgacgaccugcuggugcuggccgccgaccuggagaagcugaagagcaagguggugagaaccgagagaccccugagcagcggcaucuacaugggcaaccugagcagccagcagcuggaccagagaaaggcccugcugaacaugaucggcaugaccggcggcaacggcggcagaaacaccaccagcgacggcaucgugagagugugggacgugaagaacgccgagcugcugaacaaccaguucggcaccaugcccagccugacccuggccugccugaccaagcagggccagguggaccugaacgacgccgugcaggcccugaccgaccugggccugaucuacaccgccaaguaccccaacagcagcgaccuggacagacuggcccagagccaccccauccugaacaugaucgacaccaagaagagcagccugaacaucagcggcuacaacuucagccugggcgccgccgugaaggccggcgccugcaugcuggacggcggcaacaugcuggagaccaucaaggugagcccccagaccauggacggcauccugaagagcauccugaaggugaagagaagccugggcauguucaucagcgacacccccggcgagagaaaccccuacgagaacauccuguacaagaucugccugagcggcgacggcuggcccuacaucgccagcagaaccagcaucgugggcagagccugggagaacaccgugguggaccuggagagcgacaacaagccccagaagaccggcaacggcggcagcaacaagagccugcagagcgccggcuucgccgccggccugaccuacagccagcugaugacccugaaggacagcaugcugcagcuggaccccaacgccaagaccuggauggacaucgagggcagacccgaggaccccguggagaucgcccuguaccagcccagcagcggcugcuacauccacuucuucagagagcccaccgaccugaagcaguucaagcaggacgccaaguacagccacggcaucgacgugaccgaccuguucgccgcccagcccggccugaccagcgccgugaucgaggcccugcccagaaacauggugaucaccugccagggcagcgaggacaucagaaagcugcuggagagccagggcagaagagacaucaagcugaucgacaucagccugagcaagguggacagcagaaaguucgagaacgccgugugggaccaguucaaggaccugugccacaugcacaccggcaucgugguggagaagaagaagagaggcggcaaggaggagaucaccccccacugcgcccugauggacugcaucauguucgacgccgccgugagcggcggcguggacgccaaggugcugagagccgugcugcccagagacaugguguucagaaccagcacccccaagguggugcuguga

SEQ ID NO: 20781 - RNA, 1761 nt, Artificial Sequence
  derived and/or modified CDS sequence (opt4) from LASV(G1180-SLE-2010;Clade IV)__AIT17169__SP-IgE_NP(2-569)
auggacuggaccuggauccuguuccugguggccgccgccaccagagugcacagcagcgccagcaaggagaucaagagcuuccuguggacccagagccugagaagagagcugagcggcuacugcagcaacaucaagcugcagguggugaaggacgcccaggcccugcugcacggccuggacuucagcgaggugagcaacgugcagagacugaugagaaaggagagaagagacgacaacgaccugaagagacugagagaccugaaccaggccgugaacaaccugguggagcugaagagcacccagcagaagagcauccugagagugggcacccugaccagcgacgaccugcugauccuggccgccgaccuggagaagcugaagagcaaggugaucagaaccgagagaccccugagcgccggcguguacaugggcaaccugagcagccagcagcuggaccagagaagagcccugcugagcaugaucggcaugagcagcggcaaccagagagcccaggccggcagagacggcguggugagagugugggacgugaagaacguggagcugcugaacaaccaguucggcaccaugcccagccugacccuggccugccugaccaagcagggccagguggaccugaacgacgccgugcaggcccugaccgaccugggccugaucuacaccgccaaguaccccaacaccagcgaccuggacagacugacccagagccaccccauccugaacaugaucgacaccaagaagagcagccugaacaucagcggcuacaacuucagccugggcgccgccgugaaggccggcgccugcaugcuggacggcggcaacaugcuggagaccaucaaggugagcccccagaccauggacggcauccugaagagcauccugaaggugaagaaggcccugggcauguucaucagcgacacccccggcgagagaaaccccuacgagaacauccuguacaagaucugccugagcggcgacggcuggcccuacaucgccagcagaaccagcaucaccggcagagccugggagaacaccgugguggaccuggagagcgacggcaagccccagaaggccggcagcaacaacagcaacaagagccugcagagcgugggcuucaccgccggccugaccuacagccagcugaugacccugaaggacgccaugcugcagcuggaccccaacgccaagaccuggauggacaucgagggcagacccgaggaccccguggagaucgcccuguaccagcccagcagcggcugcuacauccacuucuucagagagcccaccgaccugaagcaguucaagcaggacgccaaguacagccacggcaucgacgugaccgaccuguucgccgcccagcccggccugaccagcgccgugaucgacgcccugcccagaaacauggugaucaccugccagggcagcgacgacaucagaaagcugcuggagagccagggcagaaaggacaucaagcugaucgacaucgcccugagcaagaccgacagcagaaaguacgagaacgccgugugggaccaguacaaggaccugugccacaugcacaccggcguggugguggagaagaagaagagaggcggcaaggaggagaucaccccccacugcgcccugauggacugcaucauguucgacgccgccgugagcggcggccugaacaccagcgugcugagagccgugcugcccagagacaugguguucagaaccagcacccccagaguggugcuguga

SEQ ID NO: 20782 - RNA, 1761 nt, Artificial Sequence
  derived and/or modified CDS sequence (opt4) from LASV(G1442-SLE-2011;Clade IV)__AIT17181__SP-IgE_NP(2-569)
auggacuggaccuggauccuguuccugguggccgccgccaccagagugcacagcagcgccagcaaggaggugaagagcuuccuguggacccagagccugagaagagagcugagcggcuacugcagcaacaucaagcugcagguggugaaggacgcccaggcccugcugcacggccuggacuucagcgaggugagcaacgugcagagacugaugagaaagcagagaagagacgacaacgaccugaagagacugagagaccugaaccaggccgugaacaaccugguggagcugaagagcacccagcagaagagcgugcugagagugggcacccugaccagcgacgaccugcuggugcuggccgccgaccuggagaagcugaagagcaaggugaucagaaccgagagaccccugagcgccggcguguacaugggcaaccugagcagccagcagcuggaccagagaagagcccugcugaacaugaucggcaugagcggcggcauccagggcaccagaaccggcagagacggcguggugagagugugggacgugaagaacgccgaccugcugaacaaccaguucggcaccaugcccagccugacccuggccugccugaccaagcagggccagguggaccugaacgacguggugcaggcccugaccgaccugggccugaucuacaccgccaaguaccccaacgccagcgaccuggacagacugacccagagccaccccauccugaacaugaucgacaccaagaagagcagccugaacaucagcggcuacaacuucagccugggcgccgccgugaaggccggcgccugcaugcuggacggcggcaacaugcuggagaccaucaaggugagcccccagaccauggacggcauccugaagagcauccugaaggugaagaagacccugggcauguucaucagcgacacccccggcgagagaaaccccuacgagaacauccuguacaagaucugccugagcggcgacggcuggcccuacaucgccagcagaaccagcaucaccggcagagccugggagaacaccgugguggaccuggagagcgacggcaagccccagaaggccggcagcaacaacagcaacaagagccugcagagcgccggcuucgccgccggccugaccuacagccagcugaugacccugaaggacgccaugcugcagcuggaccccaacgccaagaccuggauggacaucgagggcagacccgaggaccccguggagaucgcccuguaccagcccagcagcggcugcuacauccacuucuucagagagcccaccgaccugaagcaguucaagcaggacgccaaguacagccacggcaucgacgugaccgaccuguucgccgcccagcccggccugaccagcgccgugaucgaggcccugcccagaaacauggugaucaccugccagggcagcgacgacaucaagaagcugcuggagagccagggcagaaaggacaucaagcugaucgacaucgcccugagcaagaccgacagcagaaaguacgagaacgccgugugggaccaguacaaggaccugugccacaugcacaccggcguggugguggagaagaagaagagaggcggcaaggaggagaucaccccccacugcgcccugauggacugcaucauguucgacgccgccgugagcggcggccugaacacccuggugcugagagccgugcugcccagagacaugguguucagaaccagcacccccagaguggugcuguga

SEQ ID NO: 20783 - RNA, 1761 nt, Artificial Sequence
  derived and/or modified CDS sequence (opt4) from LASV(G3010-SLE-2013;Clade IV)__AIT17345__SP-IgE_NP(2-569)
auggacuggaccuggauccuguuccugguggccgccgccaccagagugcacagcagcgccagcaaggagaucaagagcuuccuguggacccagagccugagaagagagcugagcggcuacugcagcaacaucaagcugcagguggugaaggacgcccaggcccugcugcacggccuggacuucagcgaggugagcaacgugcagagacugaugagaaaggagagaagagacgacaacgaccugaagagacugagagaccugaaccaggccgugaacaaccugguggagcugaagagcacccagcagaagagcauccugagagugggcacccugaccagcgacgaccugcugauccuggccgccgaccuggagaagcugaagagcaaggugaccagaaccgagagaccccugagcgccggcguguacaugggcaaccugagcagccagcagcuggaccagagaagagcccugcugagcaugaucggcaugagcagcggcgugcagggcgccagagccggcagagacggcguggugagagugugggacgugaagaacgccgagcugcugaacaaccaguucggcaccaugcccagccugacccuggccugccugaccaagcagggccagguggaccugaacgacguggugcaggcccugaccgaccugggccugaucuacaccgccaaguaccccaacaccagcgaccuggacagacugacccagagccaccccauccugaacaugaucgacaccaagaagagcagccugaacaucagcggcuacaacuucagccugggcgccgccgugaaggccggcgccugcaugcuggacggcggcaacaugcuggagaccaucaaggugagcccccagaccauggacggcauccugaagagcauccugaaggugaagaaggcccugggcauguucaucagcgagacccccggcgagagaaaccccuacgagaacauccuguacaagaucugccugagcggcgacggcuggcccuacaucgccagcagaaccagcaucaccggcagagccugggagaacaccgugguggaccuggagagcgacggcaagccccagaaggccggcagcaacaacagcaacaagagccugcagagcgccggcuucaccgccggccugaccuacagccagcugaugacccugaaggacgccaugcugcagcuggaccccaacgccaagaccuggauggacaucgagggcagacccgaggaccccguggagguggcccuguaccagcccagcagcggcugcuacauccacuucuucagagagcccaccgaccugaagcaguucaagcaggacgccaaguacagccacggcaucgacgugaccgaccuguucgccgcccagcccggccugaccagcgccgugaucgacgcccugcccagaaacauggugaucaccugccagggcagcgacgacaucaagaagcugcuggagagccagggcagaaaggacaucaagcugaucgacaucgcccugagcaagaccgacagcagaaaguacgagaacgccgugugggaccaguacaaggaccugugccacaugcacaccggcguggugguggagaagaagaagagaggcggcaaggaggagaucaccccccacugcgcccugauggacugcaucauguucgacgccgccgugagcggcggccugaacaccagcgugcugagagccgugcugcccagagacaugguguucagaaccagcacccccagaguggugcuguga

SEQ ID NO: 20784 - RNA, 1761 nt, Artificial Sequence
  derived and/or modified CDS sequence (opt4) from LASV(G502-SLE-2009;Clade IV)__AIT17127__SP-IgE_NP(2-569)
auggacuggaccuggauccuguuccugguggccgccgccaccagagugcacagcagcgccagcaaggagaucaagagcuuccuguggacccagagccugagaagagagcugagcggcuacugcagcaacaucaagcugcagguggugaaggacgcccaggcccugcugcacggccuggacuucagcgaggugagcaacgugcagagacugaugagaaaggagagaagagacgacaacgaccugaagagacugagagaccugaaccaggccgugaacaaccugguggagcugaagagcacccagcagaagagcauccugagagugggcacccugaccagcgacgaccugcugauccuggccgccgaccuggagaagcugaagagcaaggugaucagaaccgagagaccccugagcgccggcguguacaugggcaaccugagcagccagcagcuggaccagagaagagcccugcugagcaugaucggcaugagcggcggcaaccagggcgugagagccggcaaggacggcguggugagagugugggacgugaagaacgccgagcugcugaacaaccaguucggcaccaugcccagccugacccuggccugccugaccaagcagggccagguggaccugaacgacgccgugcaggcccugaccgaccugggccugaucuacaccgccaaguaccccaacaccagcgaccuggacagacugacccagagccaccccauccugaacaugaucgacaccaagaagagcagccugaacaucagcggcuacaacuucagccugggcgccgccgugaaggccggcgccugcaugcuggacggcggcaacaugcuggagaccaucaaggugagcccccagaccauggacggcauccugaagagcauccugaaggugaagaaggcccugggcauguucaucagcgacacccccggcgagagaaaccccuacgagaacauccuguacaagaucugccugagcggcgacggcuggcccuacaucgccagcagaaccagcaucaccggcagagccugggagaacaccgugguggaccuggagagcgacggcaagccccagaaggccggcagcaacaacagcaacaagagccugcagagcgccggcuucaccgccggccugaccuacagccagcugaugacccugaaggacgccaugcugcagcuggaccccaacaccaagaccuggauggacaucgagggcagacccgaggaccccguggagaucgcccuguaccagcccagcagcggcugcuacauccacuucuucagagagcccaccgaccugaagcaguucaagcaggacgccaaguacagccacggcaucgacgugaccgaccuguucgccgcccagcccggccugaccagcgccgugaucgacgcccugcccagaaacauggugaucaccugccagggcagcgacgacaucagaaagcugcuggagagccagggcagaaaggacaucaagcugaucgacaucgcccugaacaagaccgacagcagaaaguacgagaacgccgugugggaccaguacaaggaccugugccacaugcacaccggcguggugguggagaagaagaagagaggcggcaaggaggagaucaccccccacugcgcccugauggacugcaucauguucgacgccgccgugagcggcggccugaacaccagcgugcugagagccgugcugcccagagacaugguguucagaaccagcacccccagaguggugcuguga

SEQ ID NO: 20785 - RNA, 1761 nt, Artificial Sequence
  derived and/or modified CDS sequence (opt4) from LASV(G733-SLE-2010;Clade IV)__AIT17155__SP-IgE_NP(2-569)
auggacuggaccuggauccuguuccugguggccgccgccaccagagugcacagcagcgccagcaaggagaucaagagcuuccuguggacccagagccugagaagagagcugagcggcuacugcagcaacaucaagcugcagguggugaaggacgcccaggcccugcugcacggccuggacuucagcgaggugagcaacgugcagagacugaugagaaaggagagaagagacgacaacgaccugaagagacugagagaccugaaccaggccgugaacaaccugguggagcugaagagcacccagcagaagagcgugcugagagugggcacccugaccagcgacgagcugcuggugcuggccgccgaccuggagaagcugaagagcaaggugaucagaaccgagagaccccugagcgccggcguguacaugggcaaccugagcagccagcagcuggaccagagaagagcccugcugagcaugaucggcaugagcggcggcaaccagggcgccagaaccggcagagacggcguggugagagugugggacgugaagaacgccgagcugcugaacaaccaguucggcaccaugcccagccugacccuggccugccugaccaagcagggccagguggaccugaacgacgccgugcaggcccugaccgaccugggccugaucuacaccgccaaguaccccaacaccagcgaccuggacagacugacccagagccaccccauccugaacaugaucgacaccaagaagagcagccugaacaucagcggcuacaacuucagccugggcgccgccgugaaggccggcgccugcaugcuggacggcggcaacaugcuggagaccaucaaggugagcccccagaccauggacggcauccugaagagcauccugaaggugaagaaggcccugggcauguucaucagcgacacccccggcgagagaaaccccuacgagaacauccuguacaagaucugccugagcggcgacggcuggcccuacaucgccagcagaaccagcaucaccggcagagccugggagaacaccgugguggaccuggagagcgacggcaagccccagaaggccggcagcaacaacagcaacaagagccugcagagcgccggcuucaccgccggccugaccuacagccagcugaugacccugaaggacgccaugcugcagcuggaccccaacgccaagaccuggauggacaucgagggcagacccgaggaccccguggagaucgcccuguaccagcccagcagcggcugcuacauccacuucuucagagagcccaccgaccugaagcaguucaagcaggacgccaaguacagccacggcaucgacgugaccgaccuguucgccgcccagcccggccugaccagcgccgugaucgacgcccugcccagaaacauggugaucaccugccagggcagcgacgacaucagaaagcugcuggagagccagggcagaaaggacaucaagcugaucgacaucgcccugagcaagaucgacagcagaaaguacgagaacgccgugugggaccaguacaaggaccugugccacaugcacaccggcguggugguggagaagaagaagagaggcggcaaggaggagaucaccccccacugcgcccugauggacugcaucauguucgacgccgccgugagcggcggccugaacagccuggugcugagagccgugcugcccagagacaugguguucagaaccagcacccccagaguggugcuguga

SEQ ID NO: 20786 - RNA, 1761 nt, Artificial Sequence
  derived and/or modified CDS sequence (opt4) from MOPV/LASV reassortant(IGS-1;Clade IV)__AFY05578__SP-IgE_NP(2-569)
auggacuggaccuggauccuguuccugguggccgccgccaccagagugcacagcagcgccagcaaggagaucaagagcuuccuguggacccagagccugagaagagagcugagcggcuacugcagcaacaucaagcugcagguggugaaggacgcccaggcccugcugcacggccuggacuucagcgaggugagcaacgugcagagacugaugagaaaggagagaagagacgacaacgaccugaagagacugagagaccugaaccaggccgugaacaaccugguggagcugaagagcacccagcagaagagcauccugagagugggcacccugaccagcgacgaccugcugauccuggccgccgaccuggagaagcugagaagcaaggugaucagaaccgagagaccccugagcgccggcguguacaugggcaaccugagcagccagcagcuggaccagagaagagcccugcugaacaugaucggcaugagcggcggcaaccagggcgccagagccggcagagacggcguggugagagugugggacgugaagaacgccgagcugcugagcaaccaguucggcaccaugcccagccugacccuggccugccugaccaagcagggccagguggaccugaacgacgccgugcaggcccugaccgaccugggccugaucuacaccgccaaguaccccaacaccagcgaccuggacagacugacccagagccaccccauccugaacaugaucgacaccaagaagagcagccugaacaucagcggcuacaacuucagccugggcgccgccgugaaggccggcgccugcaugcuggacggcggcaacaugcuggagaccaucaaggugagcccccagaccauggacggcauccugaagagcauccugaaggugaagaaggcccugggcauguucaucagcgacacccccggcgagagaaaccccuacgagaacauccuguacaagaucugccugagcggcgacggcuggcccuacaucgccagcagaaccagcaucaccggcagagccugggagaacaccgugguggaccuggagagcgacggcaagccccagaaggccgacagcaacaacagcagcaagagccugcagagcgccggcuucaccgccggccugaccuacagccagcugaugacccugaaggacgccaugcugcagcuggaccccaacgccaagaccuggauggacaucgagggcagacccgaggaccccguggagaucgcccuguaccagcccagcagcggcugcuacauccacuucuucagagagcccaccgaccugaagcaguucaagcaggacgccaaguacagccacggcaucgacgugaccgaccuguucgccacccagcccggccugaccagcgccgugaucgacgcccugcccagaaacauggugaucaccugccagggcagcgacgacaucagaaagcugcuggagagccagggcagaaaggacaucaagcugaucgacaucgaccugagcaagaccgacagcagaaaguacgagaacgccgugugggaccaguacaaggaccugugccacaugcacaccggcguggugguggagaagaagaagagaggcggcaaggaggagaucaccccccacugcgcccugauggacugcaucauguucgacgccgccgugagcggcggccugaacaccagcgugcugagagccgugcugcccagagacaugguguucagaaccagcacccccagaguggugcuguga

SEQ ID NO: 20787 - RNA, 1761 nt, Artificial Sequence
  derived and/or modified CDS sequence (opt4) from LASV(LM765-SLE-2012;Clade IV)__AIT17815__SP-IgE_NP(2-569)
auggacuggaccuggauccuguuccugguggccgccgccaccagagugcacagcagcgccagcaaggagaucaagagcuuccuguggacccagagccugagaagagagcugagcggcuacugcagcaacaucaagcugcagguggugaaggacgcccaggcccugcugcacggccuggacuucagcgaggugagcaacgugcagagacugaugagaaaggagagaagagacgacaacgaccugaagagacugagagaccugaaccaggccgugaacaaccugguggagcugaagagcacccagcagaagagcauccugagagugggcacccugaccagcgacgaccugcugauccuggccgccgaccuggagaagcugaagagcaaggugaccagaaccgagagaccccugagcgccggcguguacaugggcaaccugagcagccagcagcuggaccagagaagagcccugcuggacaugaucggcaugagcggcagcaaccagggcgccagagccggcagagacggcguggugagagugugggacgugaagaacgccgagcugcugaacaaccaguucggcaccaugcccagccugacccuggccugccugaccaagcagggccagguggaccugaacgacgccgugcaggcccugaccgaccugggccugaucuacaccgccaaguaccccaacaccagcgaccuggacagacugacccagagccaccccauccugaacaugaucgacaccaagaagagcagccugaacaucagcggcuacaacuucagccugggcgccgccgugaaggccggcgccugcaugcuggacggcggcaacaugcuggagaccaucaaggugagcccccagaccauggacggcauccugaagagcauccugaaggugaagaaggcccugggcauguucaucagcgacgcccccggcgagagaaaccccuacgagaacauccuguacaagaucugccugagcggcgacggcuggcccuacaucgccagcagaaccagcaucaccggcagagccugggagaacaccgugguggaccuggagagcgacggcaagccccagaaggccggcagcaacggcagcaacaagagccugcagagcgccggcuucaccgccggccugaccuacagccagcugaugacccugaaggacgccaugcugcagcuggaccccaacgccaagaccuggauggacaucgagggcagacccgaggaccccguggagaucgcccuguaccagcccagcagcggcugcuacauccacuucuucagagagcccaccgaccugaagcaguucaagcaggacgccaaguacagccacggcaucgacgugaccgaccuguucgccgcccagcccggccugaccagcgccgugaucgacgcccugcccagaaacauggugaucaccugccagggcagcgacgacaucagaaagcuguucgagagccagggcagaaaggacaucaagcugaucgacaucgcccugagcaagaccgacagcagaaaguacgagaacgccgugugggaccaguacaaggaccugugccacaugcacaccggcaucgugguggagaagaagaagagaggcggcaaggaggagaucaccccccacugcgcccugauggacugcaucauguucgacgccgccgugagcggcggccugaacaccagcgugcugagagccgugcugcccagagacaugguguucagaaccagcacccccagaguggugcuguga

SEQ ID NO: 20788 - RNA, 1761 nt, Artificial Sequence
  derived and/or modified CDS sequence (opt4) from LASV(LM776-SLE-2012;Clade IV)__AIT17825__SP-IgE_NP(2-569)
auggacuggaccuggauccuguuccugguggccgccgccaccagagugcacagcagcgccagcaaggagaucaagagcuuccuguggacccagagccugagaagagagcugagcagcuacugcagcaacaucaagcugcagguggugaaggacgcccaggcccugcugcacggccuggacuucagcgaggugagcaacgugcagagacugaugagaaaggagagaagagacgacaacgaccugaagagacugagagaccugaaccaggccgugaacaaccugguggagcugaagagcacccagcagaagagcauccugagagugggcacccugaccagcgacgaccugcugauccuggccgccgaccuggagaagcugaagagcaaggugaccagaaccgagagaccccugagcgccggcguguacaugggcaaccugagcagccagcagcuggaccagagaagagcccugcugagcaugaucggcaugagcggcagcaaccagggcgccagagccggcagagacggcguggugagagugugggacgugaagaacgccgagcugcugaacaaccaguucggcaccaugcccagccugacccuggccugccugaccaagcagggccagguggaccugaacgacgccgugcaggcccugaccgaccugggccugaucuacaccgccaaguaccccaacaccagcgaccuggacagacugacccagagccaccccauccugaacaugaucgacaccaagaagagcagccugaacaucagcggcuacaacuucagccugggcgccgccgugaaggccggcgccugcaugcuggacggcggcaacaugcuggagaccaucaaggugagcccccagaccauggacggcauccugaagagcauccugaaggugaagaaggcccugggcauguucaucagcgacacccccggcgagagaaaccccuacgagaacauccuguacaagaucugccugagcggcgacggcuggcccuacaucgccagcagaaccagcaucaccggcagagccugggagaacaccgugguggaccuggagagcgacggcaagccccagaaggccggcagcaacaacagcaacaagagccugcagagcgccggcuucaccgccggccugaccuacagccagcugaugacccugaaggacgccaugcugcagcuggaccccaacgccaagaccuggauggacaucgagggcagacccgaggaccccguggagguggcccuguaccagcccagcagcggcugcuacauccacuucuucagagagcccaccgaccugaagcaguucaagcaggacgccaaguacagccacggcaucgacgugaccgaccuguucgccgcccagcccggccugaccagcgccgugaucgacgcccugcccagaaacauggugaucaccugccagggcagcgacgacaucagaaagcugcuggagagccagggcagaaaggacaucaagcugaucgacaucgcccugagcaagaccgacagcagaaaguacgagaacgccgugugggaccaguacaaggaccugugccacaugcacaccggcguggugguggagaagaagaagagaggcggcaaggaggagaucaccccccacugcgcccugauggacugcaucauguucgacgccgccgugagcggcggccugaacaccagcgugcugagagccgugcugcccagagacaugguguucagaaccagcacccccagaguggugcuguga

SEQ ID NO: 20789 - RNA, 1761 nt, Artificial Sequence
  derived and/or modified CDS sequence (opt4) from LASV(Mad39;Clade IV)__ANH09723__SP-IgE_NP(2-569)
auggacuggaccuggauccuguuccugguggccgccgccaccagagugcacagcagcgccagcaaggagaucaagagcuuccuguggacccagagccugagaagagagcugagcggcuacugcagcaacaucaagcugcagguggugaaggacgcccaggcccugcugcacggccuggacuucagcgaggugagcaacgugcagagacugaugagaaagcagagaagagacgacaacgaccugaagagacugagagaccugaaccaggccgugaacaaccugguggagcugaagagcacccagcagaagagcgugcugagagugggcacccugaccagcgacgaccugcugacccuggccgccgaccuggagaagcugaagagcaaggugaccagaaccgagagaccccugaccgccggcguguacaugggcaaccugagcagccagcagcuggaccagagaagagcccugcugaacaugaucggcaugagcggcggcaaccagggcgccagaaccggcagagacggcguggugagagugugggacgugaagaacgccgagcugcugaacaaccaguucggcaccaugcccagccugacccuggccugccugaccaagcagggccagguggaccugaacgacguggugcaggcccugaccgaccugggccugaucuacaccgccaaguaccccaacaccagcgaccuggacagacugacccagagccaccccauccugaacaugaucgacaccaacaagagcagccugaacaucagcggcuacaacuucagccugggcgccgccgugaaggccggcgccugcaugcuggacggcggcaacaugcuggagaccaucaaggugagcccccagaccauggacggcauccugaagagcauccugaaggugaagaagagccugggcauguucaucagcgacacccccggcgagagaaaccccuacgagaacauccuguacaagaucugccugagcggcgacggcuggcccuacaucgccagcagaaccagcaucaccggcagagccugggagaacaccgugguggaccuggagagcggcggcaagccccagaaggccggcagcaacaacagcaacaagagccugcagagcgccggcuucgccgccggccugaccuacagccagcugaugacccugaaggacgccaugcugcagcuggaccccaacgccaagaccuggauggacaucgagggcagacccgaggaccccguggagaucgcccuguaccagcccaucagcggcugcuacauccacuucuucagagagcccaccgaccugaagcaguucaagcaggacgccaaguacagccacggcaucgacgugaccgaccuguucgccgcccagcccggccugaccagcgccgugaucgaggcccugcccagaaacauggugaucaccugccagggcagcgacgacaucagaaagcuguucgagagccagggcagaaaggacaucaagcugaucgacaucgcccugagcaagaccgacagcagaaaguacgagaacgccgugugggaccaguacaaggaccugugccacaugcacaccggcguggugguggagaagaagaagaagggcggcaaggaggagaucaccccccacugcgcccugauggacugcaucauguucgacgccgccgugagcggcggccugaacacccuggugcugagagccgugcugcccagagacaugguguucagaaccagcacccccaagguggugcuguga

SEQ ID NO: 20790 - RNA, 1761 nt, Artificial Sequence
  derived and/or modified CDS sequence (opt4) from LASV(Z0947-SLE-2011;Clade IV)__AIT17841__SP-IgE_NP(2-569)
auggacuggaccuggauccuguuccugguggccgccgccaccagagugcacagcagcgccagcaaggagaucaagagcuuccuguggacccagagccugagaagagagcugagcggcuacugcagcaacaucaagcugcagguggugaaggacgcccaggcccugcugcacggccuggacuucagcgaggugagcaacgugcagagacugaugagaaaggagagaagagacgacaacgaccugaagagacugagagaccugaaccaggccgugaacaaccugguggagcugaagagcacccagcagaagagcauccugagagugggcacccugaccagcgacgaccugcugauccuggccgccgaccuggagaagcugaagagcaaggugaccagaaccgagagaccccugagcgccggcguguacaugggcaaccugagcagccagcagcuggaccagagaagagcccugcugaacaugaucggcaugagcggcagcaaccagggcgccagaaccggcagagacggcguggugagagugugggacgugaagaacgccgagcugcugaacaaccaguucggcaccaugcccagccugacccuggccugccugaccaagcagggccagguggaccugaacgacgccgugcaggcccugaccgaccugggccugaucuacaccgccaaguaccccaacaccagcgaccuggacagacugacccagagccaccccauccugaacaugaucgacaccaagaagagcagccugaacaucagcggcuacaacuucagccugggcgccgccgugaaggccggcgccugcaugcuggacggcggcaacaugcuggagaccaucaaggugagcccccagaccauggacggcauccugaagagcauccugaaggugaagaaggcccugggcauguucaucagcgacgcccccggcgagagaaaccccuacgagaacauccuguacaagaucugccugagcggcgacggcuggcccuacaucgccagcagaaccagcaucaccggcagagccugggagaacaccgugguggaccuggagagcgacggcaagccccagaaggccggcagcaacggcagcaacaagagccugcagagcgccggcuucaccgccggccugaccuacagccagcugaugacccugaaggacgccaugcugcagcuggaccccaacgccaagaccuggauggacaucgagggcagacccgaggaccccguggagaucgcccuguaccagcccagcagcggcugcuacauccacuucuucagagagcccaccgaccugaagcaguucaagcaggacgccaaguacagccacggcaucgacgugaccgaccuguucgccgcccagcccggccugaccagcgccgugaucgacgcccugcccagaaacauggugaucaccugccagggcagcgacgacaucagaaagcuguucgagagccagggcagaaaggacaucaagcugaucgacaucgcccugagcaagaccgacagcagaaaguacgagaacgccgugugggaccaguacaaggaccugugccacaugcacaccggcaucgugguggagaagaagaagagaggcggcaaggaggagaucaccccccacugcgcccugauggacugcaucauguucgacgccgccgugagcggcggccugaacaccagcgugcugagagccgugcugcccagagacaugguguucagaaccagcacccccagaguggugcuguga

SEQ ID NO: 20791 - RNA, 1761 nt, Artificial Sequence
  derived and/or modified CDS sequence (opt5) from LASV(Josiah;Clade IV)__NP_694869__SP-IgE_NP(2-569)
auggacuggaccuggauccuguuccucguggccgcugccacaagaguccacagcagcgccuccaaggagaucaaaucuuuccuguggacccagagccucagacgggaacuguccggcuacugcucuaacauuaagcugcaaguggucaaagacgcucaggcccugcuccacgggcuggauuuuagcgagguuuccaaugugcagcgccuuaugagaaaggaacggcgcgacgauaacgaccugaaaagacuccgggaucugaaucaggcggugaacaaucuggucgagcucaagucuacacaacaaaagagcauccugcgcgugggaacgcuuaccuccgacgaucugcucauucuggcugccgaccuugaaaaacuuaagagcaaaguuaucagaacagagcggccccucucugccggcguguauauggggaaccuguccagccagcagcuggaucagcgcagagcucuccugaauaugauuggaaugucuggcgggaaccagggagcccgggcuggccgcgacggcgucgugagaguuugggaugugaagaaugccgagcuucugaacaaucaguucgggaccaugccuucccucacacuggcgugucuuaccaaacagggacaagucgaccugaacgaugccgugcaggcucucacagaccugggccugaucuacaccgccaaguauccgaauacgagcgaccucgaucggcugacccagucucaucccauccuuaacaugauugacacaaagaaauccagccugaauaucuccggguacaacuuuucucucggagcugccgugaaggcgggcgccugcaugcuggaugggggaaacaugcuugaaaccauuaaagucagcccucaaacaauggacggcauccugaaguccauucucaaaguuaagaaagcucugggcauguucaucagcgauacccccggggagcgcaauccuuaugaaaacauucuguacaagaucugucucucuggagacggcuggcccuauaucgccuccagaacgagcauuacagggcgggcuugggagaauaccgugguggaucuggagucugacggaaagccucagaaagccgauagcaacaauuccucuaagagccuucaguccgccggcuuuacagcugggcugaccuacagccagcucaugacccugaaagacgcgaugcugcaacuugauccgaacgccaagacauggauggacaucgaaggaagacccgaggacccugucgaaauugcucucuaccagcccucuuccggcugcuauauccacuucuuucgcgagccuacggaucugaaacaguucaagcaggacgccaaguacagccauggcauugaugugaccgaccuguuugccacacaacccgggcucaccucugcuguuaucgaugcccugccgcggaauauggugaucacaugucagggauccgacgauauuagaaaacuucuggaaagccagggccgcaaggacaucaaacucauugauaucgcgcuguccaagaccgacucucggaaauaugagaacgcugucugggaucaguacaaggaccugugccacaugcauacgggggugguuguggagaagaaaaagagaggaggcaaagaagagauuacaccucacugugcccuuauggauugcaucauguucgacgccgcugucagcgggggccucaauaccuccgugcugcgcgccguccugccccgggacaugguguuuagaaccucuacaccucgcguugugcucuga

SEQ ID NO: 20792 - RNA, 1761 nt, Artificial Sequence
  derived and/or modified CDS sequence (opt5) from LASV(LP;Clade I)__AAF86702__SP-IgE_NP(2-569)
auggacuggaccuggauccuguuccucguggccgcugccacaagaguccacagcagcaacuccaaggagaucaaaucuuuccuguggacccagagccucagacgggaacuguccggcuacugcucuaauauuaagcuccaaguggucaaagacgcccaggcucugcuccacgggcuggauuuuagcgagguuuccaacgugcagcgccuuaugagaaagcagaaacgggacgaugccgaccugaagcgccucagagaucugaaucaagcggugaacaaucuggucgaacucaagucuacacagcagaaaaacgugcugcggguuggaacgcuuagcuccgacgaucugaucacccucgcugccgaccuggagaaacuuaaaagcaaggugauucgcacagaaagaccccugucuuccggcgucuauauggggaaucucagcucucagcaacuggaucagcggcgcgcccugcucuccaugaucggaaugagcggcgggccucagggaaacagaaccggcggcgacggggugguucgggugugggaugucaaaaaugcugagcugcuuaacaaucaguucggaacaaugccgucucugacccucgccugucugacaaagcaaggccagguggaccuuaacgaugcugugcaggcccugaccgaccucgggcugauuuacacggcgaaguaucccaauuccagcgaccuggauaugcucacccaaucccauccuauccugggaauggucgacacaaagaagucuagccuuaacaucuccggcuacaauuuuagccugggggccgcuguuaaagccggagcuugcaugcucgauggcggcaacaugcuggagaccauuaaggugucuccccagacaauggacgggauccuuaaauccauucugaaggugaaacgcagccucggaauguucaucucugauaccccuggcgaaagaaaccccuaugagaauauucuguacaagaucugucugagcggggaaggauggccuuauauugccucccggacgucuaucacaggccgcgcgugggagaacacccucgucgaccuggagagcgauaauaagccgcccaaacuuaacuccgccgggagcaauaagucucugcaggcugccggacucaacgcuggccugacauacucccagcugaugacccuuaaagacugcaugcuccaacuggauccuagcucuaagaccuggaucgacauugaaggcagacccgaggauccuguggaaaucgcccuguuucagcccuccagcggguguuacauucacuucuuucgggagccgacagaccucaaacaguucaagcaggacgccaaguauucccauggaaucgauguuacggaccuguuuucuacccaaccuggccuuacaagcgcugugauugaagcgcugcccagaaauaugguccuuaccugccagggguccgaugacaucaaaaagcugcuggagucucagggacgccgggauaucaaacuuauugacaucagccucuccaaggccgauagcagaaaauucgagaacgcugugugggaccaguacaaggaucugugucacaugcauacaggcguuguggucgaaaagaaaaagcgcgggggcaaagaggaaauuaccccucacugcgcccugcucgacuguaucauguuugaugccgcuacgacaggaucucugaauauuaccacccuucgggccgugcugcccagagacauggucuuccgcacauccacccccaaggugguucucuga

SEQ ID NO: 20793 - RNA, 1761 nt, Artificial Sequence
  derived and/or modified CDS sequence (opt5) from LASV(803213;Clade II)__AAF86704__SP-IgE_NP(2-569)
auggacuggaccuggauccuguuccucguggccgcugccacaagaguccacagcagcgccuccaaggaggugaaaucuuuccuguggacccagagccucagacgggaacuguccggcuacugcucuaacaucaaacuucaagucguuaaggacgcucaggcccugcuccacgggcuggauuuuagcgaggugaauaacgugcagcgccuuaugagaaagcagaaacgggacgauggagaccugaagcgccucagagaucugaaucaagcggucaacaaucugguggaacucaaguccacacagcagaaaucuauucugcggguuggcacgcuuaccagcgacgaucugcucacacuggcugccgaccuugagaagcugaaauccaaggugauccgcaccgaaagaccccucagcucuggggucuauaugggaaaccuguccacacagcaacuggagcagcggcgcgcccuccugaauaugauuggcauggugggaggagcucagggcacccagccuggcagagaugggguugugcgggucugggacgugaaaaacccggaucuucugaauaaccaauucggaacaaugcccagccucacccuggccugucuuacgaagcagggccagguggaccugaaugaugcuguccucgcccugaccgaccuggggcucaucuacacagcgaaguauccuaacucuuccgaccuggaucgccuuagccaaucucaucccauucugaauaugguugacaccaaaaaguccagccucaacaucuccggauacaauuuuucucugggcgccgcugugaaagccggggcuugcaugcuugauggaggcaacaugcuggagacaaucaaggugaccccucagacgauggacggcauucucaaaagcauccugaaggucaaaagaucccuggggauguucgugagcgauacacccggagaacggaacccuuaugagaauauucucuacaagaucugucugucuggcgacggguggccguauauugccucccgcaccagcaucguugggagagcgugggaaaacacaaccguggaucuugagucugacggcaagccccagaaagucgggaccgccggaagcaauaagucccugcagucugcuggcuuuccuacaggccucacguacagccaacugaugacccugaaagauuccaugaugcagcuugaccccagcgccaagacauggauugauaucgaggggcggccugaagaccccguggagaucgcucucuaccagccgaugucuggaugcuauauucacuucuuuagagaaccuaccgaccugaaacaguucaagcaagaugccaaguacucccauggcaucgacguugccgaucuguuucccgcucagccugggcucacaagcgcggugauugaggcccugccccgcaacaugguccuuaccugucagggaucugacgauaucaaaaagcugcucgacucccagggccggagagauauuaaacugaucgacaucagccuguccaagguggauucucgcaaauucgaaaaugcugucugggaccaaugcaaggaucuuugucacaugcauacgggggugguuguggagaagaaaaagcggggcggaaaagaggaaauuacaccccacugcgcccucauggacuguaucauguuugaugccgcugucagcggcgggcugaacauuccugugcugagagccguucucccgcgcgacaugguguuccggaccuccucucccaaggucgugcuguga

SEQ ID NO: 20794 - RNA, 1764 nt, Artificial Sequence
  derived and/or modified CDS sequence (opt5) from LASV(GA391;Clade III)__CAA36646__SP-IgE_NP(2-570)
auggacuggaccuggauccuguuccucguggccgcugccacaagaguccacagcagcgccuccaaggaggugagaucuuuccuguggacccagagccuccggcgcgaacuguccggcuacugcucuaacaucaaacuucaagucguuaaggacgcucaggcccugcuccacgggcuggauuuuagcgagguguccaaugugcagagacuuaugcggaaacagaagcgcgacgauggagaccugaaaagacuccgggaucugaaccaagcggucaauaaccugguggaacucaagucuacacagcagaaaagcguucugcgcgugggcacgcuuuccagcgacgaucugcucauucuggcugccgaccuugagaaacugaagucuaaagucaccagaacagaacggccccucuccagcgggguguauaugggaaaucugucuucccagcaacuggaucagcgcagagcccuccugaacaugaucggcaugaccgggguuagcggaggcggcaagggggcuucugacggaauugugcgggucugggaugugaaaaaugccgagcuucugaacaaucaguucggcacaaugccuucccucacccuggcuugucuuacaaagcaggggcaaguggaccugaacgaugccguccaggcgcucaccgaccugggacugaucuacacggccaaguauccgaauagcuccgaccucgaucgccugucucagagccaucccauucuuaacaugaucgacaccaaaaaguccagccugaauaucucuggcuacaacuuuucccucggggcugccguuaaagcuggagccugcaugcuggauggcggcaauaugcuugagacaauuaaggugagcccucaaaccauggacgggauccugaaaucuauucucaaggugaaaaagagccugggaauguucgucuccgauacacccggcgaaagaaacccuuaugagaacauccuguacaagauuugucucucuggggacggauggcccuauaucgcgagccggaccuccauugugggccgcgccugggaaaauacgguuguggaucuggagcaggacaacaaaccucagaagaucgggaauggaggcagcaacaaaucucuucaguccgcuggcuuugccgcugggcugacauacagccaacucaugacccugaaggauuucaaaugcuuuaaucugaucccgaacgccaagacauggauggacauugagggaagacccgaagauccugucgagaucgcccuuuaccagcccucuuccggcuguuaugugcacuucuuucgggaaccuaccgaccucaagcaguucaaacaggacgcuaaguacagccaugggauugauguuaccgaccuguuugcggcccaacccggacugacauccgcugugaucgaggcccucccgagaaauauggucauuacgugccagggcucugaagauauccgcaaacugcuugagagccaggggcggagagacaucaagcugauugauaucacccucuccaaagccgacucucgcaaguucgagaacgcugugugggaucaguuuaaggaccugugucacaugcauacaggcgucgugguugaaaagaagaaacggggaggcaaggaggaaauuaccccucacugcgcccugauggauuguaucauguucgacgcggcugugagcgggggacuugaugccaaaguccucagagugguucugccccgcgacaugguguuccggacauccaccccuaaggucgugcuguga

SEQ ID NO: 20795 - RNA, 1761 nt, Artificial Sequence
  derived and/or modified CDS sequence (opt5) from LASV(AV;Clade V)__CCA30315__SP-IgE_NP(2-569)
auggacuggaccuggauccuguuccucguggccgcugccacaagaguccacagcagcgccuccaaggaggugaaaucuuuccuguggacccagagccucagacgggaacuguccggcuacugcucuaacaucaaacuucaagucguuaaggacgcucaggcccugcuccacgggcuggauuuuagcgagguguccaaugugcagcgccuuaugagaaagcagcggcgcgacgauucugaccugaaaagacuccgggaucugaaccaagcggucaauaaccugguggaacucaagagcacacagcagaaguccguucugcgcgugggaacgcuuagcucugacgaucugcucacccuggcugccgaccuugagaaacugaaguccaaagucacaagaaccgaacggccccucagcucuggcguguauauggggaaucuguccagccagcaacuggaucagcgcagagcccuccugaaccuuauuggaaugacaaauggcucucaggggucccaggcuggacgggacggcguugugcgcgucugggaugugaagaacgccgagcugcucaauaaccaauucggcaccaugccuagccugacacuugcuugucugaccaaacagggacagguggaccucaaugaugucguucaagcccugacggaccuggggcucaucuacaccgcgaaguauccgaacacauccgaccuggauagacuuacccagucucaucccauucugaauaugaucgacacaaagaaaagcucccucaacauuagcggcuacaauuuuucucugggggccgcugugaaggccggagcuugcaugcuugauggcgggaacaugcuggagaccaucaaaguguccccucagagcauggacggaauccucaagucuauucugaaagucaagcgggcccugggcauguucgugagcgauacgcccggcgaacgcaacccuuaugagaauauccucuacaaaauuugucuguccggggacggauggcccuauaucgcgucuagaacaagcauuguuggccgggccugggaaaacaccguggucgaucuugagacagacgggaagccucagaagaucggauccggcaauagcaacaaaucucugcaauccgcuggguuuagcgccggacucaccuacucucagcugaugacccugaaggaugcuaugcuucagcucgacccgaaugccaaaacauggauggauauugagggcagacccgaagacccuguggagguugcccuguaccagcccaucuccggcugcuauauccacuucuuucgcgaaccuacggaccugaagcaauucaaacaggaugcuaaguacagccaugggauugacaucgcggaucucuuugccgcucagcccggacugaccuccgccgugauugaggcccuuccgcggaacauggucaucacaugucagggcucugaagacauuaagaaacugcucgagagccaagggagaaaggauaucaaacugaucgacauugcucuguccaagaucgauucucgcaaauucgagaaugccgugugggaccaguauaaggaucuuugccacaugcauaccggagucgugguugaaaagaaaaagcggggcgggaaagaggaaauuacaccucacugugcgcucauggacugcaucauguuugaugcugccgugagcggcggacugaacacccugguccucagagccgugcugccccgcgacaugguuuuccggacguccacaccuagagugguccuuuga

SEQ ID NO: 20796 - RNA, 1761 nt, Artificial Sequence
  derived and/or modified CDS sequence (opt5) from LASV(Togo/2016/7082;Clade VI)__AMR44578__SP-IgE_NP(2-569)
auggacuggaccuggauccuguuccucguggccgcugccacaagaguccacagcagcaacuccaaggaggugaaaucuuuccuguggacccagagccucagacgggaacuguccggcuacugcucuaauaucaaacuucaagucguuaaagacgcccaggcucugcuccacgggcuggauuuuagcgagguguccaacgugcagcgccuuaugagaaagcagaaacgggacgauggagaccugaagcgccucagagaucugaaucaagccgucaacaaucugguggaacucaagucuguucagcagaaaagcauucugcgggugggcacacuuacguccgacgaucugcucacccuggcggcugaccuugagaagcugaaaagcaaggucacacgcaccgaaagaccccucucuuccgggguguauaugggaaaccugagcucucagcaacuggaucagcggcgcgcccuccuguccaugaucggcaugagcgggggaaaucagaacucucagccuaaaggcgacggcguugugagagucugggaugugaagaaugccgaccuucugaacaaucaauucgggacaaugccgucccucacccuggcuugucuuacaaagcagggacagguggaucugaacgacgccguccaagcucucaccgaccugggccugauuuacacggccaaauaucccaauagcuccgaucucgaccggcugucucagagccauccuauccuuaacaugauugauaccaagaaauccagccugaauaucucuggguacaacuuuucccucggagcggccaucaagacaggcgcuugcaugcuggacgggggaaacaugcuugagaccauuaaaguuacaccccagaccauggauggcauccucaagagcauucugaaagugaagcgcucucugggcauguucaucagcgacacgccuggggagagaaaucccuaugaaaacauucuguacaagaucugucucuccggagauggcuggccuuauauugccucucggacagcuaucaucgggcgcgccugggagaauaccguggucgaccuggaaagcgauuccaaaccgcagaagauuggaagcaacggcucuaauaaaucccuucaaagcgcgggguuugcccccggacugacauacucucagcucaugacccugaaggacuccaugcugcagcuugauccuaacgcuaaaaccuggaucgacauugagggcagacccgaggacccuguggaaguugcccucuuccagcccaucagcggcugcuacauucacuuuuuccgggagccgacagaucugaagcaauuuaagcaggacgcuaaauauucccaugggaucgaugugacggaccuguucgccgcccagccuggacucaccucugcugucaucgaagcgcugcccagaaauauggugcuuacaugucagggcagcgaugacauuaagaaacugcucgauucccaagggcgccgggacaucaagcugauugauguuucucugaacaaaaucgacagcagaaaguuugagaaugccgugugggaucaguacaaggaccuuugccacaugcauaccggagucguggucgaaaagaagaaaaagggcgggaaagaggagauuacaccucacugugcucuccuggauugcaucauguucgacgccgccguguccggcggacugaacgcuaccguucuccgcgccgugcugccccgggacauggucuuuagaacgagcucucccaaggugguucuuuga

SEQ ID NO: 20797 - RNA, 1761 nt, Artificial Sequence
  derived and/or modified CDS sequence (opt5) from LASV(KAK-428;Clade n.d. (VII))__ANH09741__SP-IgE_NP(2-569)
auggacuggaccuggauccuguuccucguggccgcugccacaagaguccacagcagcaacuccaaggaggugaaaucuuuccuguggacccagagccucagacgggaacuguccggcuacugcacaaauaucaaacuucaagucguuaaggacgcccaggcucugcuccacgggcuggauuuuucugaggugagcaacgugcagcgccuuaugagaaagcagaaacgggacgauaaugaccugaagcgccucagagaucugaaccaagccgucaauaaccugguggaacucaaguccguucagcagaaaucugugcugaaggucggaacgcuuaauagcgacgaucugcucacccuggcggcugaccuugagaaacugaaguccaaagugguucggacagaacgcccccucagcucuggcguguauauggggaaccuguccagccagcaacuggaucagagacgggcccuccugaauaugauuggaauggccggcgggucucagggaaaccagccuucccgcgacggcgucgugagagugugggaugucaagaaugcugaccuucugaacaaucaauucggcaccaugccgagccucacacuggccugucuuaccaagcaggggcagguugaucugaacgacguggugcucgcucugacagaccugggacucaucuacaccgccaaauaucccaauucuuccgaucuggaccggcuuagccaaaaccauccuguccugaacaugauugaugugaauaaguccucucucaacaucagcggcuacaauuuuucccugggggcggccguuaaagcuggagccugcaugcuugacggcgggaacaugcuggagacgauuaagaucagcccccagaccguggauggaauccucaaaucuauucugaaggucaaacgcgcucugggcauguucguguccgacacaccuggcgagagaaaucccuaugaaaacauccucuacaagguuugucugagcgggaauggauggccuuauauugccucucggaccagcaucgugggccgcgcgugggagaacacagucguggaucuugaauccaauaagaaccagccgaaagucgggaauaacggaucuaauaagaugcugcagagcuccggcuuugccaccgggcucacguacagccaacugaugacacugagagacucuaugcuucagcucgaucccaccgcuaaaacauggauugacaucgagggacggccugaggaucccguggaacuggcccuguuccagccuuccagcggcugcuacauucacuuuuucagagagcccaccgaccucaagcaguuuaaacaagacgcuaaguauucucauggcaucgauguuaacgaccuguucuccgcccagccggggcuuaccagcgccgugcuggaagcucucccucgcaauaugguccugacaugucagggauccgaugacauccggaagcugcuugauucucaggacagaaaagauauuaagcucaucgacauuagccuguccaaagcggaugcccgcaaguuugagaacgacgugugggaucaauucaaagaccugugccacaugcauacgggcaucguuguggaaaagaagaaaaagggagggaaacaggagaugacaccccacugugcucuccuggauugcauuauguuugacgccgccgucucuggcgggcuuaacgugccuacccugcgggcugugcuccccaccgacaugguuuucagaacaaucaccacgaaggucgugcuguga

SEQ ID NO: 20798 - RNA, 1761 nt, Artificial Sequence; identical to SEQ ID NO: 20792
  derived and/or modified CDS sequence (opt5) from LASV(Pinneo-NIG-1969;Clade I)__AIT17837__SP-IgE_NP(2-569)

SEQ ID NO: 20799 - RNA, 1761 nt, Artificial Sequence
  derived and/or modified CDS sequence (opt5) from LASV(ISTH0009-NIG-2011;Clade II)__AIT17405__SP-IgE_NP(2-569)
auggacuggaccuggauccuguuccucguggccgcugccacaagaguccacagcagcguguccaaggaggucaaaucuuuccuguggacccagagccucagacgggaacuguccggcuacugcucuaacaucaaacuucaaguugugaaggacgcccaggcucugcuccacgggcuggauuuuagcgagguguccaauguccagcgccuuaugagaaagcagaaacgggacgauucugaccugaagcgccucagagaucugaaccaagccgugaauaaccugguugaacucaagagcacacagcagaaauccauucugcgggugggaacgcuuaccagcgacgaucugcucacacuggcggcugaccuugagaagcugaaaucuaaggucauccgcaccgaaagaccccucuccagcggcguguauauggggaaucugucuacacagcaacuggagcagcggcgcgcccuccugaacaugauuggaaugguuggcggggcccagggaacccagccuggcagagauggcgugguccgggugugggacgugaaaaauccggaucuucugaacaaucaauucgggacaaugcccucccucacccuggcuugucuuacgaagcagggacaggucgaccugaacgaugccguucucgcucugaccgaccugggccucaucuacacagccaaguauccuaauagcucugaccuggaucgccuuucccaaagccaucccauucugaacaugguggacaucaaaaaguccucucucaauaucagcggguacaacuuuucccugggagcggccgugaaagcuggcgccugcaugcuugaugggggaaauaugcuggagaccauuaaggucacaccucagaccauggacggcauccucaaaagcauucugaaggugaaaagaucucugggcauguucguuuccgauacgcccggggaacggaacccuuaugagaacauccucuacaagauuugucugagcggagacggcuggccguauaucgcuucucgcacaagcauuguggggagagccugggaaaauaccacagucgaucuugaguccgacggaaagccccagaaagugggcucugcggggagcaacaagucccugcagagcgccggauuuccuaccggccucaccuacucucaacugaugacacugaaagauuccaugaugcagcuugaccccagcgcuaagacguggaucgauaucgagggccggccugaagaccccguugagauugcccucuaccagccgaugucugggugcuauauccacuucuuuagagaaccuaccgaccugaaacaguucaagcaagaugcuaaguacucccauggaauugacguggccgaucuguuucccgcccagccuggccucacaagcgcugucaucgaggcgcugccccgcaauauggugcuuaccugucagggguccgacgauauuaaacggcugcucgacucucagggaagacgcgauaucaagcugaucgacauugcccugagcaaagcugauucccggagauucgaaaacgccgucugggaccaaugcaaggaucuuugucacaugcauacaggcgugguuguggagaaaaagaagcgcgggggcaaagaggaaaucacgccccacugcgcccucauggacuguauuauguaugaugcugccgucucuggaggccugaauaucccugugcugcgggcgguucucccgagagacaugguguuucgcaccagcucccccaaggucgugcuguga

SEQ ID NO: 20800 - RNA, 1761 nt, Artificial Sequence
  derived and/or modified CDS sequence (opt5) from LASV(ISTH2010-NIG-2012;Clade II)__AIT17483__SP-IgE_NP(2-569)
auggacuggaccuggauccuguuccucguggccgcugccacaagaguccacagcagcgccuccaaggaggugaaaucuuuccuguggacccagagccucagacgggaacuguccggcuacugcucuaacaucaaacuucaagucguuaaggacgcucaggcccugcuccacgggcuggauuuuagcgagguguccaaugugcagcgccuuaugagaaagcagaaacgggacgauucugaccugaagcgccucagagaucugaaccaagcggucaauaaccugguggaacucaagagcacacagcagaaauccauucugcggguuggaacgcuuaccagcgacgaucugcucacacuggcugccgaccuugagaagcugaaaucuaaggugauccgcaccgaaagaccccucuccagcggcgucuauauggggaaucugucuacacagcaacuggagcagcggcgcgcccuccugaaccuuauuggaauggugggcggggcucagggaacccagccuggcagagauggcguugugcgggucugggacgugaaaaauccggaucugcucaacaaucaauucgggacaaugcccucccugacccuugccugucugacgaagcagggacagguggaccucaacgaugcuguccuggcccugaccgaccucggccugaucuacacagcgaaguauccuaauagcucugaccuugaucgccugucccaaagccaucccauucucaacaugguugacaccaaaaaguccucucugaauaucagcggguuuaacuucucccuuggagccgcugugaaagccggcgcuugcaugcuggaugggggaaauaugcucgagacaaucaaggugaccccucagacgauggacggcauucugaaaagcauccugaaggucaaaaagucucucggcauguuuguguccgauacacccggggaaagaaacccuuacgagaacauucuguauaagaucugucuuagcggagacggcuggccguacauugccucucggaccagcaucguugggcgcgcgugggaaaauacaaccguggaucuggaguccgacggaaaaccccacaaggucggcaccgccgggucuaacaaaagccuccaguccgcuggauucccuacaggccugacguauagccagcugaugacccuuaaggauucuaugaugcaacucgaccccuccgccaaaacauggauugauaucgagggcagaccugaagaccccguggagaucgcucuguaccagccgaugagcgggugcuacauucacuuuuuccgggaaccuaccgaccugaagcaguuuaagcaggaugccaaauauucucauggaaucgacguugccgaucucuuccccgcucaaccuggccugacauccgcggugauugaggcccuucccagaaauaugguccugaccugucaggggagcgacgauaucaagcgccuccuggacucccagggacggagagauauuaaacugaucgacaucgcucuuucuaaggccgauagccgccgguuugaaaacgccgugugggaccagugcaaagaucucugucauaugcacacgggcgucgugguugagaagaagaaaagagggggcaaggaggaaauuacaccccacugcgcucugauggacuguaucauguacgaugccgcgguguccggaggccugaauauuccuguccuccgcgcugugcugccgcgggacaugguuuucagaaccucuagccccaaagugguccuuuga

SEQ ID NO: 20801 - RNA, 1761 nt, Artificial Sequence
  derived and/or modified CDS sequence (opt5) from LASV(Lassa virus/H.sapiens-wt/NGA/2015/ISTH_0543;Clade II)__AVO03640__SP-IgE_NP(2-569)
auggacuggaccuggauccuguuccucguggccgcugccacaagaguccacagcagcgccuccaaggaggugaaaucuuuccuguggacccagagccucagacgggaacuguccggcuacugcucuaacaucaaacuucaagucguuaaggacgcucaggcccugcuccacgggcuggauuuuagcgagguguccaaugugcagcgccuuaugagaaagcagaaacgggacgauucugaccugaagcgccucagagaucugaaccaagcggucaauaaccugguggaacucaagagcacacagcagaaauccauucugcggguuggaacgcuuaccagcgacgaucugcucacacuggcugccgaccuugagaagcugaaaucuaaggugauccgcaccgaaagaccccucuccagcggcgucuauauggggaaucugucuacacagcaacuggagcagcggcgcgcccuccugaacaugauuggaauggugggcggggcucagggaacccagccuggcagagauggcguugugcgggucugggacgugaaaaauccggaucuucugaacaaucaauucgggacaaugcccucccucacccuggccugucuuacgaagcagggacagguggaccugaacgaugcuguccucgcccugaccgaccugggccucaucuacacagcgaaguauccuaauagcucugaccuggaucgccuuucccaaagccaucccauucugaacaugguugacaccaaaaaguccucucucaauaucagcggguacaacuuuucccugggagccgcugugaaagccggcgcuugcaugcuugaugggggaaauaugcuggagacaaucaaggugaccccucagacgauggacggcauucucaaaagcauccugaaggucaaaaagucucugggcauguucguguccgauacacccggggaaagaaacccuuaugagaacauucucuacaagaucugucugagcggagacggcuggccguauauugccucucggaccagcaucguugggcgcgcgugggaaaauacaaccguggaucuugaguccgacggaaaaccccagaaggucggcucugccgggagcaacaaaucccugcagagcgcuggauuuccuaccggccucacauacucucaacugaugacgcugaaggauuccaugaugcagcuugaccccagcgccaaaaccuggauugauaucgagggcagaccugaagaccccguggagaucgcucucuaccagccgaugucugggugcuauauucacuucuuucgggaaccuacagaccugaagcaguucaagcaagaugccaaauacucccauggaaucgacguugccgaucuguuucccgcucagccuggccucaccagcgcggugauugaggcccugcccagaaauaugguccuuacaugucagggguccgacgauaucaagcgccugcucgacucucagggacggaaagauauuaagcugaucgacaucgcucugagcaaagccgauuccagacgcuucgaaaacgccgugugggaccaaugcaaggaucuuugucacaugcauaccggcgucgugguugagaagaaaaagagagggggcaaagaggaaauuacgccccacugcgcucucauggacuguaucauguaugaugccgcggugucuggaggccugaauauuccuguccugcgggcugugcucccgcgcgacaugguuuuucggacaagcucccccaaggugguccuguga

SEQ ID NO: 20802 - RNA, 1761 nt, Artificial Sequence
  derived and/or modified CDS sequence (opt5) from LASV(Lassa virus/H.sapiens-wt/NGA/2016/ISTH_0009;Clade II)__AVO03572__SP-IgE_NP(2-569)
auggacuggaccuggauccuguuccucguggccgcugccacaagaguccacagcagcgccuccaaggaggugaaaucuuuccuguggacccagagccucagacgggaacuguccggcuacugcucuaacaucaaacuucaagucguuaaggacgcucaggcccugcuccacgggcuggauuuuagcgagguguccaaugugcagcgccuuaugagaaagcagaaacgggacgauucugaccugaagcgccucagagaucugaaccaagcggucaauaaccugguggaacucaagagcacacagcagaaauccauucugcggguuggaacgcuuaccagcgacgaucugcucacacuggcugccgaccuugagaagcugaaaucuaaggugauccgcaccgaaagaccccucuccagcggcgucuauauggggaaucugucuacacagcaacuggagcagcggcgcgcccuccugaacaugauuggaauggugggcggggcucagggaacccagccuggcagagauggcguugugcgggucugggacgugaaaaauccggaucuucugaacaaucaauucgggacaaugcccucccucacccuggccugucuuacgaagcagggacagguggaccugaacgaugcuguccucgcccugaccgaccugggccucaucuacacagcgaaguauccuaauagcucugaccuggaucgccuuucccaaagccaucccauucugaacaugguugacaccaaaaaguccucucucaauaucagcggguacaacuuuucccugggagccgcugugaaagccggcgcuugcaugcuugaugggggaaauaugcuggagacaaucaaggugaccccucagacgauggacggcauucucaaaagcauccugaaggucaaaaagucucugggcauguucguguccgauacacccggggaaagaaacccuuaugagaacauucucuacaagaucugucugagcggagacggcuggccguauauugccucucggaccagcaucguugggcgcgcgugggaaaauacaaccguggaucuugaguccgacggaaaaccccagaaggucggcucugccgggagcaacaaaucccugcagagcgcuggauuuccuaccggccucacauacucucaacugaugacgcugaaggauuccaugaugcagcuugaccccagcgccaaaaccuggauugauaucgagggcagaccugaagaccccguggagaucgcucucuaccagccgaugucugggugcuauauucacuucuuucgggaaccuacagaccugaagcaguucaagcaagaugccaaauacucccauggaaucgacguugccgaucuguuucccgcucagccuggccucaccagcgcggugauugaggcccugcccagaaauaugguccuuacaugucagggguccgacgauaucaagcgccugcucgacucucagggacggagagauauuaaacugaucgacaucgcucugagcaaggccgauucccgccgguucgaaaacgccgugugggaccaaugcaaagaucuuugucacaugcauaccggcgucgugguugagaagaagaaaagagggggcaaggaggaaauuacgccccacugcgcucucauggacuguaucauguaugaugccgcggugucuggaggccugaauauuccuguccugcgcgcugugcucccgcgggacaugguuuuuagaacaagcucccccaaagugguccuguga

SEQ ID NO: 20803 - RNA, 1761 nt, Artificial Sequence
  derived and/or modified CDS sequence (opt5) from LASV(Lassa virus/H.sapiens-wt/NGA/2016/ISTH_0017;Clade II)__AVO03568__SP-IgE_NP(2-569)
auggacuggaccuggauccuguuccucguggccgcugccacaagaguccacagcagcgccuccaaggaggugaaaucuuuccuguggacccagagccucagacgggaacuguccggcuacugcucuagcaucaaacuucaagucguuaaggacgcucaggcccugcuccacgggcuggauuuuuccgaggugucuaacgugcagcgccuuaugagaaagcagaaacgggacgauagcgaccugaagcgccucagagaucugaaucaagcggucaacaaucugguggaacucaaguccacacagcagaaaagcauucugcggguuggaacgcuuaccucugacgaucugcucacacuggcugccgaccuugagaagcugaaauccaaggugauccgcaccgaaagaccccucagcucuggcgucuauauggggaaccuguccacacagcaacuggagcagcggcgcgcccuccugaauaugauuggaauggcuggcggggcccagggaacccagccuggcagagauggcgugguucgggugugggacgucaaaaacccggaucuucugaauaaccaauucgggacaaugcccagccucacccuggcuugucuuacgaagcagggacagguggaccugaaugaugccgugcucgcgcugaccgaccugggccucaucuacacagccaaguauccuaacucuuccgaccuggaucgccuuagccaaucccaucccauucugaauauggucgacaccaaaaagucuagccucaacaucuccggguacaauuuuagccugggagcugccguuaaagcuggcgccugcaugcuugaugggggaaacaugcuggagacaaucaaggugaccccucagacgauggacggcauucucaaaucuauccugaaggugaaaagaucccugggcauguucgucagcgaugcgcccggggaacggaauccuuaugagaacauucucuacaagaucugucugucuggagacggcuggccguauauugccagccgcacauccaucguggggagagcuugggaaaacaccacaguugaucuugagucugacggaaagccccagaaagugggcgccaccgggagcaauaagucccugcagagcgcuggauuuccuaccggccucacauacucucaacugaugacgcugaaagauuccaugaugcagcuugaccccagcgccaagaccuggauugauaucgagggccggccugaagaccccgucgagguggcccucuaccagccgguuucugggugcuauauccacuucuuuagagaaccuacagaccugaaacaguucaagcaagaugcuaaguacucccauggaauugacguggcggaucuguuucccgcccagccuggccucaccagcgcugucaucgaggcccugccccgcaacauggugcuuacaugucagggguccgacgauauuaaaaagcugcucgacucucagggacggaaagauaucaagcugauugacaucgcccugagcaaagcugauuccagacgcuucgaaaaugccgucugggaccaaugcaaggaucuuugucacaugcauaccggcgugguuguggagaagaaaaagagagggggcaaagaggaaaucacgccccacugcgcgcucauggacuguauuauguaugaugcugccgucucuggaggccugaacaucccugugcugcgggccguucucccgcgcgacaugguguuucggacaagcucccccaaggucgugcuguga

SEQ ID NO: 20804 - RNA, 1761 nt, Artificial Sequence
  derived and/or modified CDS sequence (opt5) from LASV(Lassa virus/H.sapiens-wt/NGA/2018/ISTH_0959;Clade II)__AVV65100__SP-IgE_NP(2-569)
auggacuggaccuggauccuguuccucguggccgcugccacaagaguccacagcagcgccuccaaggaggugaaaucuuuccuguggacccagagccucagacgggaacuguccggcuacugcucuaacaucaaacuucaagucguuaaggacgcucaggcccugcuccacgggcuggauuuuagcgagguguccaaugugcagcgccuuaugagaaagcagaaacgggacgauucugaccugaagcgccucagagaucugaaccaagcggucaauaaccugguggaacucaagagcacccagcagaaauccauucugcggguuggaacgcuuaccagcgacgaucugcucacacuggcugccgaccuugagaagcugaaaucuaaggugauccgcaccgaaagaccccucuccagcggcgucuauauggggaaucugucuacacagcaacuggagcagcggcgcgcccuccugaaccuuauuggaauggugggcggggcucagggaacccagccuggcagagauggcguugugcgggucugggacgugaaaaauccggaucugcucaacaaucaauucgggacaaugcccucccugacccuugccugucugacgaagcagggacagguggaccucaacgaugucguucuggcucugaccgaccucggccugaucuacacagccaaguauccuaauagcucugaccuugaucgccugucccaaagccaucccauucucaacaugguggacaccaaaaaguccucucugaauaucagcggguuuaacuucucccuuggagcggccgugaaagcuggcgccugcaugcuggaugggggaaauaugcucgagacaaucaaggucaccccucagacgauggacggcauucugaaaagcauccugaaggugaaaaagucucucggcauguuuguuuccgauacacccggggaaagaaacccuuacgagaacauucuguauaagaucugucuuagcggagacggcuggccguacauugcuucucggaccagcaucguggggcgcgccugggaaaauacaaccgucgaucuggaguccgacggaaaaccccacaaggugggcaccgcggggucuaacaaaagccuccaguccgccggauucccuacaggccugacguauagccagcugaugacccuuaaggauucuaugaugcaacucgaccccuccgcuaaaacauggauugauaucgagggcagaccugaagaccccguugagaucgcccuguaccagccgaugagcgggugcuacauucacuuuuuccgggaaccuaccgaccugaagcaguuuaagcaggaugcuaaauauucucauggaaucgacguggccgaucucuuccccgcccaaccuggccugacauccgcugucauugaggcgcuucccagaaauauggugcugaccugucaggggagcgacgauaucaagcgccuccuggacucccagggacggaaagauauuaagcugaucgacaucgcccuuucuaaaacggauagcagacgcuuugaaaacgcugucugggaccagugcaaggaucucugucauaugcacacaggcgugguuguggagaagaaaaagagagggggcaaagaggaaauuacaccccacugcgcccugauggacuguaucauguacgaugccgcugucuccggaggccugaauauuccugugcuccgggccguucugccgcgcgacaugguguuccggaccucuagccccaaggucgugcuuuga

SEQ ID NO: 20805 - RNA, 1761 nt, Artificial Sequence
  derived and/or modified CDS sequence (opt5) from LASV(LASV003-NIG-2008;Clade II)__AIT17581__SP-IgE_NP(2-569)
auggacuggaccuggauccuguuccucguggccgcugccacaagaguccacagcagcgccuccaaggaggugaaaucuuuccuguggacccagagccucagacgggaacuguccggcuacugcucuagcaucaaacuucaagucguuaaggacgcucaggcccugcuccacgggcuggauuuuuccgaggugucuaacgugcagcgccuuaugagaaagcagaaacgggacgauagcgaccugaagcgccucagagaucugaaucaagcggucaacaaucugguggaacucaaguccacccagcagaaaagcguucugcgggugggaacgcuuaccucugacgaucugcucacacuggcugccgaccuugagaagcugaaauccaaggucauucgcaccgaaagaccccucagcucuggcguguauauggggaaccuguccgcccagcaacuggagcagcggcgcacacuccugaauaugaucggaaugguuggcggggcucagggaacccagccuggcagagauggcgugguccgggugugggacgugaaaaacccggaucuucugaauaaccaauucgggacaaugcccagccucacccuggccugucuuacgaagcagggacaggucgaccugaaugauguugugcucgcucugaccgaccugggccucauuuacacagccaaguauccuaacucuuccgaccuggaucgccuuagccaaucccaucccauccugucuaugguggacaccaaaaagagcucccucaauauuagcggguacaacuuuucucugggagcggccgucaaagcuggcgccugcaugcuugaugggggaaauaugcuggagacaaucaaggugaccccucagacgauggacggcauccucaaauccauucugaagguuaaaaagagccugggcauguucgugucugauacacccggggaaagaaacccuuaugagaauauccucuacaagauuugucugagcggagacggcuggccguauaucgcuucccggaccucuauugucgggcgcgccugggaaaacacaaccguggaucuugagagcgacggaaaaccccagaagguuggcaccgcgggguccaacaaaagccugcagucugccggauuuccuacaggccucacguacucccaacugaugacccugaaggauagcaugaugcagcuugaccccucugcuaaaacauggaucgauauugagggcagaccugaagaccccguggagaucgcccucuaccagccgauguccgggugcuauauccacuucuuucgggaaccuaccgaccugaagcaguucaagcaagaugcuaaauacagccauggaauugacgucacagaucuguuucccgcccagccuggccucaccuccgccgugaucgaggcucugcccagaaauaugguccuuacgugucaggggucugacgauauuaagcgccugcucgacagccagggacggagagauaucaaacugauugacaucgcgcuguccaaggccgauucucgccgguucgaaaacgcugugugggaccaaugcaaagaucuuugucacaugcauacaggcguuguggucgagaagaagaaaagagggggcaaggaggaaaucacaccccacugcgcccucauggacuguauuauguaugaugccgcugugagcggaggccugaauaucccuguucugcgcgccgugcucccgcgggacauggucuuuagaaccuccagccccaaaguggugcuguga

SEQ ID NO: 20806 - RNA, 1761 nt, Artificial Sequence
  derived and/or modified CDS sequence (opt5) from LASV(LASV035-NIG-2009;Clade II)__AIT17589__SP-IgE_NP(2-569)
auggacuggaccuggauccuguuccucguggccgcugccacaagaguccacagcagcgccuccaaggaggugaaaucuuuccuguggacccagagccucagacgggaacuguccggcuacugcucuagcaucaaacuucaagucguuaaagacgcucaggcccugcuccacgggcuggauuuuuccgaggugucuaacgugcagcgccuuaugagaaagcagaaacgggacgauagcgaccugaagcgccucagagaucugaaucaagcggucaacaaucugguggaacucaaguccacacagcagaaaagcauucugcggguuggaacgcuuaccucugacgaucugcucacacuggcugccgaccuugagaagcugaaauccaaggugauccgcaccgaaagaccccucagcucuggcgucuauauggggaaccuguccgcccagcaacuggagcagcggcgcgcucuccugaauaugauuggaauggugggcggggcccagggaacacagccuggcagagauggcguugugcgggucugggacgugaaaaacccggaucuucugaauaaccaauucgggaccaugcccagccucacacuggcuugucuuaccaagcagggacagguggaccugaaugaugccguccucgcgcugacggaccugggccucaucuacaccgccaaguauccuaacucuuccgaccuggaucgccuuagccaaucccaucccauucugaauaugguugacacaaagaagucuagccucaacaucuccggguacaauuuuagccugggagcugccgugaaagcuggcgccugcaugcuugaugggggaaacaugcuggagaccaucaaggugacaccucagaccauggacggcauucucaaaucuauccugaaggucaaaagaucccugggcauguucgugagcgauacgcccggggaacggaauccuuaugagaacauucucuacaagaucugucugucuggagacggcuggccguauauugcgagccgcacauccaucguugggagagccugggaaaacaccacaguggaucuugagucugacggaaagccccagaaagucggcaccaccgggagcaauaagucccugcagagcgcuggauuuccuacaggccucacguacucucaacugaugacccugaaagauuccaugaugcagcuugaccccagcgccaagacauggauugauaucgagggccggccugaagaccccguggagaucgcucucuaccagccgaugucugggugcuauauucacuucuuuagagaaccuaccgaccugaaacaguucaagcaagaugccaaguacucccauggaaucgacguugccgaucuguuucccgcucagccuggccucacaagcgcggugauugaggcccugccccgcaacaugguccuuaccugucagggguccgacgauaucaaaaagcugcucgacucucagggacggagagauauuaaacugaucgacaucgcucugagcaaggccgauucccgcaaauucgaaaaugccgugugggaccaaugcaaggaucuuugucacaugcauacgggcgucgugguugagaagaaaaagagagggggcaaagaggaaauuacaccccacugcgcucucauggacuguaucauguaugaugccgcggugucuggaggccugaacauuccuguccugcgggcugugcucccgcgcgacaugguuuuucggaccagcucccccaaggugguccuguga

SEQ ID NO: 20807 - RNA, 1761 nt, Artificial Sequence
  derived and/or modified CDS sequence (opt5) from LASV(LASV1000-NIG-2009;Clade II)__AIT17783__SP-IgE_NP(2-569)
auggacuggaccuggauccuguuccucguggccgcugccacaagaguccacagcagcgccuccaaggaggugaaaucuuuccuguggacccagagccucagacgggaacuguccggcuacugcucuaacaucaaacuucaagucguuaaggacgcucaggcccugcuccacgggcuggauuuuagcgagguguccaaugugcagcgccuuaugagaaagcagaaacgggacgauucugaccugaagcgccucagagaucugaaccaagcggucaauaaccugguggaacucaagagcacacagcagaaauccauucugcggguuggaacgcuuaccagcgacgaucugcucacacuggcugccgaccuugagaagcugaaaucuaaggugauccgcaccgaaagaccccucuccagcggcgucuauauggggaaucugucuacacagcaacuggagcagcggcgcgcccuccugaacaugauuggaauggugggcggggcucagggaacccagccuggcagagauggcguugugcgggucugggacgugaaaaauccggaucuucugaacaaucaauucgggacaaugcccucccucacccuggccugucuuacgaagcagggacagguggaccugaacgaugucguucucgcucugaccgaccugggccucaucuacacagccaaguauccuaauagcucugaccuggaucgccuuucccaaagccaucccauucugaacaugguggacaccaaaaaguccucucucaauaucagcggguacaacuuuucccugggagcggccgugaaagcuggcgccugcaugcuugaugggggaaauaugcuggagacaaucaaggucaccccucagacgauggacggcauucucaaaagcauccugaaggugaaaaagucucugggcauguucguuuccgauacacccggggaaagaaacccuuaugagaacauucucuacaagaucugucugagcggagacggcuggccguauauugcuucucggaccagcaucguggggcgcgccugggaaaauacaaccgucgaucuugaguccgacggaaaaccccagaaggugggcaccgcggggucuaacaaaagccugcaguccgccggauuuccuacaggccucacguacagccaacugaugacccugaaggauucuaugaugcagcuugaccccuccgcuaaaacauggauugauaucgagggcagaccugaagaccccguugagaucgcccucuaccagccggugagcgggugcuauauucacuucuuucgggaaccuaccgaccugaagcaguucaagcaagaugcuaaauacucucauggaaucgacgucgccgaucuguuucccgcccagccuggccucacauccgcugugauugaggcgcugcccagaaauaugguccuuaccugucaggggagcgacgauaucaagcgccugcucgacucccagggacggagagauauuaaacugaucgacaucgcccugucuaaggcugauagccgccgguucgaaaacgccgugugggaccaaugcaaagaucuuugucacaugcauacgggcguuguggucgagaagaagaaaagagggggcaaggaggaaauuacaccccacugcgcccucauggacuguaucauguaugaugcugccguguccggaggccugaauauuccuguucugcgcgcggugcucccgcgggacauggucuuuagaaccucuagccccaaaguggugcuguga

SEQ ID NO: 20808 - RNA, 1761 nt, Artificial Sequence
  derived and/or modified CDS sequence (opt5) from LASV(LASV221-NIG-2010;Clade II)__AIT17625__SP-IgE_NP(2-569)
auggacuggaccuggauccuguuccucguggccgcugccacaagaguccacagcagcgccuccaaggaggugaaaucuuuccuguggacccagagccucagacgggaacuguccggcuacugcucuagcaucaaacuucaagucguuaaggacgcucaggcccugcuccacgggcuggauuuuuccgaggugucuaacgugcagcgccuuaugagaaagcagcggcgcgacgauagcgaccugaaaagacuccgggaucugaaucaagcggucaacaaucugguggaacucaaguccacacagcaaaagagcauucugcgcguuggaacgcuuaccucugacgaucugcucacacuggcugccgaccuugagaaacugaaguccaaagugaucagaaccgaacggccccucagcucuggcgucuauauggggaaccuguccacacagcagcuggagcagcgcagagcccuccugaauaugauuggaauggugggcggggcucagggaacccagccuggccgggauggcguugugcgcgucugggacgugaagaacccggaucuucugaauaaccaauucgggacaaugcccagccucacccuggccugucuuacgaaacagggacagguggaccugaaugaugcuguccucgcccugaccgaccugggccucaucuacacagcgaaguauccuaacucuuccgaccuggauagacuuagccaaucccaucccauucugaauaugguugacaccaagaaaucuagccucaacaucuccggguacaauuuuagccugggagccgcugugaaggccggcgcuugcaugcuugaugggggaaacaugcuggagacaaucaaagugaccccucagacggucgacggcauucucaagucuauccugaaagugaagcggucccugggcauguucguuagcgauacacccggggaacgcaauccuuaugagaacauucucuacaaaaucugucugucuggagacggcuggccguauauugccagcagaaccuccaucguggggcgggcgugggaaaacacaaccgucgaucuugagucugacggaaagccccagaaggugggcaccgccgggagcaauaaaucccugcagagcgcuggauuuccuacaggccucacguacucucaacugaugacccugaaggauuccaugaugcagcuugaccccagcgccaaaacauggauugauaucgagggcagaccugaagaccccguugagaucgcucucuaccagccgaugucugggugcuauauucacuucuuucgcgaaccuaccgaccugaagcaguucaaacaagaugccaaguacucccauggaaucgacguggccgaucuguuucccgcucagccuggccucacaagcgcggucauugaggcccugccccggaacauggugcuuaccugucagggguccgacgauaucaagagacugcucgacucucagggacgccgggauauuaaacugaucgacaucgcucugagcaaggccgauuccagaaaauucgaaaaugccgucugggaccaaugcaaggaucuuugucacaugcauacgggcgugguuguggagaaaaagaagcgcgggggcaaagaggaaauuacaccccacugcgcucucauggacuguaucauguaugaugccgcggucucuggaggccugaacauuccugugcugcgggcuguucucccgagagacaugguguuucgcaccagcucccccaaggucgugcuguga

SEQ ID NO: 20809 - RNA, 1761 nt, Artificial Sequence
  derived and/or modified CDS sequence (opt5) from LASV(LASV237-NIG-2010;Clade II)__AIT17639__SP-IgE_NP(2-569)
auggacuggaccuggauccuguuccucguggccgcugccacaagaguccacagcagcgccuccaaggaggugaaaucuuuccuguggacccagagccucagacgggaacuguccggcuacugcucuaacaucaaacuucaagucguuaaggacgcucaggcccugcuccacgggcuggauuuuagcgagguguccaaugugcagcgccuuaugagaaagcagaaacgggacgauucugaccugaagcgccucagagaucugaaccaagcggucaauaaccugguggaacucaagagcacacagcagaaauccauucugcggguuggaacgcuuaccagcgacgaucugcucacacuggcugccgaccuugagaagcugaaaucuaaggugauccgcaccgaaagaccccucuccagcggcgucuauauggggaaucugucuacacagcaacuggagcagcggcgcgcccuccugaacaugauuggaauggugggcggggcucagggaacccagccuggcagagauggcguugugcgggucugggacgugaaaaauccggaucuucugaacaaucaauucgggacaaugcccucccucacccuggccugucuuacgaagcagggacagguggaccugaacgaugcuguccucgcccugaccgaccugggccucaucuacacagcgaaguauccuaauagcucugaccuggaucgccuuucccaaagccaucccauucugaacaugguugacaucaaaaaguccucucucaauaucagcggguacaacuuuucccugggagccgcugugaaagccggcgcuugcaugcuugaugggggaaauaugcuggagaccauuaaggugacaccucagaccauggacggcauccucaaaagcauucugaaggucaaaagaucucugggcauguucguguccgauacgcccggggaacggaacccuuaugagaacauccucuacaagauuugucugagcggagacggcuggccguauaucgccucucgcacaagcauuguugggagagcgugggaaaauaccacaguggaucuugaguccgacggaaagccccagaaagucggcucugccgggagcaacaagucccugcagagcgcuggauuuccuaccggccucaccuacucucaacugaugacacugaaagauuccaugaugcagcuugaccccagcgccaagacguggaucgauaucgagggccggccugaagaccccguggagauugcucucuaccagccgaugucugggugcuauauccacuucuuuagagaaccuaccgaccugaaacaguucaagcaagaugccaaguacucccauggaauugacguugccgaucuguuucccgcucagccuggccucacaagcgcggugaucgaggcccugccccgcaauaugguccuuaccugucagggguccgacgauauuaaacggcugcucgacucucagggaagacgcgauaucaagcugaucgacauugcucugagcaaagccgauucccggagauucgaaaacgccgugugggaccaaugcaaggaucuuugucacaugcauacaggcgucgugguugagaaaaagaagcgcgggggcaaagaggaaaucacgccccacugcgcucucauggacuguauuauguaugaugccgcggugucuggaggccugaauaucccuguccugcgggcugugcucccgagagacaugguuuuucgcaccagcucccccaaggugguccuguga

SEQ ID NO: 20810 - RNA, 1761 nt, Artificial Sequence
  derived and/or modified CDS sequence (opt5) from LASV(LASV253-NIG-2011;Clade II)__AIT17671__SP-IgE_NP(2-569)
auggacuggaccuggauccuguuccucguggccgcugccacaagaguccacagcagcgccuccaaggaggugaaaucuuuccuguggacccagagccucagacgggaacuguccggcuacugcucuagcaucaaacuucaagucguuaaggacgcucaggcccugcuccacgggcuggauuuuuccgaggugucuaacgugcagcgccuuaugagaaagcagaaacgggacgauagcgaccugaagcgccucagagaucugaaucaagcggucaacaaucugguggaacucaaguccacccagcagaaaagcguucugcgggugggaacgcuuaccucugacgaucugcucacacuggcugccgaccuugagaagcugaaauccaaggucauucgcaccgaaagaccccucagcucuggcguguauauggggaaccuguccacacagcaacuggagcagcggcgcgcccuccugaauaugaucggaaugguuggcggggcucagggaacccagccuggcagagauggcgugguccgggugugggacgugaaaaacccggaucuucugaauaaccaauucgggacaaugcccagccucacccuggccugucuuacgaagcagggacaggucgaccugaaugauguugugcucgcucugaccgaccugggccucauuuacacagccaaguauccuaacucuuccgaccuggaucgccuuagccaaucccaucccauccugaauaugguggacaccaaaaagucuagccucaacauuuccggguacaauuuuagccugggagcggccgucaaagcuggcgccugcaugcuugaugggggaaacaugcuggagacaaucaaggugaccccucagacgauggacggcauccucaaaucuauucugaagguuaaaaagucccugggcauguucgugagcgauacacccggggaaagaaauccuuaugagaacauccucuacaagauuugucugucuggagacggcuggccguauaucgcuagccggaccuccauugucgggcgcgccugggaaaacacaaccguggaucuugagucugacggaaaaccccagaagguuggcaccgcggggagcaauaaaucccugcagagcgccggauuuccuacaggccucacguacucucaacugaugacccugaaggauuccaugaugcagcuugaccccagcgcuaaaacauggaucgauauugagggcagaccugaagaccccguggagaucgcccucuaccagccgaugucugggugcuauauccacuucuuucgggaaccuaccgaccugaagcaguucaagcaagaugcuaaauacucccauggaauugacgucacagaucuguuucccgcccagccuggccucaccagcgccgugaucgaggcucugcccagaaacaugguccuuacgugucagggguccgacgauauuaagcgccugcucgacucucagggacggagagauaucaaacugauugacaucgcgcugagcaaggccgauucccgccgguucgaaaaugcugugugggaccaaugcaaagaucuuugucacaugcauacaggcguuguggucgagaagaagaaaagagggggcaaggaggaaaucacaccccacugcgcccucauggacuguauuauguaugaugccgcugugucuggaggccugaacaucccuguucugcgcgccgugcucccgcgggacauggucuuuagaaccagcucccccaaaguggugcuguga

SEQ ID NO: 20811 - RNA, 1761 nt, Artificial Sequence
  derived and/or modified CDS sequence (opt5) from LASV(LASV254-NIG-2011;Clade II)__AIT17675__SP-IgE_NP(2-569)
auggacuggaccuggauccuguuccucguggccgcugccacaagaguccacagcagcgccuccaaggaggugaaaucuuuccuguggacccagagccucagacgggaacuguccggcuacugcucuagcaucaaacuucaagucguuaaggacgcucaggcccugcuccacgggcuggauuuuuccgaggugucuaacgugcagcgccuuaugagaaagcagaaacgggacgauagcgaccugaagcgccucagagaucugaaucaagcggucaacaaucugguggaacucaaguccacacagcagaaaagcguucugcgggugggaacgcuuaccucugacgaucugcucacacuggcugccgaccuugagaagcugaaauccaaggucauucgcaccgaaagaccccucagcucuggcguguauauggggaaccuguccacacagcaacuggagcagcggcgcgcccuccugaauaugaucggaaugguuggcggggcucagggaacccagccuggcagagauggcgugguccgggugugggacgugaaaaacccggaucuucugaauaaccaauucgggacaaugcccagccucacccuggccugucuuacgaagcagggacaggucgaccugaaugaugcuguucucgcccugaccgaccugggccucauuuacacagcgaaguauccuaacucuuccgaccuggaucgccuuagccaaucccaucccauccugaauaugguggacaccaaaaagucuagccucaacauuuccggguacaauuuuagccugggagccgcugugaaagccggcgcuugcaugcuugaugggggaaacaugcuggagacaaucaaggucaccccucagacgauggacggcauccucaaaucuauucugaaggugaaaaagucccugggcauguucguuagcgauacacccggggaaagaaauccuuaugagaacauccucuacaagauuugucugucuggagacggcuggccguauaucgccagccggaccuccauuguggggcgcgcgugggaaaacacaaucgucgaucuugagucugacggaaaaccccagaaggugggcaccgccgggagcaauaaaucccugcagagcgcuggauuuccuaccggccucacauacucucaacugaugacgcugaaggauuccaugaugcagcuugaccccagcgccaaaaccuggauugauaucgagggcagaccugaagaccccguugagaucgcucucuaccagccgaugucugggugcuauauucacuucuuucgggaaccuacagaccugaagcaguucaagcaagaugccaaauacucccauggaaucgacguggccgaucuguuucccgcucagccuggccucaccagcgcggucauugaggcccugcccagaaacauggugcuuacaugucagggguccgacgauaucaagcgccugcucgacucucagggacggagagauauuaaacugaucgacaucgcucugagcaaggccgauucccgccgguucgaaaaugccgucugggaccaaugcaaagaucuuugucacaugcauaccggcgugguuguggagaagaagaaaagagggggcaaggaggaaauuacgccccacugcgcucucauggacuguaucauguaugaugccgcggucucuggaggccugaacauuccugugcugcgcgcuguucucccgcgggacaugguguuuagaacaagcucccccaaagucgugcuguga

SEQ ID NO: 20812 - RNA, 1761 nt, Artificial Sequence
  derived and/or modified CDS sequence (opt5) from LASV(Nig08-04;Clade II)__ADU56611__SP-IgE_NP(2-569)
auggacuggaccuggauccuguuccucguggccgcugccacaagaguccacagcagcgccuccaaggaggugaaaucuuuccuguggacccagagccucagacgggaacuguccggcuacugcucuaacaucaaacuucaagucguuaaggacgcucaggcccugcuccacgggcuggauuuuagcgagguguccaaugugcagcgccuuaugagaaagcagaaacgggacgauggagaccugaagcgccucagagaucugaaccaagcggucaauaaccugguggaacucaagucuacccagcagaaaagcguucugcgggugggcacgcuuaccuccgacgaucugcucacacuggcugccgaccuugagaagcugaaaagcaaggucauucgcaccgaaagaccccucucuuccgggguguauaugggaaaucugagcacacagcaacuggagcagcggaaagcccuccugucuaugaucggcaugguugggggagcucagggcacccagccuggccgcgaugggguggucagagugugggacgugaagaacccggaucuucugaauaaccaauucggaacaaugcccucccucacccuggccugucuuacgaagcagggccaggucgaccugaaugaugcuguucucgcccugaccgaccuggggcucauuuacacagcgaaauauccuaacagcucugaccuggaucggcuuucccaaagccaucccauccugaauaugguggacaccaagaaauccucucucaacauuagcggauacaauuuuucccugggcgccgcugugaaggccggggcuugcaugcuugauggaggcaacaugcuggagacaaucaaagucaccccucagacgauggacggcauccucaagagcauucugaaagugaagcgcucucuggggauguucguuuccgauacacccggagaaagaaauccuuaugagaacauccucuacaagauuugucugagcggcgacggguggccguauaucgccucucggaccagcauugugggacgcgcgugggaaaacacaaccgucgaucuugaguccgacggcaaaccccagaagguggggaccgccggaucuaauaaaagccugcaguccgcuggcuuuccuacaggccucacguacagccaacugaugacccugaaggauucuaugaugcagcuugaccccuccgccaaaacauggaucgauauugaggggagaccugaagaccccguugagaucgcucucuaccagccgaugagcggaugcuauauccacuucuuucgggaaccuaccgaccugaagcaguucaagcaagaugccaaauacucucauggcauugacgugacagaucuguuuuccgcccagcccgggcucaccagcgcugucaucgaggcgcugccuagaaacauggugcuuacgugucagggauccgacgauauuaagaaacugcucgacucucagggccgccgggauaucaagcugauugacaucagccugaauaaagccgauuccagacgcuucgaaaacgcugucugggaccaaugcaaggaucuuugucacaugcauacaggggugguuguggagaagaaaaagcggggcggaaaagaggaaaucacaccccacugcgcccucauggacuguauuauguuugaugccgcugucucuggcgggcugaauauccccauucugagagccgugcucccucgcgacaugguuuuccggaccagcuccccgaaggugguccuguga

SEQ ID NO: 20813 - RNA, 1764 nt, Artificial Sequence
  derived and/or modified CDS sequence (opt5) from LASV(GA391;Clade III)__AAA46284__SP-IgE_NP(2-570)
auggacuggaccuggauccuguuccucguggccgcugccacaagaguccacagcagcgccuccaaggaggugagaucuugccuguggacccagagccuccggcgcgaacuguccggcuacuguucuaacaucaaacuucaagucguuaaggacgcucaggcccugcuccacgggcuggauuucagcgagguguccaaugugcagagacuuaugcggaaacagaagcgcgacgauggagaccugaaaagacuccgggaucugaaccaagcggucaauaaccugguggaacucaagucuacacagcagaaaagcguucugcgcgugggcacgcuuuccagcgacgaucugcucauucuggcugccgaccuugagaaacugaagucuaaagucaccagaacagaacggccccucuccagcgggguguauaugggaaaucugucuucccagcaacuggaucagcgcagagcccuccugaacaugaucggcaugaccgggguuagcggaggcggcaagggggcuucuaauggaauugugcgggucugggacgugaaaaacgccgagcuucugaauaaccaguuuggcacaaugccuucccucacccuggcuugccuuacaaagcaggggcaaguggaucugaaugacgccguccaggcgcucaccgaucugggacugaucuacacggccaaguauccgaacagcuccgaccucgaccgccugucucagagccaucccauucuuaauaugaucgauaccaaaaaguccagccugaacaucucuggcuacaauuucucccucggggcugccguuaaagcuggagccuguaugcuggacggcggcaacaugcuugagacaauuaaggugagcccucaaaccauggaugggauccugaaaucuauucucaaggugaaaaagagccugggaauguuugucuccgacacacccggcgaaagaaacccuuaugagaauauccuguacaagauuugccucucuggggauggauggagcuauaucgcgucccggaccagcauugugggccgcgccugggaaaacacgguuguggaccuggagcaggauaauaaaccccagaagaucgggaacggaggcucuaauaaaucccuucagagcgcuggcuucgccgcugggcugaucuacucucaacucaugacacugaaggacuuuaaauguuucaaccugauuccuaaugccaagaccuggauggauaucgagggaagaccggaagaccccgucgagauugcccuuuaccagccuuccagcggcugcuaugugcacuuuuuccgggaacccacagaucucaagcaguuuaaacaggacgcuaaguacucccaugggagagacguuaccgaucuguucgcggcccaaccuggacugaccucugcugugaucgaggcccucccccgcaacauggucauuacaugucagggcagcgaagacauccggaaacugcuugagucccaggggagacgcgauaucaagcugauugacaucacgcucucuaaagccgauagccggaaguuugagaaugcugugugggaccaguucaaggaucugugccacaugcauaccggcgucgugguugaaaagaagaaaagaggaggcaaggaggaaauuacaccgcacugugcccugauggacugcaucauguuugaugcggcuguguccgggggacuugacgccaaaguccuccgcgugguucugccucgggauaugguguucagaaccagcacacccaaggucgugcuguga

SEQ ID NO: 20814 - RNA, 1761 nt, Artificial Sequence
  derived and/or modified CDS sequence (opt5) from LASV(Nig08-A19;Clade III)__ADU56619__SP-IgE_NP(2-569)
auggacuggaccuggauccuguuccucguggccgcugccacaagaguccacagcagcgccuccaaggaggugaaaucuuuccuguggacccagagccucagacgggaacuguccggcuacugcucuaacaucaaacuucaagucguuaaggacgcucaggcccugcuccacgggcuggauuuuagcgagguguccaaugugcagcgccuuaugagaaagcagaaacgggacgauggagaccugaagcgccucagagaucugaaccaagcggucaauaaccugguggaacucaagucuacacagcagaaaagcguucugcgggugggcacgcuuuccagcgacgaucugcucguccuggcugccgaccuugagaagcugaaaucuaaggugguucgcaccgaaagaccccucuccagcgggauuuauaugggaaaucugucuucccagcaacuggaucagcggaaagcccuccugaacaugaucggcaugacagggggaaauggcggccgcaacaccacaagcgacgggauugugagagucugggaugugaagaaugcugagcuucugaacaaucaguucggaaccaugccuucucucacacuggccugucuuaccaagcagggccaaguggaccugaacgaugcuguccaggcccucacggaccuggggcugaucuacaccgcgaaauaucccaauuccagcgaccucgaucggcuggcccagucccauccgauucuuaacaugaucgacacaaagaaaucuagccugaauaucuccggauacaacuuuagccucggcgcugccguuaaggcuggggccugcaugcuggauggaggcaacaugcuugagaccauuaaagugucuccucaaacaauggacggcauccugaaguccauucucaaagugaagcgcagccuggggauguucaucucugauacccccggagaaagaaauccuuaugagaacauucuguacaagaucugucucagcggcgacggguggcccuauauugcgucccggacgucuaucgucggacgcgccugggaaaauacagugguugaucuggagagcgacaacaaaccucagaagaccggcaaugggggauccaacaaaagccuucagucugcuggcuuugccgcuggccugacauacucccagcucaugacccugaaggauagcaugcugcaacuugacccgaaugccaaaaccuggauggauaucgaggggagacccgaagacccuguggagauugcccucuaccagcccucuuccggaugcuauauccacuucuuucgggaaccuacagaccugaagcaguucaagcaggaugcuaaauacagccauggcauugacgucacggaucuguuugcggcccaacccgggcucaccuccgcugugaucgaggcccugccgagaaacaugguuauuacaugucagggaucugaagacauccgcaaacuucuggagagccagggccggagagauaucaagcucauugacaucucccugucuaagguggauagccgcaaauucgagaaugccgucugggaccaguuuaaggaucugugccacaugcauaccgggauuguggucgaaaagaaaaagcggggcggaaaagaggaaaucacaccucacugugcucuuauggacugcauuauguucgaugccgcgguguccggcgggguugacgcuaaggugcucagagccguccugccccgcgauaugguguuucggaccagcacgccuaaaguugugcuguga

SEQ ID NO: 20815 - RNA, 1761 nt, Artificial Sequence
  derived and/or modified CDS sequence (opt5) from LASV(G1180-SLE-2010;Clade IV)__AIT17169__SP-IgE_NP(2-569)
auggacuggaccuggauccuguuccucguggccgcugccacaagaguccacagcagcgccuccaaggagaucaaaucuuuccuguggacccagagccucagacgggaacuguccggcuacugcucuaacauuaagcugcaaguggucaaagacgcucaggcccugcuccacgggcuggauuuuagcgagguuuccaaugugcagcgccuuaugagaaaggaacggcgcgacgauaacgaccugaaaagacuccgggaucugaaucaggcggugaacaaucuggucgagcucaagucuacacaacaaaagagcauccugcgcgugggaacgcuuaccuccgacgaucugcucauucuggcugccgaccuugaaaaacuuaagagcaaaguuaucagaacagagcggccccucucugccggcguguauauggggaaccuguccagccagcagcuggaucagcgcagagcucuccugucuaugauuggaauguccagcggcaaucagcgggcccaggcugggcgcgacggagucgugagaguuugggaugugaagaacgucgagcuucugaauaaccaguucggcaccaugccuucucucacacuggccugucuuaccaaacaaggccagguggaccugaaugaugcggugcaggcccucacagaccuggggcugaucuacaccgcuaaguauccgaacacguccgaccucgaucggcugacccaaagccaucccauccuuaauaugauugacacaaagaaauccucucugaacaucagcggauacaauuuuucccucggcgccgcugucaaggccggggcgugcaugcuggauggaggcaacaugcuugaaaccauuaaaguuagcccucagacaauggacgggauccugaagucuauucucaaagugaagaaagcccugggaauguucaucuccgauacccccggcgagcgcaacccuuaugaaaauauucuguacaagaucugucucagcggcgacggguggcccuauaucgcuucuagaacgagcauuacaggacgggccugggagaacaccguggucgaucuggaguccgacggcaagccucagaaagcugggucuaauaacagcaauaagucccuucagagcgugggauuuacagccggccugaccuacucucaacucaugacccugaaagaugccaugcugcagcuugacccgaacgcuaagacauggauggauaucgaagggagacccgaggacccuguugaaauugcgcucuaccagcccuccagcggaugcuauauccacuucuuucgcgagccuacggaccugaaacaguucaagcaagaugccaaguacucucauggcauugacgugaccgaucuguuugcugcccagcccggccucacauccgccgucaucgacgcucugccgcggaauauggugaucaccugucaggggagcgaugacauuagaaaacuucuggaaucccagggacgcaaggauaucaaacucauugacaucgcccugucuaagacagauagccggaaauaugagaacgcgguuugggaccaauacaaggaucugugccacaugcauaccggcguggucguggagaagaaaaagagagggggaaaagaagagauuacgccucacugugcucuuauggacugcaucauguucgaugccgccgucuccggcgggcucaauacaucugugcugcgcgcuguucugccccgggacaugguguuuagaaccagcaccccucgcgucgugcucuga

SEQ ID NO: 20816 - RNA, 1761 nt, Artificial Sequence
  derived and/or modified CDS sequence (opt5) from LASV(G1442-SLE-2011;Clade IV)__AIT17181__SP-IgE_NP(2-569)
auggacuggaccuggauccuguuccucguggccgcugccacaagaguccacagcagcgccuccaaggaggugaaaucuuuccuguggacccagagccucagacgggaacuguccggcuacugcucuaacaucaaacuucaagucguuaaggacgcucaggcccugcuccacgggcuggauuuuagcgagguguccaaugugcagcgccuuaugagaaagcagcggcgcgacgauaacgaccugaaaagacuccgggaucugaaucaagcggucaacaaucugguggaacucaagucuacacagcaaaagagcguucugcgcgugggaacgcuuaccuccgacgaucugcucguccuggcugccgaccuugagaaacuuaagagcaaagugauuagaacagaacggccccucucugccggcguuuauauggggaaccuguccagccagcagcuggaucagcgcagagcucuccugaauaugaucggaaugucuggcgggauucagggaacccggacaggccgcgacggcguggucagagugugggaugugaagaacgccgaccuucugaauaaccaguucgggaccaugccuucccucacacuggcuugucuuaccaaacaaggacaggucgaucugaaugacguugugcaggcccucacggaccugggccugaucuacaccgcgaaguauccgaacgccagcgaucucgaccggcugacacaaucucaucccauucuuaauaugaucgauaccaagaaauccagccugaacaucuccggguacaauuuuucucucggagcugccgugaaggcuggcgccugcaugcuggacgggggaaacaugcuugagacaauuaaagucagcccucagaccauggauggcauccugaaguccauucucaaagugaagaaaacgcugggcauguucaucagcgacacacccggggagcgcaacccuuaugaaaauauucuguacaagaucugucucucuggagauggcuggcccuauauugcguccagaaccagcaucacagggcgggccugggagaacaccguuguggaccuggaaucugauggaaagccucagaaagcuggcagcaauaacuccaauaagucucuucagagcgccggguuugcugccggacugaccuacucccaacucaugacacugaaagacgccaugcugcagcuugauccgaacgcuaagacguggauggacaucgagggcagacccgaggacccugucgaaauugcgcucuaccagcccagcucuggcugcuauauccacuucuuucgcgagccuaccgaucugaaacaguucaagcaagacgccaaguacucccaugggauugaugugacagaccuguuugcugcccagcccggacucaccagcgccguuaucgaagcucugccgcggaauauggugauuacaugucagggcucugaugacaucaaaaagcugcuggagucccaggggagaaaagauaucaagcucauugacaucgcccugagcaaaaccgauucccgcaaguaugaaaacgcggucugggaccaauacaaggaucugugccacaugcauacgggaguggucguggagaaaaagaaacggggcgggaaggaggaaauuacaccucacugugcucuuauggacugcaucauguucgaugccgccguuucuggcggacucaauacccuggugcugagagcuguccucccccgcgacaugguguuucggaccagcacaccuagaguugugcuguga

SEQ ID NO: 20817 - RNA, 1761 nt, Artificial Sequence
  derived and/or modified CDS sequence (opt5) from LASV(G3010-SLE-2013;Clade IV)__AIT17345__SP-IgE_NP(2-569)
auggacuggaccuggauccuguuccucguggccgcugccacaagaguccacagcagcgccuccaaggagaucaaaucuuuccuguggacccagagccucagacgggaacuguccggcuacugcucuaacauuaaacuucaaguggucaaagacgcucaggcccugcuccacgggcuggauuuuagcgagguuuccaaugugcagcgccuuaugagaaaggaacggcgcgacgauaacgaccugaaaagacuccgggaucugaaucaggcggugaacaaucuggucgagcucaagucuacacaacaaaagagcauccugcgcgugggaacgcuuaccuccgacgaucugcucauucuggcugccgaccuugaaaaacuuaagagcaaaguuacaagaaccgagcggccccucucugccggcguguauauggggaaccuguccagccagcagcuggaucagcgcagagcucuccugucuaugaucggaauguccagcggcguccagggggcccgggcuggacgcgacggcgugguuagagugugggaugucaagaaugccgagcuucugaacaaucaguucggcacaaugccuucucucacccuggcgugucuuacaaaacaggggcaaguggaccugaacgaugugguccaggcccucaccgaccugggacugauuuacacggcuaaguauccgaauaccuccgaccucgaucggcugacacagagccaucccauccuuaacaugaucgacaccaagaaauccucucugaauauuagcggcuacaacuuuucccucggggccgcuguuaaggccggagcgugcaugcuggauggcgggaauaugcuugaaacaaucaaagugagcccucaaaccauggacggcauucugaagucuauccucaaagugaagaaagcccugggaauguucauuuccgagacgcccggcgaacgcaacccuuaugagaacauccuguacaagauuugucucagcggggauggauggcccuauaucgcuucuagaacaagcaucaccggccgggccugggagaauacagucguggaccuggaauccgaugggaagccucagaaagcuggaucuaacaauagcaacaagucccuucagagcgccggcuuuaccgccgggcugaccuacucucagcucaugacacugaaagacgcuaugcugcaacuugauccgaaugcgaagacguggauggacauugagggaagacccgaagauccuguugagguggcccucuaccagcccuccagcggcugcuauauccacuucuuucgcgaaccuaccgaccugaaacaguucaagcaggacgcuaaguacucucauggcauugaugucacagaccuguuugccgcccaacccgggcucaccuccgcugugaucgaugcccugccgcggaacaugguuauuacaugucagggaagcgacgauaucaaaaagcugcuggagucccagggcagaaaagacaucaagcucauugauaucgcgcugucuaaaaccgacagccgcaaguaugagaaugcugugugggaucaguacaaggaccugugccacaugcauacgggggucguggucgaaaagaagaaacggggaggcaaggaggaaauuacaccucacugugcccuuauggauugcaucauguucgacgccgcuguguccgggggccucaacaccucuguucugagagccgugcugccccgcgauauggucuuucggaccagcacaccuagagugguucucuga

SEQ ID NO: 20818 - RNA, 1761 nt, Artificial Sequence
  derived and/or modified CDS sequence (opt5) from LASV(G502-SLE-2009;Clade IV)__AIT17127__SP-IgE_NP(2-569)
auggacuggaccuggauccuguuccucguggccgcugccacaagaguccacagcagcgccuccaaggagaucaaaucuuuccuguggacccagagccucagacgggaacuguccggcuacugcucuaacauuaagcugcaaguggucaaagacgcucaggcccugcuccacgggcuggauuuuagcgagguuuccaaugugcagcgccuuaugagaaaggaacggcgcgacgauaacgaccugaaaagacuccgggaucugaaucaggcggugaacaaucuggucgagcucaagucuacacaacaaaagagcauccugcgcgugggaacgcuuaccuccgacgaucugcucauucuggcugccgaccuugaaaaacuuaagagcaaaguuaucagaacagagcggccccucucugccggcguguauauggggaaccuguccagccagcagcuggaucagcgcagagcucuccugucuaugauuggaauguccggcgggaaucagggaguccgggccggcaaggacggcgugguucgcgugugggaugucaaaaacgcugagcuucugaauaaccaguucgggaccaugccuagccucacacuggccugucuuaccaagcagggacaaguggaccugaaugaugcggugcaggcccucacagaccugggccugaucuacaccgcuaaguauccgaacacgucugaccucgauagacugacccagucccaucccauccuuaauaugauugacaccaaaaagagcucccugaacaucucuggguacaauuuuagccucggagccgcugucaaagccggcgcgugcaugcuggaugggggaaacaugcuugaaacaauuaagguuuccccucaaacaauggacggcauccugaaaagcauucucaaggugaaaaaggcccugggcauguucaucucugauacccccggggagcggaacccuuaugaaaauauucuguacaagaucugucucuccggagacggcuggcccuauaucgcuagccgcacgucuauuacagggagagccugggagaacaccguggucgaucuggagagcgacggaaaaccucagaaggcuggcuccaauaacucuaauaaaagccuucaguccgccggguuuacagccggacugaccuacagccagcucaugacccugaaggaugcuaugcugcaacuugacccgaacacaaaaacguggauggauaucgaaggccggcccgaggacccuguggaaauugcgcucuaccagcccucuuccggcugcuauauccacuucuuuagagagccuaccgaccugaagcaguucaagcaggaugccaaauacagccaugggauugacguuacagaucuguuugcugcccaacccggacucaccucugccgugaucgacgcucugccgcgcaauauggucaucacaugucagggcuccgaugacauucggaaacuucuggaaagccaggggagaaaggauaucaagcucauugacaucgcccugaacaaaaccgauucccgcaaguaugagaaugcggugugggaccaguacaaggaucugugccacaugcauacgggaguuguggucgagaaaaagaaacggggcgggaaggaagagauuacaccucacugugcucuuauggacugcaucauguucgaugccgccgugucuggcggacucaacaccagcguccugagagcugugcugccccgcgacaugguuuuucggaccuccacaccuagagugguccucuga

SEQ ID NO: 20819 - RNA, 1761 nt, Artificial Sequence
  derived and/or modified CDS sequence (opt5) from LASV(G733-SLE-2010;Clade IV)__AIT17155__SP-IgE_NP(2-569)
auggacuggaccuggauccuguuccucguggccgcugccacaagaguccacagcagcgccuccaaggagaucaaaucuuuccuguggacccagagccucagacgggaacuguccggcuacugcucuaacauuaagcugcaaguggucaaagacgcucaggcccugcuccacgggcuggauuuuagcgagguuuccaaugugcagcgccuuaugagaaaggaacggcgcgacgauaacgaccugaaaagacuccgggaucugaaucaggcggugaacaaucuggucgagcucaagucuacacaacaaaagagcgugcugcgcguuggaacgcuuaccuccgacgaacugcucgugcuggcugccgaucuugagaaacuuaagagcaaagucaucagaacagagcggccccucucugccggcguguauauggggaaccuguccagccagcagcuggaccagcgcagagcucuccugucuaugauuggaauguccggcgggaaucagggagcccggaccggccgcgauggcguugugagagucugggacgugaagaacgcugaacuucugaauaaccaguucgggacaaugccuagccucacccuggccugucuuacaaaacagggacaaguggaucugaaugacgcgguccaggcccucaccgaucugggccugaucuacacggcuaaguauccgaacaccucugaccucgaccggcugacacagucccaucccauucuuaauaugaucgauaccaagaaaagcucccugaacaucucuggguacaauuuuagccucggagccgcuguuaaggccggcgcgugcaugcuggacgggggaaacaugcuugagacaauuaaaguguccccucaaaccauggauggcauccucaagagcauucugaaagugaagaaagcccugggcauguucaucucugacacgcccggggaacgcaacccuuaugagaauauucuguacaagaucugucucuccggagauggcuggcccuauauugcuagcagaacaucuaucaccgggcgggccugggagaacacagucguggaccuggaaagcgauggaaagccucagaaagcuggcuccaauaacucuaauaagagccuucaguccgccggguuuaccgccggacugaccuacagccagcucaugacacugaaagacgcuaugcugcaacuugauccgaacgcgaagacguggauggacaucgagggcagacccgaagauccuguugagauugcccucuaccagcccucuuccggcugcuauauccacuucuuucgcgaaccuaccgaccugaaacaguucaagcaggacgcuaaguacagccaugggauugaugugacagaccuguuugccgcccaacccggacucaccucugcugucaucgaugcccugccgcggaauauggugauuacaugucagggcuccgacgauaucagaaaacuucuggagagccaggggcgcaaggacaucaaacucauugauaucgcgcuguccaagauugacucucggaaauaugagaacgcuguuugggaucaguacaaggaccugugccacaugcauaccggaguggucguggaaaagaaaaagagaggcgggaaagaggaaaucacgccucacugugcccuuauggauugcauuauguucgacgccgcugucagcggcggacucaauucccuggugcugcgcgccguucucccccgggauaugguguuuagaacaucuaccccucgcgucgugcuguga

SEQ ID NO: 20820 - RNA, 1761 nt, Artificial Sequence
  derived and/or modified CDS sequence (opt5) from MOPV/LASV reassortant(IGS-1;Clade IV)__AFY05578__SP-IgE_NP(2-569)
auggacuggaccuggauccuguuccucguggccgcugccacaagaguccacagcagcgccuccaaggagaucaaaucuuuccuguggacccagagccucagacgggaacuguccggcuacugcucuaacauuaaacuucaaguggucaaggacgcucaggcccugcuccacgggcuggauuuuagcgagguuuccaaugugcagcgccuuaugagaaaggaacggcgcgacgauaacgaccugaaaagacuccgggaucugaaucaggcggugaacaaucuggucgagcucaagucuacacaacaaaagagcauccugcgcgugggaacgcuuaccuccgacgaucugcucauucuggcugccgaccuugaaaaacugagaagcaagguuauccggacagagcgcccccucucugccggcguguauauggggaaccuguccagccagcagcuggaucagagacgggcucuccugaauaugauuggaaugucuggcgggaaccagggagcccgcgcuggcagagacggcgucgugcggguuugggaugugaaaaaugccgagcuucuguccaaccaguucgggaccaugccuagccucacacuggcgugucuuaccaagcagggacaagucgaccugaaugaugccgugcaggcucucacagaccugggccugaucuacaccgccaaauauccgaacacgucugaccucgaucgccugacccagucccaucccauccuuaauaugauugacacaaagaaaagcucccugaacaucucuggguacaauuuuagccucggagcugccgugaaggcgggcgccugcaugcuggaugggggaaacaugcuugaaaccauuaaggucuccccucaaacaauggacggcauccugaaaagcauucucaagguuaaaaaggcucugggcauguucaucucugauacccccggggagagaaacccuuaugaaaauauucuguacaaaaucugucucuccggagacggcuggcccuauaucgccagccggacgucuauuacagggagagcuugggagaacaccgugguggaucuggagagcgacggaaagccucagaaggccgauuccaauaacucuagcaaaucccuucagagcgccggcuuuacagcugggcugaccuacucucagcucaugacccugaaggacgcgaugcugcaacuugauccgaaugccaaaacauggauggacaucgaaggacgccccgaggacccugucgaaauugcucucuaccagcccuccagcggcugcuauauccacuucuuucgggagccuacggaucugaagcaguucaaacaggacgccaaguacucucauggcauugaugugaccgaccuguuugccacacaacccgggcucaccuccgcuguuaucgaugcccugccgagaaacauggugaucacaugucagggaagcgacgauauucgcaaacuucuggaaucccagggccggaaggacaucaagcucauugauaucgaccugucuaaaaccgauagcagaaaguaugagaaugcggucugggaccaguacaaagaucugugccacaugcauacgggggugguuguggagaagaagaaacgcggaggcaaggaagagauuacaccucacugugcucuuauggacugcaucauguucgacgccgccgucuccgggggccucaacaccucugugcugcgggcuguccugcccagagauaugguguuucgcaccagcacaccucggguugugcucuga

SEQ ID NO: 20821 - RNA, 1761 nt, Artificial Sequence
  derived and/or modified CDS sequence (opt5) from LASV(LM765-SLE-2012;Clade IV)__AIT17815__SP-IgE_NP(2-569)
auggacuggaccuggauccuguuccucguggccgcugccacaagaguccacagcagcgccuccaaggagaucaaaucuuuccuguggacccagagccucagacgggaacuguccggcuacugcucuaacauuaagcugcaaguggucaaagacgcucaggcccugcuccacgggcuggauuuuagcgagguuuccaaugugcagcgccuuaugagaaaggaacggcgcgacgauaacgaccugaaaagacuccgggaucugaaucaggcggugaacaaucuggucgagcucaagucuacacaacaaaagagcauccugcgcgugggaacgcuuaccuccgacgaucugcucauucuggcugccgaccuugaaaaacuuaagagcaaaguuacaagaaccgagcggccccucucugccggcguguauauggggaaccuguccagccagcagcuggaucagcgcagagcucuccuggacaugaucggaaugucuggcuccaaucagggggcccgggcuggacgcgauggcgucgugagaguuugggacgugaagaacgccgagcuucugaauaaccaguucggcacaaugccuagccucacccuggcgugucuuacaaaacaggggcaagucgaucugaaugacgccgugcaggcucucaccgaccugggacugauuuacacggccaaguauccgaacaccucugaucucgaccggcugacacagucccaucccauccuuaauaugaucgauaccaagaaaagcucccugaacauuucuggcuacaauuuuagccucggggcugccgugaaggcgggagccugcaugcuggacggcgggaacaugcuugaaacaaucaaagucuccccucaaaccauggauggcauucucaagagcauccugaaaguuaagaaagcucugggaauguucauuucugacgcccccggcgagcgcaacccuuaugaaaauauccuguacaagauuugucucuccggggauggauggcccuauaucgcuagcagaacgucuaucacaggccgggccugggagaacaccgugguggaccuggagagcgaugggaagccucagaaagccggauccaauggcucuaacaagagccuucaguccgcuggguuuacagcgggacugaccuacagccagcucaugacccugaaagacgccaugcugcaacuugauccgaaugcuaagacauggauggacauugaaggcagacccgaggacccugucgaaaucgcccucuaccagcccucuuccggcugcuauauucacuucuuucgcgagccuacggaucugaaacaguucaagcaggacgccaaguacagccaugggaucgaugugaccgaccuguuugcugcccaacccggacucacaucugcgguuauugaugcucugccgcggaacauggugaucaccugucagggcuccgacgauaucagaaaacuuuucgaaagccaggggcgcaaggacauuaaacugaucgauauugcccucuccaagacagacucucggaaauaugagaaugccgucugggaucaguacaaggaccugugccacaugcauaccggaaucgugguugagaagaaaaagagaggcgggaaagaagagauuacgccucacugugcucugauggauugcaucauguuugacgccgcugugagcggcggacuuaacacauccguccuccgcgccgugcugccccgggacauggucuucagaaccucuaccccucgcgugguucuguga

SEQ ID NO: 20822 - RNA, 1761 nt, Artificial Sequence
  derived and/or modified CDS sequence (opt5) from LASV(LM776-SLE-2012;Clade IV)__AIT17825__SP-IgE_NP(2-569)
auggacuggaccuggauccuguuccucguggccgcugccacaagaguccacagcagcgccuccaaggagaucaaaucuuuccuguggacccagagccucagacgggaacuguccucuuacugcagcaacauuaaacuucaaguggucaaggacgcucaggcccugcuccacggccuggauuuuuccgagguuucuaaugugcagcgccuuaugagaaaggaacggcgcgacgauaacgaccugaaaagacuccgggaucugaaucaggcggugaacaaucuggucgagcucaagagcacacaacagaaguccauccugcgcguggggacgcuuaccagcgacgaucugcucauucuggcugccgaccuugaaaaacugaagucuaaaguuacaagaaccgagcggccccucuccgccggaguguauaugggcaaccugagcucucagcagcuggaucaacgcagagcucuccuguccaugaucgggaugagcggaucuaaucagggcgcccgggcugggcgcgacggagucgugagaguuugggaugugaagaacgccgagcuucugaauaaccaguucggcacaaugccuucccucacccuggcgugucuuacaaaacagggccaagucgaccugaaugaugccgugcaggcucucaccgaccuggggcugauuuacacggccaaguauccgaacaccagcgaccucgaucggcugacacagucccaucccauccuuaauaugaucgacaccaagaaaucuagccugaacauuuccggauacaauuuuagccucggcgcugccgugaaggcgggggccugcaugcuggauggaggcaacaugcuugaaacaaucaaagucucuccucaaaccauggacgggauucugaaguccauccucaaaguuaagaaagcucugggaauguucauuagcgauacgcccggcgagcgcaacccuuaugaaaauauccuguacaagauuugucucucuggcgacggguggcccuauaucgccagcagaacauccaucaccggacgggcuugggagaacacagugguggaucuggagucugacggcaagccucagaaagccgggagcaauaacuccaauaagagccuucagucugccggauuuaccgcuggccugaccuacucccagcucaugacacugaaagaugcgaugcugcaacuugacccgaacgccaagacguggauggauauugaagggagacccgaggacccugucgaaguggcucucuaccagcccagcucuggaugcuauauccacuucuuucgcgagccuaccgaccugaaacaguucaagcaggaugccaaguacucccauggcauugacguuacagaucuguuugccgcucaacccggccucaccagcgccgugaucgacgcgcugccgcggaauauggucauuacaugucagggguccgaugacaucagaaaacuucuggaaucucagggacgcaaggauaucaaacucauugacaucgcucugagcaagaccgauucccggaaauaugagaacgccgugugggaccaguacaaggaucugugccacaugcauacgggcguuguggucgagaagaaaaagagagggggaaaagaagagauuacaccucacugugcccuuauggacugcaucauguucgaugcugccgugucuggcgggcucaauaccagcguccugcgcgcugugcugccccgggacaugguuuuuagaaccuccacaccucgcgugguccucuga

SEQ ID NO: 20823 - RNA, 1761 nt, Artificial Sequence
  derived and/or modified CDS sequence (opt5) from LASV(Mad39;Clade IV)__ANH09723__SP-IgE_NP(2-569)
auggacuggaccuggauccuguuccucguggccgcugccacaagaguccacagcagcgccuccaaggagaucaaaucuuuccuguggacccagagccucagacgggaacuguccggcuacugcucuaacauuaagcugcaaguggucaaagacgcucaggcccugcuccacgggcuggauuuuagcgagguuuccaaugugcagcgccuuaugagaaagcagcggcgcgacgauaacgaccugaaaagacuccgggaucugaaucaagcggugaacaaucuggucgaacucaagucuacacagcaaaagagcgugcugcgcguuggaacgcuuaccuccgacgaucugcucacacuggcugccgaccuugagaaacuuaagagcaaagugaccagaacagaacggccccucaccgccggcgucuauauggggaaccugucuucccagcagcuggaucagcgcagagcucuccugaauaugaucggaaugagcggcgggaaccagggagcccggacaggccgcgacggcgugguuagagugugggaugucaagaaugcugagcuucugaacaaucaguucgggaccaugccuucucucacgcuggccugucuuaccaaacaaggacagguggaccugaacgaugugguccaggcgcucacagaccugggccugauuuacaccgccaaguauccgaauacauccgaccucgaucggcugacccaaagccaucccauccuuaacaugauugacacgaauaagucuucccugaacaucagcggguacaacuuuucccucggagcugccguuaaagcuggcgccugcaugcuggaugggggaaauaugcuugagacaaucaaggugucuccucagaccauggacggcauucugaaaagcauccucaaggugaaaaagucccugggcauguucauuagcgauacacccggggaacgcaacccuuaugagaauauccuguacaaaauuugucucucuggagacggcuggcccuauaucgcguccagaaccagcauuaccgggcgggccugggaaaacacagucguggaucuggagucuggaggcaagccucagaaggcugggagcaauaacuccaauaaaucucuucagagcgccggauuugcugccggccugacguacucccaacucaugacccugaaggacgccaugcugcagcuugauccgaacgcuaaaacauggauggacaucgagggcagacccgaagauccuguugagaucgcgcucuaccagcccauuagcgggugcuauauccacuucuuucgcgaaccuaccgaccugaagcaguucaaacaagacgccaaguacucucauggaauugaugugacagaccuguuugcugcccagcccggccucaccuccgccgucaucgaggcucugccgcggaauauggugauuacgugucaggggagcgaugacaucagaaaacuuuucgaaucucagggacgcaaggauaucaagcugauugacaucgcccucuccaaaacagauagccggaaguaugagaacgcgguuugggaccaauacaaagaucugugccacaugcauaccggcguggucguggagaagaagaaaaagggcgggaaagaagagauuaccccucacugugcucugauggacugcaucauguuugaugccgccgucuccggaggccuuaauacacucgugcugagagcuguucugccccgcgacaugguguuccggaccucuacaccuaaggucgugcucuga

SEQ ID NO: 20824 - RNA, 1761 nt, Artificial Sequence
  derived and/or modified CDS sequence (opt5) from LASV(Z0947-SLE-2011;Clade IV)__AIT17841__SP-IgE_NP(2-569)
auggacuggaccuggauccuguuccucguggccgcugccacaagaguccacagcagcgccuccaaggagaucaaaucuuuccuguggacccagagccucagacgggaacuguccggcuacugcucuaacauuaagcugcaaguggucaaagacgcucaggcccugcuccacgggcuggauuuuagcgagguuuccaaugugcagcgccuuaugagaaaggaacggcgcgacgauaacgaccugaaaagacuccgggaucugaaucaggcggugaacaaucuggucgagcucaagucuacacaacaaaagagcauccugcgcgugggaacgcuuaccuccgacgaucugcucauucuggcugccgaccuugaaaaacuuaagagcaaaguuacaagaaccgagcggccccucucugccggcguguauauggggaaccuguccagccagcagcuggaucagcgcagagcucuccugaauaugaucggaaugucuggcuccaaccagggggcccggacaggacgcgacggcgucgugagaguuugggaugugaagaaugcugagcuucugaacaaucaguucggcaccaugccuagccucacacuggccugucuuaccaaacaggggcaagucgaccugaacgaugcggugcaggcccucacggaccugggacugauuuacaccgcuaaguauccgaauacaucugaccucgaucggcugacccagucccaucccauccuuaacaugaucgacacaaagaaaagcucccugaauauuucuggcuacaacuuuagccucggggccgcugugaaggccggagcgugcaugcuggauggcgggaacaugcuugaaaccaucaaagucuccccucaaacgauggacggcauucucaagagcauccugaaaguuaagaaagcccugggaauguucauuucugaugcucccggcgagcgcaauccuuaugaaaacauccuguacaagauuugucucuccggggacggauggcccuauaucgccagcagaacaucuaucaccggccgggcuugggagaauacagugguggaucuggagagcgacgggaagccucagaaagccggauccaacggcucuaauaagagccuucaguccgccggguuuaccgcuggacugaccuacagccagcucaugacacugaaagaugcgaugcugcaacuugacccgaacgccaagacguggauggauauugaaggcagacccgaggacccugucgaaaucgcucucuaccagcccucuuccggcugcuauauucacuucuuucgcgagccuaccgaccugaaacaguucaagcaggaugccaaguacagccaugggaucgacgugacagaucuguuugccgcucaacccggacucaccucugccguuauugacgcgcugccgcggaauauggugaucacaugucagggcuccgaugacaucagaaaacuuuucgaaagccaggggcgcaaggauauuaaacugaucgacauugcucucuccaagaccgauucucggaaauaugagaacgccgucugggaccaguacaaggaucugugccacaugcauacgggaaucgugguugagaagaaaaagagaggcgggaaagaagagauuacaccucacugugcccugauggacugcaucauguuugaugcugccgugagcggcggacuuaauaccuccguccuccgcgcugugcugccccgggacauggucuucagaaccucuacaccucgcgugguucuguga

SEQ ID NO: 20825 - RNA, 2002 nt, Artificial Sequence
  mRNA product Design a-1 (hSL-A64-N5) comprising derived and/or modified sequence from LASV(Josiah;Clade IV)__NP_694869__SP-IgE_NP(2-569) (opt1)
aggagagucccgcagucggcguccagcggcucugcuuguucgugugugugucguugcaggccuuauucaagcuuaccauggacuggaccuggauccuguuccucguggccgccgcgacccgcguccacagcagcgccuccaaggagaucaagagcuuccuguggacccagucccuccgccgggagcugagcggcuacugcuccaacaucaagcuccagguggucaaggacgcccaggcgcugcugcacgggcuggacuucagcgagguguccaacgugcagcgccucaugcggaaggagcgccgggacgacaacgaccugaagcgccugcgggaccucaaccaggccgucaacaaccugguggagcucaagagcacccagcagaaguccauccugcgcgugggcacccugaccagcgacgaccugcucauccuggccgccgaccuggagaagcucaaguccaaggucauccggaccgagcgcccccugagcgccgggguguacaugggcaaccuguccagccagcagcucgaccagcggcgcgcgcugcugaacaugaucgggauguccggcggcaaccagggggcccgggccggccgcgacggggugguccgggugugggacgugaagaacgccgagcuccugaacaaccaguucggcaccaugccgagccugacgcucgcgugccugaccaagcaggggcaggucgaccugaacgacgccgugcaggcccucaccgaccugggccugaucuacaccgccaaguaccccaacacguccgaccucgaccgccugacccagagccaccccauccugaacaugaucgacaccaagaaguccagccucaacaucagcggcuacaacuucucccugggggccgcggugaaggccggcgccugcaugcuggacgggggcaacaugcucgagaccaucaaggucagcccccagacgauggacggcauccugaaguccauccugaaggugaagaaggcccucgggauguucaucagcgacaccccgggcgagcggaaccccuacgagaacauccuguacaagaucugccuguccggggacggcuggcccuacaucgccagccgcaccuccaucaccgggcgggcgugggagaacacgguggucgaccucgagagcgacggcaagccccagaaggccgacuccaacaacagcuccaagagccugcaguccgccggcuucaccgccgggcugaccuacagccagcucaugacccugaaggacgccaugcugcagcuggacccgaacgcgaagacguggauggacaucgagggccgccccgaggaccccguggagaucgcccucuaccagcccuccagcgggugcuacauccacuucuuccgggagccgaccgaccugaagcaguucaagcaggacgccaaguacucccacggcaucgacgugaccgaccuguucgccacccagcccgggcucacgagcgccgucaucgacgcgcugccccgcaacauggugaucacgugccagggcuccgacgacauccgcaagcugcucgagagccagggccggaaggacaucaagcugaucgacaucgcccugagcaagaccgacucccgcaaguacgagaacgccgugugggaccaguacaaggaccucugccacaugcacaccggggucguggucgagaagaagaagcggggcgggaaggaggagaucaccccgcacugcgcccugauggacugcaucauguucgacgcggccgugagcggcgggcugaacaccuccgugcuccgcgccguccugccccgggacaugguguuccgcaccagcacgccccgggugguccugugaggacuagucccuguucccagagcccacuuuuuuuucuuuuuuugaaauaaaauagccugucuuucagaucucaaaggcucuuuucagagccaccaaaaaaaaaaaaaaaaaaaaaaaaaaaaaaaaaaaaaaaaaaaaaaaaaaaaaaaaaaaaaaaaagaauu

SEQ ID NO: 20826 - RNA, 2002 nt, Artificial Sequence
  mRNA product Design a-1 (hSL-A64-N5) comprising derived and/or modified sequence from LASV(LP;Clade I)__AAF86702__SP-IgE_NP(2-569) (opt1)
aggagagucccgcagucggcguccagcggcucugcuuguucgugugugugucguugcaggccuuauucaagcuuaccauggacuggaccuggauccuguuccucguggccgccgcgacccgcguccacagcagcaacuccaaggagaucaagagcuuccuguggacccagucccuccgccgggagcugagcggcuacugcuccaacaucaagcuccagguggucaaggacgcccaggcccugcugcacgggcuggacuucagcgagguguccaacgugcagcgccucaugcggaagcagaagcgcgacgacgcggaccugaagcggcugcgcgaccucaaccaggccgucaacaaccugguggagcucaagagcacccagcagaagaacgugcugcgggucggcacgcuguccagcgacgaccugaucacccucgccgccgaccuggagaagcugaaguccaaggugauccgcaccgagcggccccucagcuccgggguguacaugggcaaccugagcucccagcagcuggaccagcgccgggcccuccugagcaugaucgggauguccggcggcccgcaggggaaccgcaccggcggggacggcgucgugcgggugugggacgucaagaacgcggagcugcucaacaaccaguucgggacgaugcccagccugacccuggccugccucaccaagcagggccagguggaccugaacgacgccgugcaggcccugaccgaccucggccugaucuacacggcgaaguaccccaacuccagcgaccuggacaugcucacccagagccaccccauccuggggauggucgacaccaagaaguccagccugaacaucuccggcuacaacuucagccucggggccgccgugaaggccggcgccugcaugcuggacggcgggaacaugcuggagaccaucaagguguccccgcagacgauggacggcauccucaagagcauccugaaggucaagcgcucccuggggauguucaucagcgacacccccggcgagcggaaccccuacgagaacauccucuacaagaucugccuguccggggagggcuggcccuacaucgcgagccgcaccuccaucaccggccgggccugggagaacacgcugguggaccucgagagcgacaacaagccgcccaagcugaacuccgccgggagcaacaagucccugcaggccgccggccucaacgcggggcugaccuacagccagcugaugacccugaaggacugcaugcuccagcuggaccccuccagcaagaccuggaucgacaucgagggccgccccgaggacccgguggagaucgcccuguuccagcccuccagcgggugcuacauccacuucuuccgggagcccacggaccucaagcaguucaagcaggacgccaaguacagccacggcaucgacgucaccgaccuguucuccacccagcccggccugaccagcgccgugaucgaggcccucccgcgcaacauggugcugacgugccagggguccgacgacaucaagaagcugcucgagagccagggccggcgcgacaucaagcugaucgacaucucccugagcaaggcggacucccgcaaguucgagaacgccgucugggaccaguacaaggaccucugccacaugcacaccgggguggucguggagaagaagaagcggggcgggaaggaggagaucacgccccacugcgcccugcuggacugcaucauguucgacgccgccaccaccggcagccucaacaucaccacccugcgcgcggugcugccccgggacauggucuuccgcaccuccacgcccaagguggugcucugaggacuagucccuguucccagagcccacuuuuuuuucuuuuuuugaaauaaaauagccugucuuucagaucucaaaggcucuuuucagagccaccaaaaaaaaaaaaaaaaaaaaaaaaaaaaaaaaaaaaaaaaaaaaaaaaaaaaaaaaaaaaaaaaagaauu

SEQ ID NO: 20827 - RNA, 2002 nt, Artificial Sequence
  mRNA product Design a-1 (hSL-A64-N5) comprising derived and/or modified sequence from LASV(803213;Clade II)__AAF86704__SP-IgE_NP(2-569) (opt1)
aggagagucccgcagucggcguccagcggcucugcuuguucgugugugugucguugcaggccuuauucaagcuuaccauggacuggaccuggauccuguuccucguggccgccgcgacccgcguccacagcagcgccuccaaggaggugaaguccuuccuguggacccagagccuccgccgggagcugagcggcuacugcuccaacaucaagcugcaggucgugaaggacgcccaggcgcuccugcacgggcuggacuucagcgaggugaacaacguccagcgccucaugcggaagcagaagcgcgacgacggcgaccugaagcggcugcgcgaccucaaccaggccgugaacaaccugguggagcugaaguccacccagcagaaguccauccuccgggucgggacgcugaccagcgacgaccugcucacccuggccgccgaccuggagaagcucaagagcaaggugauccgcaccgagcggccccuguccagcggcguguacauggggaaccuguccacgcagcagcucgagcagcgccgggcccugcugaacaugaucggcauggucggcggggcgcagggcacccagccggggcgcgacggcguggugcgggucugggacgugaagaaccccgaccuccugaacaaccaguucgggaccaugcccagccugacccucgccugccugacgaagcagggccagguggaccugaacgacgccguccucgcccugaccgaccugggccucaucuacaccgcgaaguaccccaacuccagcgaccuggaccgccugucccagagccacccgauccucaacaugguggacaccaagaaguccagccugaacaucagcggguacaacuucucccugggcgccgccgugaaggccggggccugcaugcucgacggcggcaacaugcuggagacgaucaaggucacgccccagaccauggacgggauccucaagagcauccugaaggugaagcggucccugggcauguucgugagcgacacccccggggagcgcaaccccuacgagaacauccuguacaagaucugccucuccggcgacggguggccguacaucgcgagccggaccuccaucgucggccgcgccugggagaacaccaccguggaccuggagagcgacggcaagccccagaagguggggaccgccggcuccaacaagagccugcaguccgccggguuccccacgggccucaccuacagccagcugaugacccugaaggacuccaugaugcagcuggaccccagcgccaagaccuggaucgacaucgaggggcggccggaggaccccgucgagaucgcgcucuaccagcccauguccggcugcuacauccacuucuuccgcgagcccacggaccugaagcaguucaagcaggacgccaaguacagccacggcaucgacguggccgaccuguucccggcccagcccgggcucaccuccgccgucaucgaggcgcugccccggaacauggugcugaccugccagggcagcgacgacaucaagaagcuccuggacucccaggggcgccgcgacaucaagcugaucgacaucagccucagcaagguggacucccggaaguucgagaacgccgucugggaccagugcaaggaccugugccacaugcacaccggcgugguggucgagaagaagaagcgcgggggcaaggaggagaucacgccccacugcgcccugauggacugcaucauguucgacgccgccgugagcggcgggcucaacaucccggugcugcgggcgguccugccccgcgacaugguguuccggaccuccagccccaaggugguccucugaggacuagucccuguucccagagcccacuuuuuuuucuuuuuuugaaauaaaauagccugucuuucagaucucaaaggcucuuuucagagccaccaaaaaaaaaaaaaaaaaaaaaaaaaaaaaaaaaaaaaaaaaaaaaaaaaaaaaaaaaaaaaaaaagaauu

SEQ ID NO: 20828 - RNA, 2005 nt, Artificial Sequence
  mRNA product Design a-1 (hSL-A64-N5) comprising derived and/or modified sequence from LASV(GA391;Clade III)__CAA36646__SP-IgE_NP(2-570) (opt1)
aggagagucccgcagucggcguccagcggcucugcuuguucgugugugugucguugcaggccuuauucaagcuuaccauggacuggaccuggauccuguuccucguggccgccgcgacccgcguccacagcagcgccuccaaggaggugcgcagcuuccuguggacccagucccuccggcgcgagcugagcggcuacugcuccaacaucaagcugcaggucgugaaggacgcccaggcgcuccugcacgggcuggacuucagcgagguguccaacguccagcggcucaugcgcaagcagaagcgggacgacggcgaccugaagcgccugcgggaccucaaccaggccgugaacaaccugguggagcucaagagcacccagcagaaguccguccugcgcguggggacccugagcuccgacgaccugcucauccuggccgccgaccuggagaagcucaagagcaaggugacccggaccgagcgcccccuguccagcggcgucuacauggggaaccuguccagccagcagcucgaccagcggcgcgcccugcugaacaugaucggcaugaccggcguguccgggggcgggaagggcgcgagcgacgggaucgugcgggucugggacgugaagaacgccgagcuccugaacaaccaguucggcacgaugccgucccugacccucgccugccugaccaagcagggccagguggaccugaacgacgccguccaggcgcucaccgaccuggggcugaucuacacggccaaguaccccaacagcagcgaccucgaccgccugucccagagccaccccauccugaacaugaucgacaccaagaaguccagccucaacaucuccggcuacaacuucagccugggggccgccgugaaggccggcgcgugcaugcuggacggcgggaacaugcucgagaccaucaaggugagcccccagaccauggacggcauccucaaguccauccugaaggucaagaagucccuggggauguucgugagcgacacgccgggcgagcggaaccccuacgagaacauccuguacaagaucugccuguccggggacggcuggcccuacaucgccagccgcaccuccaucgugggccgggccugggagaacaccgucguggaccucgagcaggacaacaagccccagaagaucgggaacggcgggagcaacaagucccugcagagcgccggcuucgccgcggggcugaccuacucccagcucaugacgcugaaggacuucaagugcuucaaccugaucccgaacgccaagaccuggauggacaucgagggccgccccgaggaccccguggagaucgcccuguaccagcccagcuccggcugcuacguccacuucuuccgggagccgaccgaccucaagcaguucaagcaggacgccaaguacagccacgggaucgacgugaccgaccuguucgccgcgcagcccggccugacgagcgccgucaucgaggcccucccccgcaacauggugaucacgugccagggguccgaggacauccggaagcugcuggagagccagggccgccgcgacaucaagcucaucgacaucacccuguccaaggccgacagccggaaguucgagaacgccgugugggaccaguucaaggaccugugccacaugcacaccggggucgugguggagaagaagaagcgcggcggcaaggaggagaucacgccccacugcgcgcucauggacugcaucauguucgacgccgccgucuccgggggccuggacgccaaggugcugcgggugguccucccgcgcgacaugguguuccggaccagcacccccaaggugguccugugaggacuagucccuguucccagagcccacuuuuuuuucuuuuuuugaaauaaaauagccugucuuucagaucucaaaggcucuuuucagagccaccaaaaaaaaaaaaaaaaaaaaaaaaaaaaaaaaaaaaaaaaaaaaaaaaaaaaaaaaaaaaaaaaagaauu

SEQ ID NO: 20829 - RNA, 2002 nt, Artificial Sequence
  mRNA product Design a-1 (hSL-A64-N5) comprising derived and/or modified sequence from LASV(AV;Clade V)__CCA30315__SP-IgE_NP(2-569) (opt1)
aggagagucccgcagucggcguccagcggcucugcuuguucgugugugugucguugcaggccuuauucaagcuuaccauggacuggaccuggauccuguuccucguggccgccgcgacccgcguccacagcagcgccuccaaggaggugaaguccuuccuguggacccagagccuccgccgggagcugagcggcuacugcuccaacaucaagcugcaggucgugaaggacgcccaggcgcuccugcacgggcuggacuucagcgagguguccaacguccagcgccucaugcggaagcagcgccgggacgacagcgaccugaagcgccugcgggaccucaaccaggccgugaacaaccugguggagcugaaguccacccagcagaaguccguccuccgcgugggcacgcugagcagcgacgaccugcucacccuggccgccgaccuggagaagcucaaguccaaggugacccggaccgagcgcccccugagcuccggggucuacaugggcaaccugagcucccagcagcucgaccagcggcgcgcccugcugaaccucaucgggaugacgaacggcagccagggcucccaggcggggcgggacggcguggugcgcgucugggacgugaagaacgccgagcugcugaacaaccaguucgggaccaugccgagccucacccuggccugccugaccaagcagggccagguggaccucaacgacgucgugcaggcccugacggaccuggggcucaucuacaccgcgaaguaccccaacaccagcgaccuggaccggcugacccagucccaccccauccucaacaugaucgacacgaagaaguccagccugaacaucagcggcuacaacuucucccugggcgccgccgugaaggccggggccugcaugcucgacggcgggaacaugcuggagaccaucaaggucagcccccaguccauggacggcauccucaagagcauccugaaggugaagcgcgcgcugggcauguucguguccgacaccccgggggagcggaaccccuacgagaacauccuguacaagaucugccucagcggcgacggguggcccuacaucgccucccgcaccagcaucgucggccgggccugggagaacacggugguggaccuggagaccgacgggaagccccagaagaucggcuccggcaacagcaacaagucccugcagagcgccggguucuccgccggccucaccuacagccagcugaugacccugaaggacgcgaugcugcagcucgacccgaacgccaagacguggauggacaucgaggggcgccccgaggaccccgucgagguggcccuguaccagcccaucuccggcugcuacauccacuucuuccgggagccgaccgaccugaagcaguucaagcaggacgccaaguacagccacgggaucgacaucgccgaccucuucgcggcccagcccggccugaccagcgccgucaucgaggcccugccccgcaacauggugaucacgugccagggcuccgaggacaucaagaagcuccuggagagccaggggcgcaaggacaucaagcugaucgacaucgcccucuccaagaucgacagccggaaguucgagaacgcggugugggaccaguacaaggaccugugccacaugcacaccggcgucgugguggagaagaagaagcgcgggggcaaggaggagaucaccccgcacugcgcccugauggacugcaucauguucgacgccgccgucuccgggggccucaacacccuggugcugcgggcggugcucccccgcgacauggucuuccggaccagcacgccccgcguggugcugugaggacuagucccuguucccagagcccacuuuuuuuucuuuuuuugaaauaaaauagccugucuuucagaucucaaaggcucuuuucagagccaccaaaaaaaaaaaaaaaaaaaaaaaaaaaaaaaaaaaaaaaaaaaaaaaaaaaaaaaaaaaaaaaaagaauu

SEQ ID NO: 20830 - RNA, 2002 nt, Artificial Sequence
  mRNA product Design a-1 (hSL-A64-N5) comprising derived and/or modified sequence from LASV(Togo/2016/7082;Clade VI)__AMR44578__SP-IgE_NP(2-569) (opt1)
aggagagucccgcagucggcguccagcggcucugcuuguucgugugugugucguugcaggccuuauucaagcuuaccauggacuggaccuggauccuguuccucguggccgccgcgacccgcguccacagcagcaacuccaaggaggugaaguccuuccuguggacccagagccuccgccgggagcugagcggcuacugcuccaacaucaagcugcaggucgugaaggacgcccaggcccuccugcacgggcuggacuucagcgagguguccaacguccagcgccucaugcggaagcagaagcgcgacgacggcgaccugaagcggcugcgcgaccucaaccaggcggugaacaaccugguggagcucaagagcguccagcagaaguccauccugcggguggggacccugaccagcgacgaccugcucacccuggccgccgaccuggagaagcucaaguccaaggugacccgcaccgagcggccccugagcuccggcgucuacauggggaaccugagcucccagcagcucgaccagcgccgggcccugcugagcaugaucggcauguccggcgggaaccagaacagccagccgaagggcgacgggguggugcgcgucugggacgugaagaacgccgaccuccugaacaaccaguucggcacgaugcccucccugacccucgcgugccugaccaagcagggccagguggaccugaacgacgccguccaggcccucaccgaccuggggcugaucuacacggccaaguaccccaacagcagcgaccucgaccggcugucccagagccaccccauccugaacaugaucgacaccaagaaguccagccucaacaucuccggcuacaacuucagccugggggcggccaucaagaccggcgccugcaugcuggacgggggcaacaugcucgagaccaucaaggugacgccgcagaccauggacggcauccugaaguccauccugaaggugaagcgcagccucgggauguucaucuccgacacccccggcgagcggaaccccuacgagaacauccuguacaagaucugccugagcggggacggcuggcccuacaucgccucccgcaccgccaucaucgggcgggcgugggagaacacggucguggaccucgagagcgacuccaagccgcagaagaucggcagcaacggcuccaacaagagccugcaguccgccggguucgcccccggccugaccuacagccagcucaugacccugaaggacuccaugcugcagcuggaccccaacgccaagaccuggaucgacaucgaggggcgccccgaggacccgguggaggucgcccucuuccagcccaucagcggcugcuacauccacuucuuccgggagcccacggaccugaagcaguucaagcaggacgcgaaguacagccacgggaucgacgugaccgaccuguucgccgcccagcccggccucaccuccgccgugaucgaggcccugccgcgcaacaugguccugaccugccagggcagcgacgacaucaagaagcuccuggacucccaggggcggcgcgacaucaagcugaucgacgugagccucaacaagaucgacucccgcaaguucgagaacgcggucugggaccaguacaaggaccugugccacaugcacacgggcgugguggucgagaagaagaagaagggcgggaaggaggagaucacgccccacugcgcccugcucgacugcaucauguucgacgccgccgugagcgggggccugaacgccaccgugcugcgggcgguccucccccgcgacaugguguuccggaccuccagccccaaggugguccugugaggacuagucccuguucccagagcccacuuuuuuuucuuuuuuugaaauaaaauagccugucuuucagaucucaaaggcucuuuucagagccaccaaaaaaaaaaaaaaaaaaaaaaaaaaaaaaaaaaaaaaaaaaaaaaaaaaaaaaaaaaaaaaaaagaauu

SEQ ID NO: 20831 - RNA, 2002 nt, Artificial Sequence
  mRNA product Design a-1 (hSL-A64-N5) comprising derived and/or modified sequence from LASV(KAK-428;Clade n.d. (VII))__ANH09741__SP-IgE_NP(2-569) (opt1)
aggagagucccgcagucggcguccagcggcucugcuuguucgugugugugucguugcaggccuuauucaagcuuaccauggacuggaccuggauccuguuccucguggccgccgcgacccgcguccacagcagcaacuccaaggaggugaaguccuuccuguggacccagagccuccgccgggagcugagcggcuacugcaccaacaucaagcugcaggucgugaaggacgcccaggcccuccugcacgggcuggacuucuccgaggugagcaacguccagcgccucaugcggaagcagaagcgcgacgacaacgaccugaagcggcugcgcgaccucaaccaggcggugaacaaccugguggagcugaaguccguccagcagaaguccgugcucaaggugggcacgcugaacagcgacgaccugcucacccuggccgccgaccuggagaagcucaagagcaaggucgugcggaccgagcgcccccuguccagcgggguguacaugggcaaccuguccagccagcagcucgaccagcggcgcgcccugcugaacaugaucgggauggccggcggcucccaggggaaccagccgagccgggacggcgucgugcgcgugugggacgucaagaacgcggaccuccugaacaaccaguucgggaccaugcccucccugacgcucgccugccugaccaagcagggccagguggaccugaacgacgugguccucgcccugaccgaccuggggcucaucuacaccgccaaguaccccaacagcuccgaccuggaccggcugagccagaaccaccccgugcucaacaugaucgacgugaacaagagcucccugaacaucagcggcuacaacuucucccugggcgcggccgucaaggccggggccugcaugcucgacggcgggaacaugcuggagacgaucaagaucagcccgcagaccguggacggcauccugaaguccauccucaaggugaagcgcgcccugggcauguucgucagcgacacccccggggagcggaaccccuacgagaacauccuguacaaggugugccucuccggcaacggguggcccuacaucgcgagccgcaccuccaucgucggccgggccugggagaacacggugguggaccuggagagcaacaagaaccagccgaaggucgggaacaacggcuccaacaagaugcugcagagcuccggcuucgccaccgggcucaccuacagccagcugaugacccugcgcgacuccaugcugcagcucgaccccacggccaagaccuggaucgacaucgagggccggcccgaggaccccguggagcuggcccuguuccagccgagcuccgggugcuacauccacuucuuccgcgagcccaccgaccucaagcaguucaagcaggacgcgaaguacagccacggcaucgacgugaacgaccuguucuccgcccagcccgggcugaccagcgccguccucgaggcccugccccggaacauggugcugacgugccagggcagcgacgacauccgcaagcuccuggacucccaggaccgcaaggacaucaagcugaucgacaucagccucuccaaggccgacgcgcggaaguucgagaacgacgugugggaccaguucaaggaccugugccacaugcacaccggcaucgucguggagaagaagaagaagggcgggaagcaggagaugaccccgcacugcgcccugcucgacugcaucauguucgacgccgccgugagcgggggccugaacguccccacccugcgcgccgugcuccccacggacaugguguuccggaccaucaccaccaaggucgugcugugaggacuagucccuguucccagagcccacuuuuuuuucuuuuuuugaaauaaaauagccugucuuucagaucucaaaggcucuuuucagagccaccaaaaaaaaaaaaaaaaaaaaaaaaaaaaaaaaaaaaaaaaaaaaaaaaaaaaaaaaaaaaaaaaagaauu

SEQ ID NO: 20832 - RNA, 2002 nt, Artificial Sequence; identical to SEQ ID NO: 20826
  mRNA product Design a-1 (hSL-A64-N5) comprising derived and/or modified sequence from LASV(Pinneo-NIG-1969;Clade I)__AIT17837__SP-IgE_NP(2-569) (opt1)

SEQ ID NO: 20833 - RNA, 2002 nt, Artificial Sequence
  mRNA product Design a-1 (hSL-A64-N5) comprising derived and/or modified sequence from LASV(ISTH0009-NIG-2011;Clade II)__AIT17405__SP-IgE_NP(2-569) (opt1)
aggagagucccgcagucggcguccagcggcucugcuuguucgugugugugucguugcaggccuuauucaagcuuaccauggacuggaccuggauccuguuccucguggccgccgcgacccgcguccacagcagcguguccaaggaggucaagagcuuccuguggacccagucccuccgccgggagcugagcggcuacugcuccaacaucaagcuccagguggugaaggacgcccaggcccugcugcacgggcuggacuucagcgaggucuccaacgugcagcgccucaugcggaagcagaagcgcgacgacagcgaccugaagcggcugcgcgaccucaaccaggcggugaacaaccuggucgagcugaaguccacccagcagaaguccauccuccgggugggcacccugaccagcgacgaccugcucacccuggccgccgaccuggagaagcucaagagcaaggugauccgcaccgagcggccccuguccagcggggucuacaugggcaaccuguccacgcagcagcucgagcagcgccgggcccugcugaacaugaucgggauggugggcggcgcccaggggacccagccgggccgcgacggggugguccgggugugggacgugaagaaccccgaccuccugaacaaccaguucggcaccaugcccagccugacccucgcgugccugacgaagcaggggcaggucgaccugaacgacgccgugcucgcccugaccgaccugggccucaucuacaccgccaaguaccccaacuccagcgaccuggaccgccugucccagagccacccgauccucaacaugguggacaucaagaaguccagccugaacaucagcggcuacaacuucucccugggggcggccgucaaggccggcgccugcaugcucgacgggggcaacaugcuggagaccaucaaggugacgccccagaccauggacggcauccucaagagcauccugaaggugaagcggucccuggggauguucgucagcgacacccccggcgagcgcaaccccuacgagaacauccuguacaagaucugccucuccggggacggcuggccguacaucgccagccggaccuccaucguggggcgcgcgugggagaacacgaccguggaccuggagagcgacggcaagccccagaaggucggcuccgccgggagcaacaagucccugcagagcgccggcuuccccaccgggcucaccuacucccagcugaugacgcugaaggacagcaugaugcagcuggaccccuccgccaagaccuggaucgacaucgagggccggccggaggaccccguggagaucgcccucuaccagcccaugagcgggugcuacauccacuucuuccgcgagcccaccgaccugaagcaguucaagcaggacgcgaaguacucccacggcaucgacgucgccgaccuguucccggcccagcccggccucaccagcgccgugaucgaggcccugccccggaacauggugcugacgugccaggggagcgacgacaucaagcgccuccuggacucccagggccgccgggacaucaagcugaucgacaucgcgcucagcaaggccgacucccgccgguucgagaacgccgucugggaccagugcaaggaccugugccacaugcacaccggggugguggucgagaagaagaagcgcggcgggaaggaggagaucacgccccacugcgcccugauggacugcaucauguacgacgccgcggugagcggcggccucaacaucccggugcugcgggccguccugccccgcgacaugguguuccggaccuccagccccaaggugguccucugaggacuagucccuguucccagagcccacuuuuuuuucuuuuuuugaaauaaaauagccugucuuucagaucucaaaggcucuuuucagagccaccaaaaaaaaaaaaaaaaaaaaaaaaaaaaaaaaaaaaaaaaaaaaaaaaaaaaaaaaaaaaaaaaagaauu

SEQ ID NO: 20834 - RNA, 2002 nt, Artificial Sequence
  mRNA product Design a-1 (hSL-A64-N5) comprising derived and/or modified sequence from LASV(ISTH2010-NIG-2012;Clade II)__AIT17483__SP-IgE_NP(2-569) (opt1)
aggagagucccgcagucggcguccagcggcucugcuuguucgugugugugucguugcaggccuuauucaagcuuaccauggacuggaccuggauccuguuccucguggccgccgcgacccgcguccacagcagcgccuccaaggaggugaaguccuuccuguggacccagagccuccgccgggagcugagcggcuacugcuccaacaucaagcugcaggucgugaaggacgcccaggcgcuccugcacgggcuggacuucagcgagguguccaacguccagcgccucaugcggaagcagaagcgcgacgacagcgaccugaagcggcugcgcgaccucaaccaggccgugaacaaccugguggagcugaaguccacccagcagaaguccauccuccgggucggcacgcugaccagcgacgaccugcucacccuggccgccgaccuggagaagcucaagagcaaggugauccgcaccgagcggccccuguccagcgggguguacaugggcaaccuguccacgcagcagcucgagcagcgccgggcccugcugaaccucaucgggauggucggcggcgcgcaggggacccagccgggccgcgacgggguggugcgggucugggacgugaagaaccccgaccugcugaacaaccaguucggcaccaugcccagccucacccuggccugccugacgaagcagggccagguggaccucaacgacgccguccuggcccugaccgaccucgggcugaucuacaccgcgaaguaccccaacuccagcgaccuggaccgccucucccagagccacccgauccugaacaugguggacaccaagaaguccagccugaacaucagcggcuucaacuucucccucggggccgccgugaaggccggcgccugcaugcuggacgggggcaacaugcuggagacgaucaaggucacgccccagaccauggacggcauccucaagagcauccugaaggugaagaagucccuggggauguucgugagcgacacccccggcgagcggaaccccuacgagaacauccucuacaagaucugccuguccggggacggcuggccguacaucgcgagccgcaccuccaucgucgggcgggccugggagaacaccaccguggaccuggagagcgacggcaagccccacaaggugggcaccgccggguccaacaagagccuccaguccgccggcuuccccacggggcugaccuacagccagcugaugacccugaaggacuccaugaugcagcucgaccccagcgccaagaccuggaucgacaucgagggccgcccggaggaccccgucgagaucgcgcuguaccagcccauguccgggugcuacauccacuucuuccgggagcccacggaccugaagcaguucaagcaggacgccaaguacagccacggcaucgacguggccgaccucuucccggcccagcccggccugaccuccgccgucaucgaggcgcugccccgcaacauggugcugaccugccaggggagcgacgacaucaagcggcuccuggacagccagggccgccgcgacaucaagcucaucgacaucgcccuguccaaggccgacagccggcgcuucgagaacgccgugugggaccagugcaaggaccugugccacaugcacaccggggucgugguggagaagaagaagcggggcgggaaggaggagaucacgccccacugcgcccucauggacugcaucauguacgacgcggccgucuccggcggccugaacaucccggugcugcgcgccgugcucccccgggacauggucuuccgcaccagcucccccaagguggugcugugaggacuagucccuguucccagagcccacuuuuuuuucuuuuuuugaaauaaaauagccugucuuucagaucucaaaggcucuuuucagagccaccaaaaaaaaaaaaaaaaaaaaaaaaaaaaaaaaaaaaaaaaaaaaaaaaaaaaaaaaaaaaaaaaagaauu

SEQ ID NO: 20835 - RNA, 2002 nt, Artificial Sequence
  mRNA product Design a-1 (hSL-A64-N5) comprising derived and/or modified sequence from LASV(Lassa virus/H.sapiens-wt/NGA/2015/ISTH_0543;Clade II)__AVO03640__SP-IgE_NP(2-569) (opt1)
aggagagucccgcagucggcguccagcggcucugcuuguucgugugugugucguugcaggccuuauucaagcuuaccauggacuggaccuggauccuguuccucguggccgccgcgacccgcguccacagcagcgccuccaaggaggugaaguccuuccuguggacccagagccuccgccgggagcugagcggcuacugcuccaacaucaagcugcaggucgugaaggacgcccaggcgcuccugcacgggcuggacuucagcgagguguccaacguccagcgccucaugcggaagcagaagcgcgacgacagcgaccugaagcggcugcgcgaccucaaccaggccgugaacaaccugguggagcugaaguccacccagcagaaguccauccuccgggucggcacgcugaccagcgacgaccugcucacccuggccgccgaccuggagaagcucaagagcaaggugauccgcaccgagcggccccuguccagcgggguguacaugggcaaccuguccacgcagcagcucgagcagcgccgggcccugcugaacaugaucgggauggucggcggcgcgcaggggacccagccgggccgcgacgggguggugcgggucugggacgugaagaaccccgaccuccugaacaaccaguucggcaccaugcccagccugacccucgccugccugacgaagcagggccagguggaccugaacgacgccguccucgcccugaccgaccuggggcucaucuacaccgcgaaguaccccaacuccagcgaccuggaccgccugucccagagccacccgauccucaacaugguggacaccaagaaguccagccugaacaucagcggcuacaacuucucccugggggccgccgugaaggccggcgccugcaugcucgacgggggcaacaugcuggagacgaucaaggucacgccccagaccauggacggcauccucaagagcauccugaaggugaagaagucccuggggauguucgugagcgacacccccggcgagcggaaccccuacgagaacauccuguacaagaucugccucuccggggacggcuggccguacaucgcgagccgcaccuccaucgucgggcgggccugggagaacaccaccguggaccuggagagcgacggcaagccccagaaggugggcuccgccgggagcaacaagucccugcagagcgccggcuuccccaccgggcucacguacucccagcugaugacccugaaggacagcaugaugcagcuggaccccuccgccaagaccuggaucgacaucgagggccgcccggaggaccccgucgagaucgcgcucuaccagcccaugagcgggugcuacauccacuucuuccgggagcccaccgaccugaagcaguucaagcaggacgccaaguacucccacggcaucgacguggccgaccuguucccggcccagcccggccucacgagcgccgucaucgaggcgcugccccgcaacauggugcugaccugccaggggagcgacgacaucaagcggcuccuggacucccagggccgcaaggacaucaagcugaucgacaucgcccucagcaaggccgacucccgccgguucgagaacgccgugugggaccagugcaaggaccugugccacaugcacaccggggucgugguggagaagaagaagcgcggcgggaaggaggagaucacgccccacugcgcccugauggacugcaucauguacgacgcggccgucagcggcggccucaacaucccggugcugcgggccgugcugccccgcgacauggucuuccggaccuccagccccaagguggugcucugaggacuagucccuguucccagagcccacuuuuuuuucuuuuuuugaaauaaaauagccugucuuucagaucucaaaggcucuuuucagagccaccaaaaaaaaaaaaaaaaaaaaaaaaaaaaaaaaaaaaaaaaaaaaaaaaaaaaaaaaaaaaaaaaagaauu

SEQ ID NO: 20836 - RNA, 2002 nt, Artificial Sequence
  mRNA product Design a-1 (hSL-A64-N5) comprising derived and/or modified sequence from LASV(Lassa virus/H.sapiens-wt/NGA/2016/ISTH_0009;Clade II)__AVO03572__SP-IgE_NP(2-569) (opt1)
aggagagucccgcagucggcguccagcggcucugcuuguucgugugugugucguugcaggccuuauucaagcuuaccauggacuggaccuggauccuguuccucguggccgccgcgacccgcguccacagcagcgccuccaaggaggugaaguccuuccuguggacccagagccuccgccgggagcugagcggcuacugcuccaacaucaagcugcaggucgugaaggacgcccaggcgcuccugcacgggcuggacuucagcgagguguccaacguccagcgccucaugcggaagcagaagcgcgacgacagcgaccugaagcggcugcgcgaccucaaccaggccgugaacaaccugguggagcugaaguccacccagcagaaguccauccuccgggucggcacgcugaccagcgacgaccugcucacccuggccgccgaccuggagaagcucaagagcaaggugauccgcaccgagcggccccuguccagcgggguguacaugggcaaccuguccacgcagcagcucgagcagcgccgggcccugcugaacaugaucgggauggucggcggcgcgcaggggacccagccgggccgcgacgggguggugcgggucugggacgugaagaaccccgaccuccugaacaaccaguucggcaccaugcccagccugacccucgccugccugacgaagcagggccagguggaccugaacgacgccguccucgcccugaccgaccuggggcucaucuacaccgcgaaguaccccaacuccagcgaccuggaccgccugucccagagccacccgauccucaacaugguggacaccaagaaguccagccugaacaucagcggcuacaacuucucccugggggccgccgugaaggccggcgccugcaugcucgacgggggcaacaugcuggagacgaucaaggucacgccccagaccauggacggcauccucaagagcauccugaaggugaagaagucccuggggauguucgugagcgacacccccggcgagcggaaccccuacgagaacauccuguacaagaucugccucuccggggacggcuggccguacaucgcgagccgcaccuccaucgucgggcgggccugggagaacaccaccguggaccuggagagcgacggcaagccccagaaggugggcuccgccgggagcaacaagucccugcagagcgccggcuuccccaccgggcucacguacucccagcugaugacccugaaggacagcaugaugcagcuggaccccuccgccaagaccuggaucgacaucgagggccgcccggaggaccccgucgagaucgcgcucuaccagcccaugagcgggugcuacauccacuucuuccgggagcccaccgaccugaagcaguucaagcaggacgccaaguacucccacggcaucgacguggccgaccuguucccggcccagcccggccucacgagcgccgucaucgaggcgcugccccgcaacauggugcugaccugccaggggagcgacgacaucaagcggcuccuggacucccagggccgccgcgacaucaagcugaucgacaucgcccucagcaaggccgacucccggcgcuucgagaacgccgugugggaccagugcaaggaccugugccacaugcacaccggggucgugguggagaagaagaagcggggcgggaaggaggagaucacgccccacugcgcccugauggacugcaucauguacgacgcggccgucagcggcggccucaacaucccggugcugcgcgccgugcugccccgggacauggucuuccgcaccuccagccccaagguggugcucugaggacuagucccuguucccagagcccacuuuuuuuucuuuuuuugaaauaaaauagccugucuuucagaucucaaaggcucuuuucagagccaccaaaaaaaaaaaaaaaaaaaaaaaaaaaaaaaaaaaaaaaaaaaaaaaaaaaaaaaaaaaaaaaaagaauu

SEQ ID NO: 20837 - RNA, 2002 nt, Artificial Sequence
  mRNA product Design a-1 (hSL-A64-N5) comprising derived and/or modified sequence from LASV(Lassa virus/H.sapiens-wt/NGA/2016/ISTH_0017;Clade II)__AVO03568__SP-IgE_NP(2-569) (opt1)
aggagagucccgcagucggcguccagcggcucugcuuguucgugugugugucguugcaggccuuauucaagcuuaccauggacuggaccuggauccuguuccucguggccgccgcgacccgcguccacagcagcgccuccaaggaggugaaguccuuccuguggacccagagccuccgccgggagcugagcggcuacugcuccagcaucaagcugcaggucgugaaggacgcccaggcgcuccugcacgggcuggacuucuccgaggugagcaacguccagcgccucaugcggaagcagaagcgcgacgacuccgaccugaagcggcugcgcgaccucaaccaggccgugaacaaccugguggagcucaagagcacccagcagaaguccauccugcgggucggcacgcugaccagcgacgaccugcucacccuggccgccgaccuggagaagcucaaguccaaggugauccgcaccgagcggccccugagcuccgggguguacaugggcaaccugagcacgcagcagcucgagcagcgccgggcccugcugaacaugaucgggauggcgggcggcgcccaggggacccagccgggccgcgacggggucgugcgggugugggacgucaagaaccccgaccuccugaacaaccaguucggcaccaugcccucccugacccucgccugccugacgaagcagggccagguggaccugaacgacgccgugcucgcgcugaccgaccuggggcucaucuacaccgccaaguaccccaacagcuccgaccuggaccgccugagccagagccacccgauccucaacauggucgacaccaagaaguccagccugaacaucuccggcuacaacuucagccugggggccgccgugaaggccggcgcgugcaugcucgacgggggcaacaugcuggagacgaucaaggugacgccccagaccauggacggcauccugaaguccauccucaaggucaagcggagccuggggauguucguguccgacgcccccggcgagcgcaaccccuacgagaacauccuguacaagaucugccucagcggggacggcuggccguacaucgccucccggaccagcaucguggggcgcgccugggagaacaccaccgucgaccuggaguccgacggcaagccccagaaggugggcgccaccgggagcaacaagucccugcagagcgcgggcuuccccaccgggcucacguacucccagcugaugacccugaaggacagcaugaugcagcuggaccccuccgccaagaccuggaucgacaucgagggccggccggaggaccccguggaggucgcccucuaccagcccgugagcgggugcuacauccacuucuuccgcgagcccaccgaccugaagcaguucaagcaggacgccaaguacucccacggcaucgacgucgccgaccuguucccggcgcagcccggccucacgagcgccgugaucgaggcccugccccggaacauggugcugaccugccaggggagcgacgacaucaagaagcuccuggacucccagggccgcaaggacaucaagcugaucgacaucgcccucagcaaggccgacucccgccgguucgagaacgcggucugggaccagugcaaggaccugugccacaugcacaccggggugguggucgagaagaagaagcgcggcgggaaggaggagaucacgccccacugcgcccugauggacugcaucauguacgacgccgccgugagcggcggccucaacaucccggugcugcgggcgguccugccccgcgacaugguguuccggaccuccagccccaaggugguccucugaggacuagucccuguucccagagcccacuuuuuuuucuuuuuuugaaauaaaauagccugucuuucagaucucaaaggcucuuuucagagccaccaaaaaaaaaaaaaaaaaaaaaaaaaaaaaaaaaaaaaaaaaaaaaaaaaaaaaaaaaaaaaaaaagaauu

SEQ ID NO: 20838 - RNA, 2002 nt, Artificial Sequence
  mRNA product Design a-1 (hSL-A64-N5) comprising derived and/or modified sequence from LASV(Lassa virus/H.sapiens-wt/NGA/2018/ISTH_0959;Clade II)__AVV65100__SP-IgE_NP(2-569) (opt1)
aggagagucccgcagucggcguccagcggcucugcuuguucgugugugugucguugcaggccuuauucaagcuuaccauggacuggaccuggauccuguuccucguggccgccgcgacccgcguccacagcagcgccuccaaggaggugaaguccuuccuguggacccagagccuccgccgggagcugagcggcuacugcuccaacaucaagcugcaggucgugaaggacgcccaggcgcuccugcacgggcuggacuucagcgagguguccaacguccagcgccucaugcggaagcagaagcgcgacgacagcgaccugaagcggcugcgcgaccucaaccaggccgugaacaaccugguggagcugaaguccacccagcagaaguccauccuccgggucggcacccugaccagcgacgaccugcucacccuggccgccgaccuggagaagcucaagagcaaggugauccgcaccgagcggccccuguccagcgggguguacaugggcaaccuguccacgcagcagcucgagcagcgccgggcccugcugaaccucaucgggauggucggcggcgcgcaggggacccagccgggccgcgacgggguggugcgggucugggacgugaagaaccccgaccugcugaacaaccaguucggcaccaugcccagccucacccuggccugccugacgaagcagggccagguggaccucaacgacgucgugcuggcccugaccgaccucgggcugaucuacaccgccaaguaccccaacuccagcgaccuggaccgccucucccagagccacccgauccugaacaugguggacaccaagaaguccagccugaacaucagcggcuucaacuucucccucggggcggccgucaaggccggcgccugcaugcuggacgggggcaacaugcuggagacgaucaaggugacgccccagaccauggacggcauccucaagagcauccugaaggugaagaagucccuggggauguucgucagcgacacccccggcgagcggaaccccuacgagaacauccucuacaagaucugccuguccggggacggcuggccguacaucgccagccgcaccuccaucguggggcgggcgugggagaacaccaccguggaccuggagagcgacggcaagccccacaaggucggcaccgccggguccaacaagagccuccaguccgccggcuuccccacggggcugaccuacagccagcugaugacccugaaggacuccaugaugcagcucgaccccagcgccaagaccuggaucgacaucgagggccgcccggaggaccccguggagaucgcccuguaccagcccauguccgggugcuacauccacuucuuccgggagcccacggaccugaagcaguucaagcaggacgcgaaguacagccacggcaucgacgucgccgaccucuucccggcccagcccggccugaccuccgccgugaucgaggcccugccccgcaacauggugcugaccugccaggggagcgacgacaucaagcggcuccuggacagccagggccgcaaggacaucaagcucaucgacaucgcgcuguccaagaccgacagccgccgguucgagaacgccgucugggaccagugcaaggaccugugccacaugcacacgggggugguggucgagaagaagaagcgcggcgggaaggaggagaucacgccccacugcgcccucauggacugcaucauguacgacgccgccguguccggcggccugaacaucccggugcugcgggcgguccucccccgcgacaugguguuccggaccagcucccccaaggugguccugugaggacuagucccuguucccagagcccacuuuuuuuucuuuuuuugaaauaaaauagccugucuuucagaucucaaaggcucuuuucagagccaccaaaaaaaaaaaaaaaaaaaaaaaaaaaaaaaaaaaaaaaaaaaaaaaaaaaaaaaaaaaaaaaaagaauu

SEQ ID NO: 20839 - RNA, 2002 nt, Artificial Sequence
  mRNA product Design a-1 (hSL-A64-N5) comprising derived and/or modified sequence from LASV(LASV003-NIG-2008;Clade II)__AIT17581__SP-IgE_NP(2-569) (opt1)
aggagagucccgcagucggcguccagcggcucugcuuguucgugugugugucguugcaggccuuauucaagcuuaccauggacuggaccuggauccuguuccucguggccgccgcgacccgcguccacagcagcgccuccaaggaggugaaguccuuccuguggacccagagccuccgccgggagcugagcggcuacugcuccagcaucaagcugcaggucgugaaggacgcccaggcgcuccugcacgggcuggacuucuccgaggugagcaacguccagcgccucaugcggaagcagaagcgcgacgacuccgaccugaagcggcugcgcgaccucaaccaggccgugaacaaccugguggagcucaagagcacccagcagaaguccguccugcgggugggcacccugaccagcgacgaccugcucacccuggccgccgaccuggagaagcucaaguccaaggugauccgcaccgagcggccccugagcuccggggucuacaugggcaaccugagcgcccagcagcucgagcagcgccggacgcugcugaacaugaucgggauggugggcggcgcgcaggggacccagccgggccgcgacggggugguccgggugugggacgugaagaaccccgaccuccugaacaaccaguucggcaccaugcccucccugacccucgccugccugacgaagcaggggcaggucgaccugaacgacguggugcucgcccugaccgaccugggccucaucuacaccgccaaguaccccaacagcuccgaccuggaccgccugagccagagccacccgauccucuccauggucgacaccaagaaguccagccugaacaucagcggcuacaacuucucccugggggcggccgugaaggccggcgccugcaugcucgacgggggcaacaugcuggagacgaucaaggugacgccccagaccauggacggcauccucaagagcauccugaaggucaagaagucccuggggauguucgugagcgacacccccggcgagcggaaccccuacgagaacauccuguacaagaucugccucuccggggacggcuggccguacaucgccagccgcaccuccaucguggggcgggcgugggagaacaccaccgucgaccuggagagcgacggcaagccccagaaggugggcaccgccggguccaacaagagccugcaguccgccggcuuccccacggggcucaccuacagccagcugaugacccugaaggacuccaugaugcagcuggaccccagcgccaagaccuggaucgacaucgagggccgcccggaggaccccgucgagaucgcccucuaccagcccauguccgggugcuacauccacuucuuccgggagcccacggaccugaagcaguucaagcaggacgcgaaguacagccacggcaucgacgugaccgaccuguucccggcccagcccggccucaccagcgccgugaucgaggcccugccccgcaacaugguccugaccugccagggguccgacgacaucaagcggcuccuggacagccagggccgccgcgacaucaagcugaucgacaucgcccucuccaaggcggacagccggcgcuucgagaacgccgugugggaccagugcaaggaccugugccacaugcacacggggguggucguggagaagaagaagcggggcgggaaggaggagaucacgccccacugcgcccugauggacugcaucauguacgacgccgccguguccggcggccucaacaucccgguccugcgcgcggugcugccccgggacaugguguuccgcaccagcucccccaaggucgugcucugaggacuagucccuguucccagagcccacuuuuuuuucuuuuuuugaaauaaaauagccugucuuucagaucucaaaggcucuuuucagagccaccaaaaaaaaaaaaaaaaaaaaaaaaaaaaaaaaaaaaaaaaaaaaaaaaaaaaaaaaaaaaaaaaagaauu

SEQ ID NO: 20840 - RNA, 2002 nt, Artificial Sequence
  mRNA product Design a-1 (hSL-A64-N5) comprising derived and/or modified sequence from LASV(LASV035-NIG-2009;Clade II)__AIT17589__SP-IgE_NP(2-569) (opt1)
aggagagucccgcagucggcguccagcggcucugcuuguucgugugugugucguugcaggccuuauucaagcuuaccauggacuggaccuggauccuguuccucguggccgccgcgacccgcguccacagcagcgccuccaaggaggugaaguccuuccuguggacccagagccuccgccgggagcugagcggcuacugcuccagcaucaagcugcaggucgugaaggacgcccaggcgcuccugcacgggcuggacuucuccgaggugagcaacguccagcgccucaugcggaagcagaagcgcgacgacuccgaccugaagcggcugcgcgaccucaaccaggccgugaacaaccugguggagcucaagagcacccagcagaaguccauccugcgggucggcacgcugaccagcgacgaccugcucacccuggccgccgaccuggagaagcucaaguccaaggugauccgcaccgagcggccccugagcuccgggguguacaugggcaaccugagcgcccagcagcucgagcagcgccgggcgcugcugaacaugaucgggauggucggcggcgcccaggggacgcagccgggccgcgacgggguggugcgggucugggacgugaagaaccccgaccuccugaacaaccaguucggcaccaugcccucccugacccucgccugccugaccaagcagggccagguggaccugaacgacgccguccucgcgcugacggaccuggggcucaucuacaccgccaaguaccccaacagcuccgaccuggaccgccugagccagagccacccgauccucaacaugguggacaccaagaaguccagccugaacaucuccggcuacaacuucagccugggggccgccgugaaggccggcgcgugcaugcucgacgggggcaacaugcuggagaccaucaaggucacgccccagaccauggacggcauccugaaguccauccucaaggugaagcggagccuggggauguucguguccgacacccccggcgagcgcaaccccuacgagaacauccuguacaagaucugccucagcggggacggcuggccguacaucgccucccggaccagcaucgucgggcgcgccugggagaacacgaccguggaccuggaguccgacggcaagccccagaaggugggcaccaccgggagcaacaagucccugcagagcgccggcuuccccacggggcucaccuacucccagcugaugacccugaaggacagcaugaugcagcuggaccccuccgccaagaccuggaucgacaucgagggccggccggaggaccccgucgagaucgcgcucuaccagcccaugagcgggugcuacauccacuucuuccgcgagcccacggaccugaagcaguucaagcaggacgccaaguacucccacggcaucgacguggccgaccuguucccggcccagcccggccucaccagcgccgucaucgaggcgcugccccggaacauggugcugaccugccaggggagcgacgacaucaagaagcuccuggacucccagggccgccgcgacaucaagcugaucgacaucgcccucagcaaggccgacucccggaaguucgagaacgccgugugggaccagugcaaggaccugugccacaugcacaccggggucgugguggagaagaagaagcgcggcgggaaggaggagaucacgccccacugcgcccugauggacugcaucauguacgacgcggccgucagcggcggccucaacaucccggugcugcgggccgugcugccccgcgacauggucuuccggaccuccagccccaagguggugcucugaggacuagucccuguucccagagcccacuuuuuuuucuuuuuuugaaauaaaauagccugucuuucagaucucaaaggcucuuuucagagccaccaaaaaaaaaaaaaaaaaaaaaaaaaaaaaaaaaaaaaaaaaaaaaaaaaaaaaaaaaaaaaaaaagaauu

SEQ ID NO: 20841 - RNA, 2002 nt, Artificial Sequence
  mRNA product Design a-1 (hSL-A64-N5) comprising derived and/or modified sequence from LASV(LASV1000-NIG-2009;Clade II)__AIT17783__SP-IgE_NP(2-569) (opt1)
aggagagucccgcagucggcguccagcggcucugcuuguucgugugugugucguugcaggccuuauucaagcuuaccauggacuggaccuggauccuguuccucguggccgccgcgacccgcguccacagcagcgccuccaaggaggugaaguccuuccuguggacccagagccuccgccgggagcugagcggcuacugcuccaacaucaagcugcaggucgugaaggacgcccaggcgcuccugcacgggcuggacuucagcgagguguccaacguccagcgccucaugcggaagcagaagcgcgacgacagcgaccugaagcggcugcgcgaccucaaccaggccgugaacaaccugguggagcugaaguccacccagcagaaguccauccuccgggucggcacgcugaccagcgacgaccugcucacccuggccgccgaccuggagaagcucaagagcaaggugauccgcaccgagcggccccuguccagcgggguguacaugggcaaccuguccacgcagcagcucgagcagcgccgggcccugcugaacaugaucgggauggucggcggcgcgcaggggacccagccgggccgcgacgggguggugcgggucugggacgugaagaaccccgaccuccugaacaaccaguucggcaccaugcccagccugacccucgccugccugacgaagcagggccagguggaccugaacgacgucgugcucgcccugaccgaccuggggcucaucuacaccgccaaguaccccaacuccagcgaccuggaccgccugucccagagccacccgauccucaacaugguggacaccaagaaguccagccugaacaucagcggcuacaacuucucccugggggcggccgucaaggccggcgccugcaugcucgacgggggcaacaugcuggagacgaucaaggugacgccccagaccauggacggcauccucaagagcauccugaaggugaagaagucccuggggauguucgucagcgacacccccggcgagcggaaccccuacgagaacauccuguacaagaucugccucuccggggacggcuggccguacaucgccagccgcaccuccaucguggggcgggcgugggagaacaccaccguggaccuggagagcgacggcaagccccagaaggucggcaccgccggguccaacaagagccugcaguccgccggcuuccccacggggcucaccuacagccagcugaugacccugaaggacuccaugaugcagcuggaccccagcgccaagaccuggaucgacaucgagggccgcccggaggaccccguggagaucgcccucuaccagcccgucuccgggugcuacauccacuucuuccgggagcccacggaccugaagcaguucaagcaggacgcgaaguacagccacggcaucgacguggccgaccuguucccggcccagcccggccucaccuccgccgugaucgaggcccugccccgcaacaugguccugaccugccaggggagcgacgacaucaagcggcuccuggacagccagggccgccgcgacaucaagcugaucgacaucgcgcucuccaaggccgacagccggcgcuucgagaacgccgugugggaccagugcaaggaccugugccacaugcacaccgggguggucguggagaagaagaagcggggcgggaaggaggagaucacgccccacugcgcccugauggacugcaucauguacgacgccgcgguguccggcggccucaacaucccgguccugcgcgccgugcugccccgggacaugguguuccgcaccagcucccccaaggucgugcucugaggacuagucccuguucccagagcccacuuuuuuuucuuuuuuugaaauaaaauagccugucuuucagaucucaaaggcucuuuucagagccaccaaaaaaaaaaaaaaaaaaaaaaaaaaaaaaaaaaaaaaaaaaaaaaaaaaaaaaaaaaaaaaaaagaauu

SEQ ID NO: 20842 - RNA, 2002 nt, Artificial Sequence
  mRNA product Design a-1 (hSL-A64-N5) comprising derived and/or modified sequence from LASV(LASV221-NIG-2010;Clade II)__AIT17625__SP-IgE_NP(2-569) (opt1)
aggagagucccgcagucggcguccagcggcucugcuuguucgugugugugucguugcaggccuuauucaagcuuaccauggacuggaccuggauccuguuccucguggccgccgcgacccgcguccacagcagcgccuccaaggaggugaaguccuuccuguggacccagagccuccgccgggagcugagcggcuacugcuccagcaucaagcugcaggucgugaaggacgcccaggcgcuccugcacgggcuggacuucuccgaggugagcaacguccagcgccucaugcggaagcagcgccgggacgacuccgaccugaagcgccugcgggaccucaaccaggccgugaacaaccugguggagcucaagagcacccagcagaaguccauccugcgcgucggcacgcugaccagcgacgaccugcucacccuggccgccgaccuggagaagcucaaguccaaggugauccggaccgagcgcccccugagcuccgggguguacaugggcaaccugagcacgcagcagcucgagcagcggcgcgcccugcugaacaugaucgggauggucggcggcgcgcaggggacccagccgggccgggacgggguggugcgcgucugggacgugaagaaccccgaccuccugaacaaccaguucggcaccaugcccucccugacccucgccugccugacgaagcagggccagguggaccugaacgacgccguccucgcccugaccgaccuggggcucaucuacaccgcgaaguaccccaacagcuccgaccuggaccggcugagccagagccacccgauccucaacaugguggacaccaagaaguccagccugaacaucuccggcuacaacuucagccugggggccgccgugaaggccggcgccugcaugcucgacgggggcaacaugcuggagacgaucaaggucacgccccagaccguggacggcauccugaaguccauccucaaggugaagcgcagccuggggauguucgucuccgacacccccggcgagcggaaccccuacgagaacauccuguacaagaucugccucagcggggacggcuggccguacaucgcgucccgcaccagcaucguggggcgggccugggagaacaccaccguggaccuggaguccgacggcaagccccagaaggucggcaccgccgggagcaacaagucccugcagagcgccggcuuccccacggggcucaccuacucccagcugaugacccugaaggacagcaugaugcagcuggaccccuccgccaagaccuggaucgacaucgagggccgcccggaggaccccguggagaucgcgcucuaccagcccaugagcgggugcuacauccacuucuuccgggagcccacggaccugaagcaguucaagcaggacgccaaguacucccacggcaucgacgucgccgaccuguucccggcccagcccggccucaccagcgccgugaucgaggcgcugccccgcaacauggugcugaccugccaggggagcgacgacaucaagcgccuccuggacucccagggccggcgcgacaucaagcugaucgacaucgcccucagcaaggccgacucccggaaguucgagaacgccgucugggaccagugcaaggaccugugccacaugcacaccggggugguggucgagaagaagaagcgcggcgggaaggaggagaucacgccccacugcgcccugauggacugcaucauguacgacgcggccgugagcggcggccucaacaucccggugcugcgggccguccugccccgcgacaugguguuccggaccuccagccccaaggugguccucugaggacuagucccuguucccagagcccacuuuuuuuucuuuuuuugaaauaaaauagccugucuuucagaucucaaaggcucuuuucagagccaccaaaaaaaaaaaaaaaaaaaaaaaaaaaaaaaaaaaaaaaaaaaaaaaaaaaaaaaaaaaaaaaaagaauu

SEQ ID NO: 20843 - RNA, 2002 nt, Artificial Sequence
  mRNA product Design a-1 (hSL-A64-N5) comprising derived and/or modified sequence from LASV(LASV237-NIG-2010;Clade II)__AIT17639__SP-IgE_NP(2-569) (opt1)
aggagagucccgcagucggcguccagcggcucugcuuguucgugugugugucguugcaggccuuauucaagcuuaccauggacuggaccuggauccuguuccucguggccgccgcgacccgcguccacagcagcgccuccaaggaggugaaguccuuccuguggacccagagccuccgccgggagcugagcggcuacugcuccaacaucaagcugcaggucgugaaggacgcccaggcgcuccugcacgggcuggacuucagcgagguguccaacguccagcgccucaugcggaagcagaagcgcgacgacagcgaccugaagcggcugcgcgaccucaaccaggccgugaacaaccugguggagcugaaguccacccagcagaaguccauccuccgggucggcacccugaccagcgacgaccugcucacccuggccgccgaccuggagaagcucaagagcaaggugauccgcaccgagcggccccuguccagcgggguguacaugggcaaccuguccacgcagcagcucgagcagcgccgggcccugcugaacaugaucgggauggucggcggcgcgcaggggacccagccgggccgcgacgggguggugcgggucugggacgugaagaaccccgaccuccugaacaaccaguucggcaccaugcccagccugacccucgccugccugacgaagcagggccagguggaccugaacgacgccguccucgcccugaccgaccuggggcucaucuacaccgcgaaguaccccaacuccagcgaccuggaccgccugucccagagccacccgauccucaacaugguggacaucaagaaguccagccugaacaucagcggcuacaacuucucccugggggccgccgugaaggccggcgccugcaugcucgacgggggcaacaugcuggagaccaucaaggucacgccccagaccauggacggcauccucaagagcauccugaaggugaagcggucccuggggauguucgugagcgacacccccggcgagcgcaaccccuacgagaacauccuguacaagaucugccucuccggggacggcuggccguacaucgcgagccggaccuccaucgucgggcgcgccugggagaacacgaccguggaccuggagagcgacggcaagccccagaaggugggcuccgccgggagcaacaagucccugcagagcgccggcuuccccaccgggcucaccuacucccagcugaugacgcugaaggacagcaugaugcagcuggaccccuccgccaagaccuggaucgacaucgagggccggccggaggaccccgucgagaucgcgcucuaccagcccaugagcgggugcuacauccacuucuuccgcgagcccaccgaccugaagcaguucaagcaggacgccaaguacucccacggcaucgacguggccgaccuguucccggcccagcccggccucaccagcgccgucaucgaggcgcugccccggaacauggugcugacgugccaggggagcgacgacaucaagcgccuccuggacucccagggccgccgggacaucaagcugaucgacaucgcccucagcaaggccgacucccgccgguucgagaacgccgugugggaccagugcaaggaccugugccacaugcacaccggggucgugguggagaagaagaagcgcggcgggaaggaggagaucacgccccacugcgcccugauggacugcaucauguacgacgcggccgucagcggcggccucaacaucccggugcugcgggccgugcugccccgcgacauggucuuccggaccuccagccccaagguggugcucugaggacuagucccuguucccagagcccacuuuuuuuucuuuuuuugaaauaaaauagccugucuuucagaucucaaaggcucuuuucagagccaccaaaaaaaaaaaaaaaaaaaaaaaaaaaaaaaaaaaaaaaaaaaaaaaaaaaaaaaaaaaaaaaaagaauu

SEQ ID NO: 20844 - RNA, 2002 nt, Artificial Sequence
  mRNA product Design a-1 (hSL-A64-N5) comprising derived and/or modified sequence from LASV(LASV253-NIG-2011;Clade II)__AIT17671__SP-IgE_NP(2-569) (opt1)
aggagagucccgcagucggcguccagcggcucugcuuguucgugugugugucguugcaggccuuauucaagcuuaccauggacuggaccuggauccuguuccucguggccgccgcgacccgcguccacagcagcgccuccaaggaggugaaguccuuccuguggacccagagccuccgccgggagcugagcggcuacugcuccagcaucaagcugcaggucgugaaggacgcccaggcgcuccugcacgggcuggacuucuccgaggugagcaacguccagcgccucaugcggaagcagaagcgcgacgacuccgaccugaagcggcugcgcgaccucaaccaggccgugaacaaccugguggagcucaagagcacccagcagaaguccguccugcgggugggcacccugaccagcgacgaccugcucacccuggccgccgaccuggagaagcucaaguccaaggugauccgcaccgagcggccccugagcuccggggucuacaugggcaaccugagcacgcagcagcucgagcagcgccgggcccugcugaacaugaucgggauggugggcggcgcgcaggggacccagccgggccgcgacggggugguccgggugugggacgugaagaaccccgaccuccugaacaaccaguucggcaccaugcccucccugacccucgccugccugacgaagcaggggcaggucgaccugaacgacguggugcucgcccugaccgaccugggccucaucuacaccgccaaguaccccaacagcuccgaccuggaccgccugagccagagccacccgauccucaacauggucgacaccaagaaguccagccugaacaucuccggcuacaacuucagccugggggcggccgugaaggccggcgccugcaugcucgacgggggcaacaugcuggagacgaucaaggugacgccccagaccauggacggcauccugaaguccauccucaaggucaagaagucccuggggauguucgugagcgacacccccggcgagcggaaccccuacgagaacauccuguacaagaucugccucagcggggacggcuggccguacaucgccucccgcaccagcaucguggggcgggcgugggagaacaccaccgucgaccuggaguccgacggcaagccccagaaggugggcaccgccgggagcaacaagucccugcagagcgccggcuuccccacggggcucaccuacucccagcugaugacccugaaggacagcaugaugcagcuggaccccuccgccaagaccuggaucgacaucgagggccgcccggaggaccccgucgagaucgcccucuaccagcccaugagcgggugcuacauccacuucuuccgggagcccacggaccugaagcaguucaagcaggacgcgaaguacucccacggcaucgacgugaccgaccuguucccggcccagcccggccucaccagcgccgugaucgaggcccugccccgcaacaugguccugaccugccaggggagcgacgacaucaagcggcuccuggacucccagggccgccgcgacaucaagcugaucgacaucgcccucagcaaggcggacucccggcgcuucgagaacgccgugugggaccagugcaaggaccugugccacaugcacacggggguggucguggagaagaagaagcggggcgggaaggaggagaucacgccccacugcgcccugauggacugcaucauguacgacgccgccgugagcggcggccucaacaucccgguccugcgcgcggugcugccccgggacaugguguuccgcaccuccagccccaaggucgugcucugaggacuagucccuguucccagagcccacuuuuuuuucuuuuuuugaaauaaaauagccugucuuucagaucucaaaggcucuuuucagagccaccaaaaaaaaaaaaaaaaaaaaaaaaaaaaaaaaaaaaaaaaaaaaaaaaaaaaaaaaaaaaaaaaagaauu

SEQ ID NO: 20845 - RNA, 2002 nt, Artificial Sequence
  mRNA product Design a-1 (hSL-A64-N5) comprising derived and/or modified sequence from LASV(LASV254-NIG-2011;Clade II)__AIT17675__SP-IgE_NP(2-569) (opt1)
aggagagucccgcagucggcguccagcggcucugcuuguucgugugugugucguugcaggccuuauucaagcuuaccauggacuggaccuggauccuguuccucguggccgccgcgacccgcguccacagcagcgccuccaaggaggugaaguccuuccuguggacccagagccuccgccgggagcugagcggcuacugcuccagcaucaagcugcaggucgugaaggacgcccaggcgcuccugcacgggcuggacuucuccgaggugagcaacguccagcgccucaugcggaagcagaagcgcgacgacuccgaccugaagcggcugcgcgaccucaaccaggccgugaacaaccugguggagcucaagagcacccagcagaaguccguccugcgggugggcacgcugaccagcgacgaccugcucacccuggccgccgaccuggagaagcucaaguccaaggugauccgcaccgagcggccccugagcuccggggucuacaugggcaaccugagcacgcagcagcucgagcagcgccgggcccugcugaacaugaucgggauggugggcggcgcgcaggggacccagccgggccgcgacggggugguccgggugugggacgugaagaaccccgaccuccugaacaaccaguucggcaccaugcccucccugacccucgccugccugacgaagcaggggcaggucgaccugaacgacgccgugcucgcccugaccgaccugggccucaucuacaccgcgaaguaccccaacagcuccgaccuggaccgccugagccagagccacccgauccucaacaugguggacaccaagaaguccagccugaacaucuccggcuacaacuucagccugggggccgccgucaaggccggcgccugcaugcucgacgggggcaacaugcuggagacgaucaaggugacgccccagaccauggacggcauccugaaguccauccucaaggugaagaagucccuggggauguucgucagcgacacccccggcgagcggaaccccuacgagaacauccuguacaagaucugccucagcggggacggcuggccguacaucgcgucccgcaccagcaucguggggcgggccugggagaacaccaucguggaccuggaguccgacggcaagccccagaaggucggcaccgccgggagcaacaagucccugcagagcgccggcuuccccaccgggcucacguacucccagcugaugacccugaaggacagcaugaugcagcuggaccccuccgccaagaccuggaucgacaucgagggccgcccggaggaccccguggagaucgcgcucuaccagcccaugagcgggugcuacauccacuucuuccgggagcccaccgaccugaagcaguucaagcaggacgccaaguacucccacggcaucgacgucgccgaccuguucccggcccagcccggccucacgagcgccgugaucgaggcgcugccccgcaacauggugcugaccugccaggggagcgacgacaucaagcggcuccuggacucccagggccgccgcgacaucaagcugaucgacaucgcccucagcaaggccgacucccggcgcuucgagaacgccgucugggaccagugcaaggaccugugccacaugcacaccggggugguggucgagaagaagaagcggggcgggaaggaggagaucacgccccacugcgcccugauggacugcaucauguacgacgcggccgugagcggcggccucaacaucccggugcugcgcgccguccugccccgggacaugguguuccgcaccuccagccccaaggugguccucugaggacuagucccuguucccagagcccacuuuuuuuucuuuuuuugaaauaaaauagccugucuuucagaucucaaaggcucuuuucagagccaccaaaaaaaaaaaaaaaaaaaaaaaaaaaaaaaaaaaaaaaaaaaaaaaaaaaaaaaaaaaaaaaaagaauu

SEQ ID NO: 20846 - RNA, 2002 nt, Artificial Sequence
  mRNA product Design a-1 (hSL-A64-N5) comprising derived and/or modified sequence from LASV(Nig08-04;Clade II)__ADU56611__SP-IgE_NP(2-569) (opt1)
aggagagucccgcagucggcguccagcggcucugcuuguucgugugugugucguugcaggccuuauucaagcuuaccauggacuggaccuggauccuguuccucguggccgccgcgacccgcguccacagcagcgccuccaaggaggugaaguccuuccuguggacccagagccuccgccgggagcugagcggcuacugcuccaacaucaagcugcaggucgugaaggacgcccaggcgcuccugcacgggcuggacuucagcgagguguccaacguccagcgccucaugcggaagcagaagcgcgacgacggcgaccugaagcggcugcgcgaccucaaccaggccgugaacaaccugguggagcucaagagcacccagcagaaguccguccugcggguggggacccugaccagcgacgaccugcucacccuggccgccgaccuggagaagcucaaguccaaggugauccgcaccgagcggccccugagcuccggcgucuacauggggaaccugagcacgcagcagcucgagcagcgcaaggcccugcuguccaugaucggcauggugggcggggcgcagggcacccagccggggcgggacggcgugguccgcgugugggacgugaagaaccccgaccuccugaacaaccaguucgggaccaugcccagccugacccucgccugccugacgaagcagggccaggucgaccugaacgacgccgugcucgcccugaccgaccugggccucaucuacaccgcgaaguaccccaacuccagcgaccuggaccggcugucccagagccacccgauccucaacaugguggacaccaagaaguccagccugaacaucagcggguacaacuucucccugggcgccgccgucaaggccggggccugcaugcucgacggcggcaacaugcuggagacgaucaaggugacgccccagaccauggacgggauccucaagagcauccugaaggugaagcgcucccugggcauguucgucagcgacacccccggggagcggaaccccuacgagaacauccuguacaagaucugccucuccggcgacggguggccguacaucgcgagccgcaccuccaucgugggccgggccugggagaacaccaccguggaccuggagagcgacggcaagccccagaaggucgggaccgccggcuccaacaagagccugcaguccgccggguuccccacgggccucaccuacagccagcugaugacccugaaggacuccaugaugcagcuggaccccagcgccaagaccuggaucgacaucgaggggcgcccggaggaccccguggagaucgcgcucuaccagcccauguccggcugcuacauccacuucuuccgggagcccacggaccugaagcaguucaagcaggacgccaaguacagccacggcaucgacgucaccgaccuguucuccgcccagccggggcucaccagcgccgugaucgaggcccugccccgcaacauggugcugaccugccagggcagcgacgacaucaagaagcuccuggacucccaggggcggcgcgacaucaagcugaucgacaucagccucaacaaggcggacucccgccgguucgagaacgccgucugggaccagugcaaggaccugugccacaugcacacgggcgugguggucgagaagaagaagcgcgggggcaaggaggagaucacgccccacugcgcccugauggacugcaucauguucgacgccgccgugagcggcgggcucaacauccccauccugcgggcggugcugccgcgcgacauggucuuccggaccuccagccccaagguggugcucugaggacuagucccuguucccagagcccacuuuuuuuucuuuuuuugaaauaaaauagccugucuuucagaucucaaaggcucuuuucagagccaccaaaaaaaaaaaaaaaaaaaaaaaaaaaaaaaaaaaaaaaaaaaaaaaaaaaaaaaaaaaaaaaaagaauu

SEQ ID NO: 20847 - RNA, 2005 nt, Artificial Sequence
  mRNA product Design a-1 (hSL-A64-N5) comprising derived and/or modified sequence from LASV(GA391;Clade III)__AAA46284__SP-IgE_NP(2-570) (opt1)
aggagagucccgcagucggcguccagcggcucugcuuguucgugugugugucguugcaggccuuauucaagcuuaccauggacuggaccuggauccuguuccucguggccgccgcgacccgcguccacagcagcgccuccaaggaggugcgcagcugccuguggacccagucccuccggcgcgagcugagcggcuacugcuccaacaucaagcugcaggucgugaaggacgcccaggcgcuccugcacgggcuggacuucagcgagguguccaacguccagcggcucaugcgcaagcagaagcgggacgacggcgaccugaagcgccugcgggaccucaaccaggccgugaacaaccugguggagcugaaguccacccagcagaaguccguccuccgcguggggacgcugagcuccgacgaccugcucauccuggccgccgaccuggagaagcucaagagcaaggugacccggaccgagcgcccccuguccagcggcgucuacauggggaaccuguccagccagcagcucgaccagcggcgcgcccugcugaacaugaucggcaugaccggcguguccgggggcgggaagggcgcgagcaacgggaucgugcgggucugggacgugaagaacgccgagcuccugaacaaccaguucggcacgaugccgucccugacccucgccugccugaccaagcagggccagguggaccugaacgacgccguccaggcgcucaccgaccuggggcugaucuacacggccaaguaccccaacagcagcgaccucgaccgccugucccagagccaccccauccugaacaugaucgacaccaagaaguccagccucaacaucuccggcuacaacuucagccugggggccgccgugaaggccggcgcgugcaugcuggacggcgggaacaugcucgagaccaucaaggugagcccccagaccauggacggcauccucaagagcauccugaaggucaagaagucccuggggauguucgugagcgacacgccgggcgagcggaaccccuacgagaacauccuguacaagaucugccuguccggggacggcuggagcuacaucgccucccgcaccagcaucgugggccgggccugggagaacaccgucguggaccucgagcaggacaacaagccccagaagaucgggaacggcggguccaacaagagccugcaguccgccggcuucgccgcggggcugaucuacagccagcucaugacccugaaggacuucaagugcuucaaccugauccccaacgccaagacguggauggacaucgagggccgcccggaggaccccguggagaucgcccuguaccagcccuccagcggcugcuacguccacuucuuccgggagcccaccgaccucaagcaguucaagcaggacgccaaguacagccacgggcgcgacgugaccgaccuguucgccgcgcagccgggccugaccuccgccgucaucgaggcccucccccggaacauggugaucacgugccaggggagcgaggacauccgcaagcugcuggagucccagggccgccgggacaucaagcucaucgacaucacccugagcaaggccgacucccgcaaguucgagaacgccgugugggaccaguucaaggaccugugccacaugcacaccggggucgugguggagaagaagaagcggggcggcaaggaggagaucacgccccacugcgcgcucauggacugcaucauguucgacgccgccgucagcgggggccuggacgccaaggugcugcgcgugguccucccccgggacaugguguuccgcaccuccaccccgaaggugguccugugaggacuagucccuguucccagagcccacuuuuuuuucuuuuuuugaaauaaaauagccugucuuucagaucucaaaggcucuuuucagagccaccaaaaaaaaaaaaaaaaaaaaaaaaaaaaaaaaaaaaaaaaaaaaaaaaaaaaaaaaaaaaaaaaagaauu

SEQ ID NO: 20848 - RNA, 2002 nt, Artificial Sequence
  mRNA product Design a-1 (hSL-A64-N5) comprising derived and/or modified sequence from LASV(Nig08-A19;Clade III)__ADU56619__SP-IgE_NP(2-569) (opt1)
aggagagucccgcagucggcguccagcggcucugcuuguucgugugugugucguugcaggccuuauucaagcuuaccauggacuggaccuggauccuguuccucguggccgccgcgacccgcguccacagcagcgccuccaaggaggugaaguccuuccuguggacccagucccuccgccgggagcugagcggcuacugcuccaacaucaagcugcaggucgugaaggacgcccaggcgcuccugcacgggcuggacuucagcgagguguccaacguccagcgccucaugcggaagcagaagcgcgacgacggcgaccugaagcggcugcgcgaccucaaccaggccgugaacaaccugguggagcucaagagcacccagcagaaguccguccugcggguggggacccugagcuccgacgaccugcucgugcuggccgccgaccuggagaagcucaagagcaaggucgugcgcaccgagcggccccuguccagcggcaucuacauggggaaccuguccagccagcagcucgaccagcgcaaggcccugcugaacaugaucggcaugaccggcgggaacggcgggcggaacaccacguccgacggcaucgugcgcgucugggacgugaagaacgcggagcuccugaacaaccaguucgggaccaugccgagccugacccucgccugccugaccaagcagggccagguggaccugaacgacgccguccaggcccucacggaccugggccugaucuacaccgcgaaguaccccaacuccagcgaccucgaccggcuggcccagagccaccccauccugaacaugaucgacaccaagaaguccagccucaacaucuccggguacaacuucagccugggcgccgccgugaaggccggggcgugcaugcuggacggcggcaacaugcucgagaccaucaaggugagcccccagacgauggacgggauccucaagagcauccugaaggucaagcgcucccugggcauguucaucagcgacaccccgggggagcggaaccccuacgagaacauccuguacaagaucugccuguccggcgacggguggcccuacaucgccagccgcaccuccaucgugggccgggccugggagaacaccguggucgaccucgagagcgacaacaagccccagaagacgggcaacgggggcuccaacaagagccugcaguccgccggguucgccgcgggccugaccuacagccagcucaugacccugaaggacuccaugcugcagcuggacccgaacgccaagaccuggauggacaucgaggggcgccccgaggaccccguggagaucgcccucuaccagcccagcuccggcugcuacauccacuucuuccgggagccgacggaccugaagcaguucaagcaggacgccaaguacagccacggcaucgacgugaccgaccuguucgccgcgcagcccgggcucaccagcgccgucaucgaggcccugccccgcaacauggugaucacgugccagggcuccgaggacauccggaagcugcucgagagccaggggcgccgcgacaucaagcugaucgacaucucccugagcaaggucgacucccggaaguucgagaacgccgugugggaccaguucaaggaccucugccacaugcacaccggcaucguggucgagaagaagaagcgcgggggcaaggaggagaucacgccccacugcgcccugauggacugcaucauguucgacgcggccgugagcggcgggguggacgccaagguccugcgggccgugcucccgcgcgacaugguguuccggaccuccacccccaaggucgugcugugaggacuagucccuguucccagagcccacuuuuuuuucuuuuuuugaaauaaaauagccugucuuucagaucucaaaggcucuuuucagagccaccaaaaaaaaaaaaaaaaaaaaaaaaaaaaaaaaaaaaaaaaaaaaaaaaaaaaaaaaaaaaaaaaagaauu

SEQ ID NO: 20849 - RNA, 2002 nt, Artificial Sequence
  mRNA product Design a-1 (hSL-A64-N5) comprising derived and/or modified sequence from LASV(G1180-SLE-2010;Clade IV)__AIT17169__SP-IgE_NP(2-569) (opt1)
aggagagucccgcagucggcguccagcggcucugcuuguucgugugugugucguugcaggccuuauucaagcuuaccauggacuggaccuggauccuguuccucguggccgccgcgacccgcguccacagcagcgccuccaaggagaucaagagcuuccuguggacccagucccuccgccgggagcugagcggcuacugcuccaacaucaagcuccagguggucaaggacgcccaggcgcugcugcacgggcuggacuucagcgagguguccaacgugcagcgccucaugcggaaggagcgccgggacgacaacgaccugaagcgccugcgggaccucaaccaggccgucaacaaccugguggagcucaagagcacccagcagaaguccauccugcgcgugggcacccugaccagcgacgaccugcucauccuggccgccgaccuggagaagcucaaguccaaggucauccggaccgagcgcccccugagcgccgggguguacaugggcaaccuguccagccagcagcucgaccagcggcgcgcgcugcuguccaugaucgggaugagcuccggcaaccagcgggcccaggccggccgcgacggggugguccgggugugggacgugaagaacgucgagcuccugaacaaccaguucggcaccaugccgagccugacgcucgccugccugaccaagcagggccagguggaccugaacgacgcggugcaggcccucaccgaccuggggcugaucuacaccgccaaguaccccaacacguccgaccucgaccgccugacccagagccaccccauccugaacaugaucgacaccaagaaguccagccucaacaucagcggguacaacuucucccugggcgccgccgucaaggcgggcgccugcaugcuggacgggggcaacaugcucgagaccaucaaggugagcccccagacgauggacgggauccugaaguccauccugaaggugaagaaggcccucggcauguucaucagcgacaccccgggcgagcggaaccccuacgagaacauccuguacaagaucugccuguccggggacggcuggcccuacaucgccagccgcaccuccaucaccgggcgggccugggagaacacggucguggaccucgagagcgacggcaagccccagaaggcgggguccaacaacagcaacaagucccugcagagcgugggcuucaccgccggccugaccuacucccagcucaugacccugaaggacgccaugcugcagcuggacccgaacgccaagacguggauggacaucgaggggcgccccgaggaccccgucgagaucgcccucuaccagcccagcuccggcugcuacauccacuucuuccgggagccgaccgaccugaagcaguucaagcaggacgcgaaguacagccacgggaucgacgugaccgaccuguucgccgcccagcccggccucaccuccgccgugaucgacgcccugccccgcaacauggucaucacgugccaggggagcgacgacauccgcaagcugcucgagagccagggccggaaggacaucaagcugaucgacaucgcgcuguccaagaccgacagccgcaaguacgagaacgccgugugggaccaguacaaggaccucugccacaugcacaccggcgucgugguggagaagaagaagcgcgggggcaaggaggagaucacgccccacugcgcccugauggacugcaucauguucgacgccgcggucuccgggggccugaacaccagcgugcuccgggccgugcugccgcgggacauggucuuccgcaccuccacgccccggguggugcugugaggacuagucccuguucccagagcccacuuuuuuuucuuuuuuugaaauaaaauagccugucuuucagaucucaaaggcucuuuucagagccaccaaaaaaaaaaaaaaaaaaaaaaaaaaaaaaaaaaaaaaaaaaaaaaaaaaaaaaaaaaaaaaaaagaauu

SEQ ID NO: 20850 - RNA, 2002 nt, Artificial Sequence
  mRNA product Design a-1 (hSL-A64-N5) comprising derived and/or modified sequence from LASV(G1442-SLE-2011;Clade IV)__AIT17181__SP-IgE_NP(2-569) (opt1)
aggagagucccgcagucggcguccagcggcucugcuuguucgugugugugucguugcaggccuuauucaagcuuaccauggacuggaccuggauccuguuccucguggccgccgcgacccgcguccacagcagcgccuccaaggaggugaaguccuuccuguggacccagagccuccgccgggagcugagcggcuacugcuccaacaucaagcugcaggucgugaaggacgcccaggcgcuccugcacgggcuggacuucagcgagguguccaacguccagcgccucaugcggaagcagcgccgggacgacaacgaccugaagcgccugcgggaccucaaccaggccgugaacaaccugguggagcucaagagcacccagcagaaguccguccugcgcgugggcacccugaccagcgacgaccugcucgugcuggccgccgaccuggagaagcucaaguccaaggucauccggaccgagcgcccccugagcgccgggguguacaugggcaaccuguccagccagcagcucgaccagcggcgcgcgcugcugaacaugaucgggauguccggcggcauccaggggacccggacgggccgcgacggggugguccgggugugggacgugaagaacgccgaccuccugaacaaccaguucggcaccaugccgagccugacccucgccugccugaccaagcaggggcaggucgaccugaacgacguggugcaggcccucacggaccugggccugaucuacaccgcgaaguaccccaacgccuccgaccucgaccgccugacccagagccaccccauccugaacaugaucgacaccaagaaguccagccucaacaucagcggcuacaacuucucccugggggccgccgucaaggccggcgcgugcaugcuggacgggggcaacaugcucgagacgaucaaggugagcccccagaccauggacggcauccugaaguccauccugaaggugaagaagacccucgggauguucaucagcgacaccccgggcgagcggaaccccuacgagaacauccuguacaagaucugccuguccggggacggcuggcccuacaucgccagccgcacguccaucaccgggcgggccugggagaacaccgucguggaccucgagagcgacggcaagccccagaaggccggcuccaacaacagcaacaagucccugcagagcgccggguucgcggccggccugaccuacucccagcucaugacgcugaaggacgccaugcugcagcuggacccgaacgccaagaccuggauggacaucgaggggcgccccgaggaccccguggagaucgcccucuaccagcccagcuccggcugcuacauccacuucuuccgggagccgaccgaccugaagcaguucaagcaggacgcgaaguacagccacgggaucgacgucaccgaccuguucgccgcccagcccggccucacguccgccgugaucgaggcccugccccgcaacauggucaucacgugccagggcagcgacgacaucaagaagcugcucgagucccaggggcgcaaggacaucaagcugaucgacaucgcgcugagcaagaccgacagccggaaguacgagaacgccgugugggaccaguacaaggaccucugccacaugcacaccggcguggucguggagaagaagaagcgcgggggcaaggaggagaucaccccgcacugcgcccugauggacugcaucauguucgacgccgcgguguccgggggccugaacacccucguccugcgggccgugcugccccgcgacaugguguuccggaccagcacgccccgcgucgugcucugaggacuagucccuguucccagagcccacuuuuuuuucuuuuuuugaaauaaaauagccugucuuucagaucucaaaggcucuuuucagagccaccaaaaaaaaaaaaaaaaaaaaaaaaaaaaaaaaaaaaaaaaaaaaaaaaaaaaaaaaaaaaaaaaagaauu

SEQ ID NO: 20851 - RNA, 2002 nt, Artificial Sequence
  mRNA product Design a-1 (hSL-A64-N5) comprising derived and/or modified sequence from LASV(G3010-SLE-2013;Clade IV)__AIT17345__SP-IgE_NP(2-569) (opt1)
aggagagucccgcagucggcguccagcggcucugcuuguucgugugugugucguugcaggccuuauucaagcuuaccauggacuggaccuggauccuguuccucguggccgccgcgacccgcguccacagcagcgccuccaaggagaucaagagcuuccuguggacccagucccuccgccgggagcugagcggcuacugcuccaacaucaagcuccagguggucaaggacgcccaggcgcugcugcacgggcuggacuucagcgagguguccaacgugcagcgccucaugcggaaggagcgccgggacgacaacgaccugaagcgccugcgggaccucaaccaggccgucaacaaccugguggagcucaagagcacccagcagaaguccauccugcgcgugggcacccugaccagcgacgaccugcucauccuggccgccgaccuggagaagcucaaguccaaggucacccggaccgagcgcccccugagcgccgggguguacaugggcaaccuguccagccagcagcucgaccagcggcgcgcgcugcuguccaugaucgggaugagcuccggcgugcagggcgcccgggccgggcgcgacggcgucgugcgggugugggacgucaagaacgccgagcuccugaacaaccaguucgggacgaugccgagccugacccucgcgugccugaccaagcagggccagguggaccugaacgacgugguccaggcccucaccgaccuggggcugaucuacacggccaaguaccccaacaccuccgaccucgaccgccugacccagagccaccccauccugaacaugaucgacaccaagaaguccagccucaacaucagcggcuacaacuucucccugggcgccgccgugaaggcgggggccugcaugcuggacggcgggaacaugcucgagacgaucaaggugagcccccagaccauggacggcauccugaaguccauccugaaggucaagaaggcccucggcauguucaucagcgagaccccgggggagcggaaccccuacgagaacauccuguacaagaucugccuguccggcgacggguggcccuacaucgccagccgcaccuccaucacgggccgggccugggagaacaccgugguggaccucgagagcgacgggaagccccagaaggcgggcuccaacaacagcaacaagucccugcagagcgccggcuucaccgccgggcugaccuacucccagcucaugacgcugaaggacgccaugcugcagcuggacccgaacgccaagaccuggauggacaucgagggccgccccgaggaccccgucgagguggcgcucuaccagcccagcuccgggugcuacauccacuucuuccgggagccgaccgaccugaagcaguucaagcaggacgccaaguacagccacggcaucgacgugaccgaccuguucgccgcccagcccgggcucacguccgccgucaucgacgcgcugccccgcaacauggugaucacgugccagggcagcgacgacaucaagaagcugcucgagagccagggccgcaaggacaucaagcugaucgacaucgcccuguccaagaccgacagccggaaguacgagaacgccgucugggaccaguacaaggaccucugccacaugcacaccggggugguggucgagaagaagaagcgcggcgggaaggaggagaucaccccgcacugcgcccugauggacugcaucauguucgacgcggccguguccggcgggcugaacaccagcgugcuccgggccguccugccccgcgacaugguguuccggaccuccacgccccgcgugguccugugaggacuagucccuguucccagagcccacuuuuuuuucuuuuuuugaaauaaaauagccugucuuucagaucucaaaggcucuuuucagagccaccaaaaaaaaaaaaaaaaaaaaaaaaaaaaaaaaaaaaaaaaaaaaaaaaaaaaaaaaaaaaaaaaagaauu

SEQ ID NO: 20852 - RNA, 2002 nt, Artificial Sequence
  mRNA product Design a-1 (hSL-A64-N5) comprising derived and/or modified sequence from LASV(G502-SLE-2009;Clade IV)__AIT17127__SP-IgE_NP(2-569) (opt1)
aggagagucccgcagucggcguccagcggcucugcuuguucgugugugugucguugcaggccuuauucaagcuuaccauggacuggaccuggauccuguuccucguggccgccgcgacccgcguccacagcagcgccuccaaggagaucaagagcuuccuguggacccagucccuccgccgggagcugagcggcuacugcuccaacaucaagcuccagguggucaaggacgcccaggcgcugcugcacgggcuggacuucagcgagguguccaacgugcagcgccucaugcggaaggagcgccgggacgacaacgaccugaagcgccugcgggaccucaaccaggccgucaacaaccugguggagcucaagagcacccagcagaaguccauccugcgcgugggcacccugaccagcgacgaccugcucauccuggccgccgaccuggagaagcucaaguccaaggucauccggaccgagcgcccccugagcgccgggguguacaugggcaaccuguccagccagcagcucgaccagcggcgcgcgcugcuguccaugaucgggaugagcggcggcaaccagggggugcgggccggcaaggacggggucgugcgcgugugggacgucaagaacgccgagcuccugaacaaccaguucggcaccaugccgucccugacgcucgccugccugaccaagcagggccagguggaccugaacgacgcggugcaggcccucaccgaccuggggcugaucuacaccgccaaguaccccaacacgagcgaccucgaccggcugacccagucccaccccauccugaacaugaucgacaccaagaaguccagccucaacaucuccggcuacaacuucagccugggggccgccgucaaggcgggcgccugcaugcuggacgggggcaacaugcucgagaccaucaaggugagcccccagacgauggacggcauccucaagagcauccugaaggugaagaaggcccuggggauguucaucuccgacaccccgggcgagcgcaaccccuacgagaacauccuguacaagaucugccugagcggggacggcuggcccuacaucgccucccggaccagcaucaccgggcgcgccugggagaacacggucguggaccucgaguccgacggcaagccccagaaggcgggcagcaacaacuccaacaagagccugcaguccgccggguucaccgccggccugaccuacagccagcucaugacccugaaggacgccaugcugcagcuggacccgaacacgaagaccuggauggacaucgaggggcggcccgaggaccccguggagaucgcccucuaccagcccuccagcggcugcuacauccacuucuuccgcgagccgaccgaccugaagcaguucaagcaggacgcgaaguacucccacgggaucgacgucaccgaccuguucgccgcccagcccggccucacgagcgccgugaucgacgcccugccccggaacauggugaucacgugccagggcuccgacgacauccgcaagcugcucgagagccaggggcgcaaggacaucaagcugaucgacaucgcgcugaacaagaccgacagccggaaguacgagaacgccgucugggaccaguacaaggaccucugccacaugcacaccggcguggucguggagaagaagaagcgcgggggcaaggaggagaucaccccgcacugcgcccugauggacugcaucauguucgacgccgcgguguccgggggccugaacaccagcguccuccgggccgugcugccccgcgacaugguguuccggaccuccacgccccgcgucgugcugugaggacuagucccuguucccagagcccacuuuuuuuucuuuuuuugaaauaaaauagccugucuuucagaucucaaaggcucuuuucagagccaccaaaaaaaaaaaaaaaaaaaaaaaaaaaaaaaaaaaaaaaaaaaaaaaaaaaaaaaaaaaaaaaaagaauu

SEQ ID NO: 20853 - RNA, 2002 nt, Artificial Sequence
  mRNA product Design a-1 (hSL-A64-N5) comprising derived and/or modified sequence from LASV(G733-SLE-2010;Clade IV)__AIT17155__SP-IgE_NP(2-569) (opt1)
aggagagucccgcagucggcguccagcggcucugcuuguucgugugugugucguugcaggccuuauucaagcuuaccauggacuggaccuggauccuguuccucguggccgccgcgacccgcguccacagcagcgccuccaaggagaucaagagcuuccuguggacccagucccuccgccgggagcugagcggcuacugcuccaacaucaagcuccagguggucaaggacgcccaggcgcugcugcacgggcuggacuucagcgagguguccaacgugcagcgccucaugcggaaggagcgccgggacgacaacgaccugaagcgccugcgggaccucaaccaggccgucaacaaccugguggagcucaagagcacccagcagaaguccgugcugcgcgucggcacccugaccagcgacgagcugcucgugcuggccgccgaccuggagaagcucaaguccaaggugauccggaccgagcgcccccugagcgccggggucuacaugggcaaccuguccagccagcagcucgaccagcggcgcgcgcugcuguccaugaucgggaugagcggcggcaaccagggggcccggaccggccgcgacgggguggugcgggucugggacgugaagaacgccgagcuccugaacaaccaguucggcaccaugccgucccugacccucgccugccugaccaagcagggccagguggaccugaacgacgcgguccaggcccucaccgaccuggggcugaucuacacggccaaguaccccaacaccagcgaccucgaccgccugacccagucccaccccauccugaacaugaucgacaccaagaaguccagccucaacaucuccggcuacaacuucagccugggggccgccgugaaggcgggcgccugcaugcuggacgggggcaacaugcucgagacgaucaaggugagcccccagaccauggacggcauccucaagagcauccugaaggucaagaaggcccuggggauguucaucuccgacaccccgggcgagcggaaccccuacgagaacauccuguacaagaucugccugagcggggacggcuggcccuacaucgccucccgcaccagcaucacggggcgggccugggagaacaccgugguggaccucgaguccgacggcaagccccagaaggcgggcagcaacaacuccaacaagagccugcaguccgccggguucaccgccggccugaccuacagccagcucaugacgcugaaggacgccaugcugcagcuggacccgaacgccaagaccuggauggacaucgaggggcgccccgaggaccccgucgagaucgcgcucuaccagcccuccagcggcugcuacauccacuucuuccgggagccgaccgaccugaagcaguucaagcaggacgccaaguacucccacgggaucgacgugaccgaccuguucgccgcccagcccggccucacgagcgccgugaucgacgcgcugccccgcaacauggucaucacgugccagggcuccgacgacauccgcaagcugcucgagagccaggggcggaaggacaucaagcugaucgacaucgcccugagcaagaucgacucccgcaaguacgagaacgccgugugggaccaguacaaggaccucugccacaugcacaccggcgucgugguggagaagaagaagcgcgggggcaaggaggagaucacgccccacugcgcccugauggacugcaucauguucgacgcggccgucagcgggggccugaacucccucgugcugcgggccgugcugccgcgggacauggucuuccgcaccagcacgccccggguggugcucugaggacuagucccuguucccagagcccacuuuuuuuucuuuuuuugaaauaaaauagccugucuuucagaucucaaaggcucuuuucagagccaccaaaaaaaaaaaaaaaaaaaaaaaaaaaaaaaaaaaaaaaaaaaaaaaaaaaaaaaaaaaaaaaaagaauu

SEQ ID NO: 20854 - RNA, 2002 nt, Artificial Sequence
  mRNA product Design a-1 (hSL-A64-N5) comprising derived and/or modified sequence from MOPV/LASV reassortant(IGS-1;Clade IV)__AFY05578__SP-IgE_NP(2-569) (opt1)
aggagagucccgcagucggcguccagcggcucugcuuguucgugugugugucguugcaggccuuauucaagcuuaccauggacuggaccuggauccuguuccucguggccgccgcgacccgcguccacagcagcgccuccaaggagaucaagagcuuccuguggacccagucccuccgccgggagcugagcggcuacugcuccaacaucaagcuccagguggucaaggacgcccaggcgcugcugcacgggcuggacuucagcgagguguccaacgugcagcgccucaugcggaaggagcgccgggacgacaacgaccugaagcgccugcgggaccucaaccaggccgucaacaaccugguggagcucaagagcacccagcagaaguccauccugcgcgugggcacccugaccagcgacgaccugcucauccuggccgccgaccuggagaagcuccgguccaaggucauccgcaccgagcggccccugagcgccgggguguacaugggcaaccuguccagccagcagcucgaccagcgccgggcgcugcugaacaugaucgggauguccggcggcaaccagggggcccgcgccggccgggacggggugguccgcgugugggacgugaagaacgccgagcuccugagcaaccaguucggcaccaugccgucccugacgcucgcgugccugaccaagcaggggcaggucgaccugaacgacgccgugcaggcccucaccgaccugggccugaucuacaccgccaaguaccccaacacgagcgaccucgaccggcugacccagucccaccccauccugaacaugaucgacaccaagaaguccagccucaacaucuccggcuacaacuucagccugggggccgcggugaaggccggcgccugcaugcuggacgggggcaacaugcucgagaccaucaaggucagcccccagacgauggacggcauccucaagagcauccugaaggugaagaaggcccuggggauguucaucuccgacaccccgggcgagcgcaaccccuacgagaacauccuguacaagaucugccugagcggggacggcuggcccuacaucgccucccggaccagcaucaccgggcgcgcgugggagaacacgguggucgaccucgaguccgacggcaagccccagaaggccgacagcaacaacuccagcaagucccugcagagcgccggcuucaccgccgggcugaccuacucccagcucaugacccugaaggacgccaugcugcagcuggacccgaacgcgaagacguggauggacaucgagggccggcccgaggaccccguggagaucgcccucuaccagcccagcuccgggugcuacauccacuucuuccgcgagccgaccgaccugaagcaguucaagcaggacgccaaguacagccacggcaucgacgugaccgaccuguucgccacccagcccgggcucacguccgccgucaucgacgcgcugccccgcaacauggugaucacgugccagggcagcgacgacauccggaagcugcucgagagccagggccgcaaggacaucaagcugaucgacaucgaccuguccaagaccgacagccggaaguacgagaacgccgugugggaccaguacaaggaccucugccacaugcacaccggggucguggucgagaagaagaagcgcggcgggaaggaggagaucaccccgcacugcgcccugauggacugcaucauguucgacgccgcgguguccggcgggcugaacaccagcgugcuccgggccguccugccccgcgacaugguguuccggaccuccacgccccgcgugguccugugaggacuagucccuguucccagagcccacuuuuuuuucuuuuuuugaaauaaaauagccugucuuucagaucucaaaggcucuuuucagagccaccaaaaaaaaaaaaaaaaaaaaaaaaaaaaaaaaaaaaaaaaaaaaaaaaaaaaaaaaaaaaaaaaagaauu

SEQ ID NO: 20855 - RNA, 2002 nt, Artificial Sequence
  mRNA product Design a-1 (hSL-A64-N5) comprising derived and/or modified sequence from LASV(LM765-SLE-2012;Clade IV)__AIT17815__SP-IgE_NP(2-569) (opt1)
aggagagucccgcagucggcguccagcggcucugcuuguucgugugugugucguugcaggccuuauucaagcuuaccauggacuggaccuggauccuguuccucguggccgccgcgacccgcguccacagcagcgccuccaaggagaucaagagcuuccuguggacccagucccuccgccgggagcugagcggcuacugcuccaacaucaagcuccagguggucaaggacgcccaggcgcugcugcacgggcuggacuucagcgagguguccaacgugcagcgccucaugcggaaggagcgccgggacgacaacgaccugaagcgccugcgggaccucaaccaggccgucaacaaccugguggagcucaagagcacccagcagaaguccauccugcgcgugggcacccugaccagcgacgaccugcucauccuggccgccgaccuggagaagcucaaguccaaggucacccggaccgagcgcccccugagcgccgggguguacaugggcaaccuguccagccagcagcucgaccagcggcgcgcgcugcuggacaugaucgggauguccggcagcaaccagggcgcccgggccgggcgcgacggcgugguccgggugugggacgugaagaacgccgagcuccugaacaaccaguucgggacgaugccgucccugacccucgcgugccugaccaagcagggccaggucgaccugaacgacgccgugcaggcccucaccgaccuggggcugaucuacacggccaaguaccccaacaccagcgaccucgaccgccugacccagucccaccccauccugaacaugaucgacaccaagaaguccagccucaacaucuccggcuacaacuucagccugggcgccgcggugaaggccggggccugcaugcuggacggcgggaacaugcucgagacgaucaaggucagcccccagaccauggacggcauccucaagagcauccugaaggugaagaaggcccugggcauguucaucuccgacgccccgggggagcggaaccccuacgagaacauccuguacaagaucugccugagcggcgacggguggcccuacaucgcgucccgcaccagcaucaccggccgggccugggagaacacgguggucgaccucgaguccgacgggaagccccagaaggccggcagcaacggcuccaacaagagccugcaguccgccggguucaccgccggccugaccuacagccagcucaugacccugaaggacgcgaugcugcagcuggacccgaacgccaagacguggauggacaucgaggggcgccccgaggaccccguggagaucgcccucuaccagcccuccagcggcugcuacauccacuucuuccgggagccgaccgaccugaagcaguucaagcaggacgccaaguacucccacgggaucgacgugaccgaccuguucgccgcgcagcccggccucaccagcgccgucaucgacgcccugccccgcaacauggugaucacgugccagggcuccgacgacauccgcaagcuguucgagagccaggggcggaaggacaucaagcucaucgacaucgcccugagcaagaccgacucccgcaaguacgagaacgcggugugggaccaguacaaggaccugugccacaugcacaccggcaucgucguggagaagaagaagcgcgggggcaaggaggagaucacgccccacugcgcccucauggacugcaucauguucgacgccgccgucagcgggggccugaacaccuccgugcugcgggccgugcucccgcgggacauggucuuccgcaccagcacgccccggguggugcugugaggacuagucccuguucccagagcccacuuuuuuuucuuuuuuugaaauaaaauagccugucuuucagaucucaaaggcucuuuucagagccaccaaaaaaaaaaaaaaaaaaaaaaaaaaaaaaaaaaaaaaaaaaaaaaaaaaaaaaaaaaaaaaaaagaauu

SEQ ID NO: 20856 - RNA, 2002 nt, Artificial Sequence
  mRNA product Design a-1 (hSL-A64-N5) comprising derived and/or modified sequence from LASV(LM776-SLE-2012;Clade IV)__AIT17825__SP-IgE_NP(2-569) (opt1)
aggagagucccgcagucggcguccagcggcucugcuuguucgugugugugucguugcaggccuuauucaagcuuaccauggacuggaccuggauccuguuccucguggccgccgcgacccgcguccacagcagcgccuccaaggagaucaagagcuuccuguggacccagucccuccgccgggagcugagcuccuacugcagcaacaucaagcuccagguggucaaggacgcccaggcgcugcugcacggccuggacuucuccgaggugagcaacgugcagcgccucaugcggaaggagcgccgggacgacaacgaccugaagcgccugcgggaccucaaccaggccgucaacaaccugguggagcugaaguccacccagcagaaguccauccuccgcguggggacccugaccuccgacgaccugcucauccuggccgccgaccuggagaagcucaagagcaaggucacccggaccgagcgcccccuguccgccggcguguacauggggaaccugagcucccagcagcucgaccagcggcgcgcgcugcugagcaugaucggcauguccgggagcaaccagggcgcccgggccggccgcgacggggugguccgggugugggacgugaagaacgccgagcuccugaacaaccaguucggcacgaugccgucccugacccucgcgugccugaccaagcaggggcaggucgaccugaacgacgccgugcaggcccucaccgaccugggccugaucuacacggccaaguaccccaacaccagcgaccucgaccgccugacccagagccaccccauccugaacaugaucgacaccaagaaguccagccucaacaucuccggguacaacuucagccugggcgccgcggugaaggccggcgccugcaugcuggacgggggcaacaugcucgagacgaucaaggucagcccccagaccauggacgggauccucaagagcauccugaaggugaagaaggcccugggcauguucaucuccgacaccccgggcgagcggaaccccuacgagaacauccuguacaagaucugccugagcggggacggcuggcccuacaucgccucccgcaccagcaucacggggcgggcgugggagaacaccguggucgaccucgaguccgacggcaagccccagaaggccgggagcaacaacuccaacaagagccugcaguccgccggcuucaccgccggccugaccuacagccagcucaugacgcugaaggacgccaugcugcagcuggacccgaacgcgaagaccuggauggacaucgaggggcgccccgaggaccccguggagguggcccucuaccagcccuccagcggcugcuacauccacuucuuccgggagccgaccgaccugaagcaguucaagcaggacgccaaguacucccacgggaucgacgucaccgaccuguucgccgcccagcccggccucacgagcgcggugaucgacgcccugccccgcaacauggugaucacgugccaggggagcgacgacauccgcaagcugcucgagucccagggccggaaggacaucaagcugaucgacaucgcccugagcaagaccgacucccgcaaguacgagaacgccgucugggaccaguacaaggaccucugccacaugcacaccggcguggucguggagaagaagaagcgcgggggcaaggaggagaucaccccgcacugcgcgcugauggacugcaucauguucgacgccgccgugagcgggggccugaacaccuccguccuccgggccgugcugccccgggacaugguguuccgcaccagcacgccccgggucgugcugugaggacuagucccuguucccagagcccacuuuuuuuucuuuuuuugaaauaaaauagccugucuuucagaucucaaaggcucuuuucagagccaccaaaaaaaaaaaaaaaaaaaaaaaaaaaaaaaaaaaaaaaaaaaaaaaaaaaaaaaaaaaaaaaaagaauu

SEQ ID NO: 20857 - RNA, 2002 nt, Artificial Sequence
  mRNA product Design a-1 (hSL-A64-N5) comprising derived and/or modified sequence from LASV(Mad39;Clade IV)__ANH09723__SP-IgE_NP(2-569) (opt1)
aggagagucccgcagucggcguccagcggcucugcuuguucgugugugugucguugcaggccuuauucaagcuuaccauggacuggaccuggauccuguuccucguggccgccgcgacccgcguccacagcagcgccuccaaggagaucaagagcuuccuguggacccagucccuccgccgggagcugagcggcuacugcuccaacaucaagcuccagguggucaaggacgcccaggcgcugcugcacgggcuggacuucagcgagguguccaacgugcagcgccucaugcggaagcagcgccgggacgacaacgaccugaagcgccugcgggaccucaaccaggccgucaacaaccugguggagcugaaguccacccagcagaaguccgugcuccgcgucggcacgcugaccagcgacgaccugcucacccuggccgccgaccuggagaagcucaaguccaaggugacccggacggagcgcccccugaccgccgggguguacaugggcaaccugagcucccagcagcucgaccagcggcgcgcgcugcugaacaugaucgggaugagcggcggcaaccagggggcccggaccggccgcgacggggucgugcgggugugggacgucaagaacgccgagcuccugaacaaccaguucggcaccaugccgucccugacgcucgccugccugaccaagcagggccagguggaccugaacgacgugguccaggcgcucaccgaccuggggcugaucuacaccgccaaguaccccaacacgagcgaccucgaccgccugacccagucccaccccauccugaacaugaucgacaccaacaagagcucccucaacaucagcggcuacaacuucagccugggggccgccgugaaggccggcgcgugcaugcuggacgggggcaacaugcucgagaccaucaaggugagcccccagacgauggacggcauccucaagagcauccugaaggucaagaagucccuggggauguucaucagcgacaccccgggcgagcggaaccccuacgagaacauccuguacaagaucugccuguccggggacggcuggcccuacaucgccagccgcaccuccaucaccgggcgggccugggagaacacggugguggaccucgagagcggcggcaagccccagaaggccggguccaacaacagcaacaagucccugcagagcgccggcuucgcggccgggcugaccuacucccagcucaugacccugaaggacgccaugcugcagcuggacccgaacgccaagaccuggauggacaucgagggccgccccgaggaccccgucgagaucgcccucuaccagcccaucagcgggugcuacauccacuucuuccgggagccgacggaccugaagcaguucaagcaggacgcgaaguacucccacggcaucgacgugaccgaccuguucgccgcccagcccggccucaccagcgccgugaucgaggcccugccccgcaacauggucaucacgugccagggguccgacgacauccgcaagcuguucgagagccagggccggaaggacaucaagcucaucgacaucgcgcuguccaagaccgacagccgcaaguacgagaacgccgugugggaccaguacaaggaccugugccacaugcacaccggggucgugguggagaagaagaagaagggcgggaaggaggagaucacgccccacugcgcccucauggacugcaucauguucgacgccgcggucagcggcggccugaacacccuggugcuccgggccgugcugccgcgcgacauggucuuccggaccuccacccccaagguggugcugugaggacuagucccuguucccagagcccacuuuuuuuucuuuuuuugaaauaaaauagccugucuuucagaucucaaaggcucuuuucagagccaccaaaaaaaaaaaaaaaaaaaaaaaaaaaaaaaaaaaaaaaaaaaaaaaaaaaaaaaaaaaaaaaaagaauu

SEQ ID NO: 20858 - RNA, 2002 nt, Artificial Sequence
  mRNA product Design a-1 (hSL-A64-N5) comprising derived and/or modified sequence from LASV(Z0947-SLE-2011;Clade IV)__AIT17841__SP-IgE_NP(2-569) (opt1)
aggagagucccgcagucggcguccagcggcucugcuuguucgugugugugucguugcaggccuuauucaagcuuaccauggacuggaccuggauccuguuccucguggccgccgcgacccgcguccacagcagcgccuccaaggagaucaagagcuuccuguggacccagucccuccgccgggagcugagcggcuacugcuccaacaucaagcuccagguggucaaggacgcccaggcgcugcugcacgggcuggacuucagcgagguguccaacgugcagcgccucaugcggaaggagcgccgggacgacaacgaccugaagcgccugcgggaccucaaccaggccgucaacaaccugguggagcucaagagcacccagcagaaguccauccugcgcgugggcacccugaccagcgacgaccugcucauccuggccgccgaccuggagaagcucaaguccaaggucacccggaccgagcgcccccugagcgccgggguguacaugggcaaccuguccagccagcagcucgaccagcggcgcgcgcugcugaacaugaucgggauguccggcagcaaccagggcgcccggacggggcgcgacggcgugguccgggugugggacgugaagaacgccgagcuccugaacaaccaguucgggaccaugccgucccugacccucgccugccugaccaagcagggccaggucgaccugaacgacgcggugcaggcccucacggaccuggggcugaucuacaccgccaaguaccccaacaccagcgaccucgaccgccugacccagucccaccccauccugaacaugaucgacacgaagaaguccagccucaacaucuccggcuacaacuucagccugggcgccgccgugaaggcgggggccugcaugcuggacggcgggaacaugcucgagaccaucaaggucagcccccagaccauggacggcauccucaagagcauccugaaggugaagaaggcccugggcauguucaucuccgacgccccgggggagcggaaccccuacgagaacauccuguacaagaucugccugagcggcgacggguggcccuacaucgccucccgcaccagcaucacgggccgggcgugggagaacaccguggucgaccucgaguccgacgggaagccccagaaggccggcagcaacggcuccaacaagagccugcaguccgccggguucaccgccggccugaccuacagccagcucaugacgcugaaggacgccaugcugcagcuggacccgaacgcgaagaccuggauggacaucgaggggcgccccgaggaccccguggagaucgcccucuaccagcccuccagcggcugcuacauccacuucuuccgggagccgaccgaccugaagcaguucaagcaggacgccaaguacucccacgggaucgacgugaccgaccuguucgccgcccagcccggccucacgagcgcggucaucgacgcccugccccgcaacauggugaucacgugccagggcuccgacgacauccgcaagcuguucgagagccaggggcggaaggacaucaagcucaucgacaucgcccugagcaagaccgacucccgcaaguacgagaacgccgugugggaccaguacaaggaccugugccacaugcacaccggcaucgucguggagaagaagaagcgcgggggcaaggaggagaucaccccgcacugcgcgcucauggacugcaucauguucgacgccgccgucagcgggggccugaacaccuccgugcugcgggccgugcucccccgggacauggucuuccgcaccagcacgccccggguggugcugugaggacuagucccuguucccagagcccacuuuuuuuucuuuuuuugaaauaaaauagccugucuuucagaucucaaaggcucuuuucagagccaccaaaaaaaaaaaaaaaaaaaaaaaaaaaaaaaaaaaaaaaaaaaaaaaaaaaaaaaaaaaaaaaaagaauu

SEQ ID NO: 20859 - RNA, 2002 nt, Artificial Sequence
  mRNA product Design a-1 (hSL-A64-N5) comprising derived and/or modified sequence from LASV(Josiah;Clade IV)__NP_694869__SP-IgE_NP(2-569) (opt4)
aggagagucccgcagucggcguccagcggcucugcuuguucgugugugugucguugcaggccuuauucaagcuuaccauggacuggaccuggauccuguuccugguggccgccgccaccagagugcacagcagcgccagcaaggagaucaagagcuuccuguggacccagagccugagaagagagcugagcggcuacugcagcaacaucaagcugcagguggugaaggacgcccaggcccugcugcacggccuggacuucagcgaggugagcaacgugcagagacugaugagaaaggagagaagagacgacaacgaccugaagagacugagagaccugaaccaggccgugaacaaccugguggagcugaagagcacccagcagaagagcauccugagagugggcacccugaccagcgacgaccugcugauccuggccgccgaccuggagaagcugaagagcaaggugaucagaaccgagagaccccugagcgccggcguguacaugggcaaccugagcagccagcagcuggaccagagaagagcccugcugaacaugaucggcaugagcggcggcaaccagggcgccagagccggcagagacggcguggugagagugugggacgugaagaacgccgagcugcugaacaaccaguucggcaccaugcccagccugacccuggccugccugaccaagcagggccagguggaccugaacgacgccgugcaggcccugaccgaccugggccugaucuacaccgccaaguaccccaacaccagcgaccuggacagacugacccagagccaccccauccugaacaugaucgacaccaagaagagcagccugaacaucagcggcuacaacuucagccugggcgccgccgugaaggccggcgccugcaugcuggacggcggcaacaugcuggagaccaucaaggugagcccccagaccauggacggcauccugaagagcauccugaaggugaagaaggcccugggcauguucaucagcgacacccccggcgagagaaaccccuacgagaacauccuguacaagaucugccugagcggcgacggcuggcccuacaucgccagcagaaccagcaucaccggcagagccugggagaacaccgugguggaccuggagagcgacggcaagccccagaaggccgacagcaacaacagcagcaagagccugcagagcgccggcuucaccgccggccugaccuacagccagcugaugacccugaaggacgccaugcugcagcuggaccccaacgccaagaccuggauggacaucgagggcagacccgaggaccccguggagaucgcccuguaccagcccagcagcggcugcuacauccacuucuucagagagcccaccgaccugaagcaguucaagcaggacgccaaguacagccacggcaucgacgugaccgaccuguucgccacccagcccggccugaccagcgccgugaucgacgcccugcccagaaacauggugaucaccugccagggcagcgacgacaucagaaagcugcuggagagccagggcagaaaggacaucaagcugaucgacaucgcccugagcaagaccgacagcagaaaguacgagaacgccgugugggaccaguacaaggaccugugccacaugcacaccggcguggugguggagaagaagaagagaggcggcaaggaggagaucaccccccacugcgcccugauggacugcaucauguucgacgccgccgugagcggcggccugaacaccagcgugcugagagccgugcugcccagagacaugguguucagaaccagcacccccagaguggugcugugaggacuagucccuguucccagagcccacuuuuuuuucuuuuuuugaaauaaaauagccugucuuucagaucucaaaggcucuuuucagagccaccaaaaaaaaaaaaaaaaaaaaaaaaaaaaaaaaaaaaaaaaaaaaaaaaaaaaaaaaaaaaaaaaagaauu

SEQ ID NO: 20860 - RNA, 2002 nt, Artificial Sequence
  mRNA product Design a-1 (hSL-A64-N5) comprising derived and/or modified sequence from LASV(LP;Clade I)__AAF86702__SP-IgE_NP(2-569) (opt4)
aggagagucccgcagucggcguccagcggcucugcuuguucgugugugugucguugcaggccuuauucaagcuuaccauggacuggaccuggauccuguuccugguggccgccgccaccagagugcacagcagcaacagcaaggagaucaagagcuuccuguggacccagagccugagaagagagcugagcggcuacugcagcaacaucaagcugcagguggugaaggacgcccaggcccugcugcacggccuggacuucagcgaggugagcaacgugcagagacugaugagaaagcagaagagagacgacgccgaccugaagagacugagagaccugaaccaggccgugaacaaccugguggagcugaagagcacccagcagaagaacgugcugagagugggcacccugagcagcgacgaccugaucacccuggccgccgaccuggagaagcugaagagcaaggugaucagaaccgagagaccccugagcagcggcguguacaugggcaaccugagcagccagcagcuggaccagagaagagcccugcugagcaugaucggcaugagcggcggcccccagggcaacagaaccggcggcgacggcguggugagagugugggacgugaagaacgccgagcugcugaacaaccaguucggcaccaugcccagccugacccuggccugccugaccaagcagggccagguggaccugaacgacgccgugcaggcccugaccgaccugggccugaucuacaccgccaaguaccccaacagcagcgaccuggacaugcugacccagagccaccccauccugggcaugguggacaccaagaagagcagccugaacaucagcggcuacaacuucagccugggcgccgccgugaaggccggcgccugcaugcuggacggcggcaacaugcuggagaccaucaaggugagcccccagaccauggacggcauccugaagagcauccugaaggugaagagaagccugggcauguucaucagcgacacccccggcgagagaaaccccuacgagaacauccuguacaagaucugccugagcggcgagggcuggcccuacaucgccagcagaaccagcaucaccggcagagccugggagaacacccugguggaccuggagagcgacaacaagccccccaagcugaacagcgccggcagcaacaagagccugcaggccgccggccugaacgccggccugaccuacagccagcugaugacccugaaggacugcaugcugcagcuggaccccagcagcaagaccuggaucgacaucgagggcagacccgaggaccccguggagaucgcccuguuccagcccagcagcggcugcuacauccacuucuucagagagcccaccgaccugaagcaguucaagcaggacgccaaguacagccacggcaucgacgugaccgaccuguucagcacccagcccggccugaccagcgccgugaucgaggcccugcccagaaacauggugcugaccugccagggcagcgacgacaucaagaagcugcuggagagccagggcagaagagacaucaagcugaucgacaucagccugagcaaggccgacagcagaaaguucgagaacgccgugugggaccaguacaaggaccugugccacaugcacaccggcguggugguggagaagaagaagagaggcggcaaggaggagaucaccccccacugcgcccugcuggacugcaucauguucgacgccgccaccaccggcagccugaacaucaccacccugagagccgugcugcccagagacaugguguucagaaccagcacccccaagguggugcugugaggacuagucccuguucccagagcccacuuuuuuuucuuuuuuugaaauaaaauagccugucuuucagaucucaaaggcucuuuucagagccaccaaaaaaaaaaaaaaaaaaaaaaaaaaaaaaaaaaaaaaaaaaaaaaaaaaaaaaaaaaaaaaaaagaauu

SEQ ID NO: 20861 - RNA, 2002 nt, Artificial Sequence
  mRNA product Design a-1 (hSL-A64-N5) comprising derived and/or modified sequence from LASV(803213;Clade II)__AAF86704__SP-IgE_NP(2-569) (opt4)
aggagagucccgcagucggcguccagcggcucugcuuguucgugugugugucguugcaggccuuauucaagcuuaccauggacuggaccuggauccuguuccugguggccgccgccaccagagugcacagcagcgccagcaaggaggugaagagcuuccuguggacccagagccugagaagagagcugagcggcuacugcagcaacaucaagcugcagguggugaaggacgcccaggcccugcugcacggccuggacuucagcgaggugaacaacgugcagagacugaugagaaagcagaagagagacgacggcgaccugaagagacugagagaccugaaccaggccgugaacaaccugguggagcugaagagcacccagcagaagagcauccugagagugggcacccugaccagcgacgaccugcugacccuggccgccgaccuggagaagcugaagagcaaggugaucagaaccgagagaccccugagcagcggcguguacaugggcaaccugagcacccagcagcuggagcagagaagagcccugcugaacaugaucggcauggugggcggcgcccagggcacccagcccggcagagacggcguggugagagugugggacgugaagaaccccgaccugcugaacaaccaguucggcaccaugcccagccugacccuggccugccugaccaagcagggccagguggaccugaacgacgccgugcuggcccugaccgaccugggccugaucuacaccgccaaguaccccaacagcagcgaccuggacagacugagccagagccaccccauccugaacaugguggacaccaagaagagcagccugaacaucagcggcuacaacuucagccugggcgccgccgugaaggccggcgccugcaugcuggacggcggcaacaugcuggagaccaucaaggugaccccccagaccauggacggcauccugaagagcauccugaaggugaagagaagccugggcauguucgugagcgacacccccggcgagagaaaccccuacgagaacauccuguacaagaucugccugagcggcgacggcuggcccuacaucgccagcagaaccagcaucgugggcagagccugggagaacaccaccguggaccuggagagcgacggcaagccccagaaggugggcaccgccggcagcaacaagagccugcagagcgccggcuuccccaccggccugaccuacagccagcugaugacccugaaggacagcaugaugcagcuggaccccagcgccaagaccuggaucgacaucgagggcagacccgaggaccccguggagaucgcccuguaccagcccaugagcggcugcuacauccacuucuucagagagcccaccgaccugaagcaguucaagcaggacgccaaguacagccacggcaucgacguggccgaccuguuccccgcccagcccggccugaccagcgccgugaucgaggcccugcccagaaacauggugcugaccugccagggcagcgacgacaucaagaagcugcuggacagccagggcagaagagacaucaagcugaucgacaucagccugagcaagguggacagcagaaaguucgagaacgccgugugggaccagugcaaggaccugugccacaugcacaccggcguggugguggagaagaagaagagaggcggcaaggaggagaucaccccccacugcgcccugauggacugcaucauguucgacgccgccgugagcggcggccugaacauccccgugcugagagccgugcugcccagagacaugguguucagaaccagcagccccaagguggugcugugaggacuagucccuguucccagagcccacuuuuuuuucuuuuuuugaaauaaaauagccugucuuucagaucucaaaggcucuuuucagagccaccaaaaaaaaaaaaaaaaaaaaaaaaaaaaaaaaaaaaaaaaaaaaaaaaaaaaaaaaaaaaaaaaagaauu

SEQ ID NO: 20862 - RNA, 2005 nt, Artificial Sequence
  mRNA product Design a-1 (hSL-A64-N5) comprising derived and/or modified sequence from LASV(GA391;Clade III)__CAA36646__SP-IgE_NP(2-570) (opt4)
aggagagucccgcagucggcguccagcggcucugcuuguucgugugugugucguugcaggccuuauucaagcuuaccauggacuggaccuggauccuguuccugguggccgccgccaccagagugcacagcagcgccagcaaggaggugagaagcuuccuguggacccagagccugagaagagagcugagcggcuacugcagcaacaucaagcugcagguggugaaggacgcccaggcccugcugcacggccuggacuucagcgaggugagcaacgugcagagacugaugagaaagcagaagagagacgacggcgaccugaagagacugagagaccugaaccaggccgugaacaaccugguggagcugaagagcacccagcagaagagcgugcugagagugggcacccugagcagcgacgaccugcugauccuggccgccgaccuggagaagcugaagagcaaggugaccagaaccgagagaccccugagcagcggcguguacaugggcaaccugagcagccagcagcuggaccagagaagagcccugcugaacaugaucggcaugaccggcgugagcggcggcggcaagggcgccagcgacggcaucgugagagugugggacgugaagaacgccgagcugcugaacaaccaguucggcaccaugcccagccugacccuggccugccugaccaagcagggccagguggaccugaacgacgccgugcaggcccugaccgaccugggccugaucuacaccgccaaguaccccaacagcagcgaccuggacagacugagccagagccaccccauccugaacaugaucgacaccaagaagagcagccugaacaucagcggcuacaacuucagccugggcgccgccgugaaggccggcgccugcaugcuggacggcggcaacaugcuggagaccaucaaggugagcccccagaccauggacggcauccugaagagcauccugaaggugaagaagagccugggcauguucgugagcgacacccccggcgagagaaaccccuacgagaacauccuguacaagaucugccugagcggcgacggcuggcccuacaucgccagcagaaccagcaucgugggcagagccugggagaacaccgugguggaccuggagcaggacaacaagccccagaagaucggcaacggcggcagcaacaagagccugcagagcgccggcuucgccgccggccugaccuacagccagcugaugacccugaaggacuucaagugcuucaaccugauccccaacgccaagaccuggauggacaucgagggcagacccgaggaccccguggagaucgcccuguaccagcccagcagcggcugcuacgugcacuucuucagagagcccaccgaccugaagcaguucaagcaggacgccaaguacagccacggcaucgacgugaccgaccuguucgccgcccagcccggccugaccagcgccgugaucgaggcccugcccagaaacauggugaucaccugccagggcagcgaggacaucagaaagcugcuggagagccagggcagaagagacaucaagcugaucgacaucacccugagcaaggccgacagcagaaaguucgagaacgccgugugggaccaguucaaggaccugugccacaugcacaccggcguggugguggagaagaagaagagaggcggcaaggaggagaucaccccccacugcgcccugauggacugcaucauguucgacgccgccgugagcggcggccuggacgccaaggugcugagaguggugcugcccagagacaugguguucagaaccagcacccccaagguggugcugugaggacuagucccuguucccagagcccacuuuuuuuucuuuuuuugaaauaaaauagccugucuuucagaucucaaaggcucuuuucagagccaccaaaaaaaaaaaaaaaaaaaaaaaaaaaaaaaaaaaaaaaaaaaaaaaaaaaaaaaaaaaaaaaaagaauu

SEQ ID NO: 20863 - RNA, 2002 nt, Artificial Sequence
  mRNA product Design a-1 (hSL-A64-N5) comprising derived and/or modified sequence from LASV(AV;Clade V)__CCA30315__SP-IgE_NP(2-569) (opt4)
aggagagucccgcagucggcguccagcggcucugcuuguucgugugugugucguugcaggccuuauucaagcuuaccauggacuggaccuggauccuguuccugguggccgccgccaccagagugcacagcagcgccagcaaggaggugaagagcuuccuguggacccagagccugagaagagagcugagcggcuacugcagcaacaucaagcugcagguggugaaggacgcccaggcccugcugcacggccuggacuucagcgaggugagcaacgugcagagacugaugagaaagcagagaagagacgacagcgaccugaagagacugagagaccugaaccaggccgugaacaaccugguggagcugaagagcacccagcagaagagcgugcugagagugggcacccugagcagcgacgaccugcugacccuggccgccgaccuggagaagcugaagagcaaggugaccagaaccgagagaccccugagcagcggcguguacaugggcaaccugagcagccagcagcuggaccagagaagagcccugcugaaccugaucggcaugaccaacggcagccagggcagccaggccggcagagacggcguggugagagugugggacgugaagaacgccgagcugcugaacaaccaguucggcaccaugcccagccugacccuggccugccugaccaagcagggccagguggaccugaacgacguggugcaggcccugaccgaccugggccugaucuacaccgccaaguaccccaacaccagcgaccuggacagacugacccagagccaccccauccugaacaugaucgacaccaagaagagcagccugaacaucagcggcuacaacuucagccugggcgccgccgugaaggccggcgccugcaugcuggacggcggcaacaugcuggagaccaucaaggugagcccccagagcauggacggcauccugaagagcauccugaaggugaagagagcccugggcauguucgugagcgacacccccggcgagagaaaccccuacgagaacauccuguacaagaucugccugagcggcgacggcuggcccuacaucgccagcagaaccagcaucgugggcagagccugggagaacaccgugguggaccuggagaccgacggcaagccccagaagaucggcagcggcaacagcaacaagagccugcagagcgccggcuucagcgccggccugaccuacagccagcugaugacccugaaggacgccaugcugcagcuggaccccaacgccaagaccuggauggacaucgagggcagacccgaggaccccguggagguggcccuguaccagcccaucagcggcugcuacauccacuucuucagagagcccaccgaccugaagcaguucaagcaggacgccaaguacagccacggcaucgacaucgccgaccuguucgccgcccagcccggccugaccagcgccgugaucgaggcccugcccagaaacauggugaucaccugccagggcagcgaggacaucaagaagcugcuggagagccagggcagaaaggacaucaagcugaucgacaucgcccugagcaagaucgacagcagaaaguucgagaacgccgugugggaccaguacaaggaccugugccacaugcacaccggcguggugguggagaagaagaagagaggcggcaaggaggagaucaccccccacugcgcccugauggacugcaucauguucgacgccgccgugagcggcggccugaacacccuggugcugagagccgugcugcccagagacaugguguucagaaccagcacccccagaguggugcugugaggacuagucccuguucccagagcccacuuuuuuuucuuuuuuugaaauaaaauagccugucuuucagaucucaaaggcucuuuucagagccaccaaaaaaaaaaaaaaaaaaaaaaaaaaaaaaaaaaaaaaaaaaaaaaaaaaaaaaaaaaaaaaaaagaauu

SEQ ID NO: 20864 - RNA, 2002 nt, Artificial Sequence
  mRNA product Design a-1 (hSL-A64-N5) comprising derived and/or modified sequence from LASV(Togo/2016/7082;Clade VI)__AMR44578__SP-IgE_NP(2-569) (opt4)
aggagagucccgcagucggcguccagcggcucugcuuguucgugugugugucguugcaggccuuauucaagcuuaccauggacuggaccuggauccuguuccugguggccgccgccaccagagugcacagcagcaacagcaaggaggugaagagcuuccuguggacccagagccugagaagagagcugagcggcuacugcagcaacaucaagcugcagguggugaaggacgcccaggcccugcugcacggccuggacuucagcgaggugagcaacgugcagagacugaugagaaagcagaagagagacgacggcgaccugaagagacugagagaccugaaccaggccgugaacaaccugguggagcugaagagcgugcagcagaagagcauccugagagugggcacccugaccagcgacgaccugcugacccuggccgccgaccuggagaagcugaagagcaaggugaccagaaccgagagaccccugagcagcggcguguacaugggcaaccugagcagccagcagcuggaccagagaagagcccugcugagcaugaucggcaugagcggcggcaaccagaacagccagcccaagggcgacggcguggugagagugugggacgugaagaacgccgaccugcugaacaaccaguucggcaccaugcccagccugacccuggccugccugaccaagcagggccagguggaccugaacgacgccgugcaggcccugaccgaccugggccugaucuacaccgccaaguaccccaacagcagcgaccuggacagacugagccagagccaccccauccugaacaugaucgacaccaagaagagcagccugaacaucagcggcuacaacuucagccugggcgccgccaucaagaccggcgccugcaugcuggacggcggcaacaugcuggagaccaucaaggugaccccccagaccauggacggcauccugaagagcauccugaaggugaagagaagccugggcauguucaucagcgacacccccggcgagagaaaccccuacgagaacauccuguacaagaucugccugagcggcgacggcuggcccuacaucgccagcagaaccgccaucaucggcagagccugggagaacaccgugguggaccuggagagcgacagcaagccccagaagaucggcagcaacggcagcaacaagagccugcagagcgccggcuucgcccccggccugaccuacagccagcugaugacccugaaggacagcaugcugcagcuggaccccaacgccaagaccuggaucgacaucgagggcagacccgaggaccccguggagguggcccuguuccagcccaucagcggcugcuacauccacuucuucagagagcccaccgaccugaagcaguucaagcaggacgccaaguacagccacggcaucgacgugaccgaccuguucgccgcccagcccggccugaccagcgccgugaucgaggcccugcccagaaacauggugcugaccugccagggcagcgacgacaucaagaagcugcuggacagccagggcagaagagacaucaagcugaucgacgugagccugaacaagaucgacagcagaaaguucgagaacgccgugugggaccaguacaaggaccugugccacaugcacaccggcguggugguggagaagaagaagaagggcggcaaggaggagaucaccccccacugcgcccugcuggacugcaucauguucgacgccgccgugagcggcggccugaacgccaccgugcugagagccgugcugcccagagacaugguguucagaaccagcagccccaagguggugcugugaggacuagucccuguucccagagcccacuuuuuuuucuuuuuuugaaauaaaauagccugucuuucagaucucaaaggcucuuuucagagccaccaaaaaaaaaaaaaaaaaaaaaaaaaaaaaaaaaaaaaaaaaaaaaaaaaaaaaaaaaaaaaaaaagaauu

SEQ ID NO: 20865 - RNA, 2002 nt, Artificial Sequence
  mRNA product Design a-1 (hSL-A64-N5) comprising derived and/or modified sequence from LASV(KAK-428;Clade n.d. (VII))__ANH09741__SP-IgE_NP(2-569) (opt4)
aggagagucccgcagucggcguccagcggcucugcuuguucgugugugugucguugcaggccuuauucaagcuuaccauggacuggaccuggauccuguuccugguggccgccgccaccagagugcacagcagcaacagcaaggaggugaagagcuuccuguggacccagagccugagaagagagcugagcggcuacugcaccaacaucaagcugcagguggugaaggacgcccaggcccugcugcacggccuggacuucagcgaggugagcaacgugcagagacugaugagaaagcagaagagagacgacaacgaccugaagagacugagagaccugaaccaggccgugaacaaccugguggagcugaagagcgugcagcagaagagcgugcugaaggugggcacccugaacagcgacgaccugcugacccuggccgccgaccuggagaagcugaagagcaagguggugagaaccgagagaccccugagcagcggcguguacaugggcaaccugagcagccagcagcuggaccagagaagagcccugcugaacaugaucggcauggccggcggcagccagggcaaccagcccagcagagacggcguggugagagugugggacgugaagaacgccgaccugcugaacaaccaguucggcaccaugcccagccugacccuggccugccugaccaagcagggccagguggaccugaacgacguggugcuggcccugaccgaccugggccugaucuacaccgccaaguaccccaacagcagcgaccuggacagacugagccagaaccaccccgugcugaacaugaucgacgugaacaagagcagccugaacaucagcggcuacaacuucagccugggcgccgccgugaaggccggcgccugcaugcuggacggcggcaacaugcuggagaccaucaagaucagcccccagaccguggacggcauccugaagagcauccugaaggugaagagagcccugggcauguucgugagcgacacccccggcgagagaaaccccuacgagaacauccuguacaaggugugccugagcggcaacggcuggcccuacaucgccagcagaaccagcaucgugggcagagccugggagaacaccgugguggaccuggagagcaacaagaaccagcccaaggugggcaacaacggcagcaacaagaugcugcagagcagcggcuucgccaccggccugaccuacagccagcugaugacccugagagacagcaugcugcagcuggaccccaccgccaagaccuggaucgacaucgagggcagacccgaggaccccguggagcuggcccuguuccagcccagcagcggcugcuacauccacuucuucagagagcccaccgaccugaagcaguucaagcaggacgccaaguacagccacggcaucgacgugaacgaccuguucagcgcccagcccggccugaccagcgccgugcuggaggcccugcccagaaacauggugcugaccugccagggcagcgacgacaucagaaagcugcuggacagccaggacagaaaggacaucaagcugaucgacaucagccugagcaaggccgacgccagaaaguucgagaacgacgugugggaccaguucaaggaccugugccacaugcacaccggcaucgugguggagaagaagaagaagggcggcaagcaggagaugaccccccacugcgcccugcuggacugcaucauguucgacgccgccgugagcggcggccugaacgugcccacccugagagccgugcugcccaccgacaugguguucagaaccaucaccaccaagguggugcugugaggacuagucccuguucccagagcccacuuuuuuuucuuuuuuugaaauaaaauagccugucuuucagaucucaaaggcucuuuucagagccaccaaaaaaaaaaaaaaaaaaaaaaaaaaaaaaaaaaaaaaaaaaaaaaaaaaaaaaaaaaaaaaaaagaauu

SEQ ID NO: 20866 - RNA, 2002 nt, Artificial Sequence; identical to SEQ ID NO: 20860
  mRNA product Design a-1 (hSL-A64-N5) comprising derived and/or modified sequence from LASV(Pinneo-NIG-1969;Clade I)__AIT17837__SP-IgE_NP(2-569) (opt4)

SEQ ID NO: 20867 - RNA, 2002 nt, Artificial Sequence
  mRNA product Design a-1 (hSL-A64-N5) comprising derived and/or modified sequence from LASV(ISTH0009-NIG-2011;Clade II)__AIT17405__SP-IgE_NP(2-569) (opt4)
aggagagucccgcagucggcguccagcggcucugcuuguucgugugugugucguugcaggccuuauucaagcuuaccauggacuggaccuggauccuguuccugguggccgccgccaccagagugcacagcagcgugagcaaggaggugaagagcuuccuguggacccagagccugagaagagagcugagcggcuacugcagcaacaucaagcugcagguggugaaggacgcccaggcccugcugcacggccuggacuucagcgaggugagcaacgugcagagacugaugagaaagcagaagagagacgacagcgaccugaagagacugagagaccugaaccaggccgugaacaaccugguggagcugaagagcacccagcagaagagcauccugagagugggcacccugaccagcgacgaccugcugacccuggccgccgaccuggagaagcugaagagcaaggugaucagaaccgagagaccccugagcagcggcguguacaugggcaaccugagcacccagcagcuggagcagagaagagcccugcugaacaugaucggcauggugggcggcgcccagggcacccagcccggcagagacggcguggugagagugugggacgugaagaaccccgaccugcugaacaaccaguucggcaccaugcccagccugacccuggccugccugaccaagcagggccagguggaccugaacgacgccgugcuggcccugaccgaccugggccugaucuacaccgccaaguaccccaacagcagcgaccuggacagacugagccagagccaccccauccugaacaugguggacaucaagaagagcagccugaacaucagcggcuacaacuucagccugggcgccgccgugaaggccggcgccugcaugcuggacggcggcaacaugcuggagaccaucaaggugaccccccagaccauggacggcauccugaagagcauccugaaggugaagagaagccugggcauguucgugagcgacacccccggcgagagaaaccccuacgagaacauccuguacaagaucugccugagcggcgacggcuggcccuacaucgccagcagaaccagcaucgugggcagagccugggagaacaccaccguggaccuggagagcgacggcaagccccagaaggugggcagcgccggcagcaacaagagccugcagagcgccggcuuccccaccggccugaccuacagccagcugaugacccugaaggacagcaugaugcagcuggaccccagcgccaagaccuggaucgacaucgagggcagacccgaggaccccguggagaucgcccuguaccagcccaugagcggcugcuacauccacuucuucagagagcccaccgaccugaagcaguucaagcaggacgccaaguacagccacggcaucgacguggccgaccuguuccccgcccagcccggccugaccagcgccgugaucgaggcccugcccagaaacauggugcugaccugccagggcagcgacgacaucaagagacugcuggacagccagggcagaagagacaucaagcugaucgacaucgcccugagcaaggccgacagcagaagauucgagaacgccgugugggaccagugcaaggaccugugccacaugcacaccggcguggugguggagaagaagaagagaggcggcaaggaggagaucaccccccacugcgcccugauggacugcaucauguacgacgccgccgugagcggcggccugaacauccccgugcugagagccgugcugcccagagacaugguguucagaaccagcagccccaagguggugcugugaggacuagucccuguucccagagcccacuuuuuuuucuuuuuuugaaauaaaauagccugucuuucagaucucaaaggcucuuuucagagccaccaaaaaaaaaaaaaaaaaaaaaaaaaaaaaaaaaaaaaaaaaaaaaaaaaaaaaaaaaaaaaaaaagaauu

SEQ ID NO: 20868 - RNA, 2002 nt, Artificial Sequence
  mRNA product Design a-1 (hSL-A64-N5) comprising derived and/or modified sequence from LASV(ISTH2010-NIG-2012;Clade II)__AIT17483__SP-IgE_NP(2-569) (opt4)
aggagagucccgcagucggcguccagcggcucugcuuguucgugugugugucguugcaggccuuauucaagcuuaccauggacuggaccuggauccuguuccugguggccgccgccaccagagugcacagcagcgccagcaaggaggugaagagcuuccuguggacccagagccugagaagagagcugagcggcuacugcagcaacaucaagcugcagguggugaaggacgcccaggcccugcugcacggccuggacuucagcgaggugagcaacgugcagagacugaugagaaagcagaagagagacgacagcgaccugaagagacugagagaccugaaccaggccgugaacaaccugguggagcugaagagcacccagcagaagagcauccugagagugggcacccugaccagcgacgaccugcugacccuggccgccgaccuggagaagcugaagagcaaggugaucagaaccgagagaccccugagcagcggcguguacaugggcaaccugagcacccagcagcuggagcagagaagagcccugcugaaccugaucggcauggugggcggcgcccagggcacccagcccggcagagacggcguggugagagugugggacgugaagaaccccgaccugcugaacaaccaguucggcaccaugcccagccugacccuggccugccugaccaagcagggccagguggaccugaacgacgccgugcuggcccugaccgaccugggccugaucuacaccgccaaguaccccaacagcagcgaccuggacagacugagccagagccaccccauccugaacaugguggacaccaagaagagcagccugaacaucagcggcuucaacuucagccugggcgccgccgugaaggccggcgccugcaugcuggacggcggcaacaugcuggagaccaucaaggugaccccccagaccauggacggcauccugaagagcauccugaaggugaagaagagccugggcauguucgugagcgacacccccggcgagagaaaccccuacgagaacauccuguacaagaucugccugagcggcgacggcuggcccuacaucgccagcagaaccagcaucgugggcagagccugggagaacaccaccguggaccuggagagcgacggcaagccccacaaggugggcaccgccggcagcaacaagagccugcagagcgccggcuuccccaccggccugaccuacagccagcugaugacccugaaggacagcaugaugcagcuggaccccagcgccaagaccuggaucgacaucgagggcagacccgaggaccccguggagaucgcccuguaccagcccaugagcggcugcuacauccacuucuucagagagcccaccgaccugaagcaguucaagcaggacgccaaguacagccacggcaucgacguggccgaccuguuccccgcccagcccggccugaccagcgccgugaucgaggcccugcccagaaacauggugcugaccugccagggcagcgacgacaucaagagacugcuggacagccagggcagaagagacaucaagcugaucgacaucgcccugagcaaggccgacagcagaagauucgagaacgccgugugggaccagugcaaggaccugugccacaugcacaccggcguggugguggagaagaagaagagaggcggcaaggaggagaucaccccccacugcgcccugauggacugcaucauguacgacgccgccgugagcggcggccugaacauccccgugcugagagccgugcugcccagagacaugguguucagaaccagcagccccaagguggugcugugaggacuagucccuguucccagagcccacuuuuuuuucuuuuuuugaaauaaaauagccugucuuucagaucucaaaggcucuuuucagagccaccaaaaaaaaaaaaaaaaaaaaaaaaaaaaaaaaaaaaaaaaaaaaaaaaaaaaaaaaaaaaaaaaagaauu

SEQ ID NO: 20869 - RNA, 2002 nt, Artificial Sequence
  mRNA product Design a-1 (hSL-A64-N5) comprising derived and/or modified sequence from LASV(Lassa virus/H.sapiens-wt/NGA/2015/ISTH_0543;Clade II)__AVO03640__SP-IgE_NP(2-569) (opt4)
aggagagucccgcagucggcguccagcggcucugcuuguucgugugugugucguugcaggccuuauucaagcuuaccauggacuggaccuggauccuguuccugguggccgccgccaccagagugcacagcagcgccagcaaggaggugaagagcuuccuguggacccagagccugagaagagagcugagcggcuacugcagcaacaucaagcugcagguggugaaggacgcccaggcccugcugcacggccuggacuucagcgaggugagcaacgugcagagacugaugagaaagcagaagagagacgacagcgaccugaagagacugagagaccugaaccaggccgugaacaaccugguggagcugaagagcacccagcagaagagcauccugagagugggcacccugaccagcgacgaccugcugacccuggccgccgaccuggagaagcugaagagcaaggugaucagaaccgagagaccccugagcagcggcguguacaugggcaaccugagcacccagcagcuggagcagagaagagcccugcugaacaugaucggcauggugggcggcgcccagggcacccagcccggcagagacggcguggugagagugugggacgugaagaaccccgaccugcugaacaaccaguucggcaccaugcccagccugacccuggccugccugaccaagcagggccagguggaccugaacgacgccgugcuggcccugaccgaccugggccugaucuacaccgccaaguaccccaacagcagcgaccuggacagacugagccagagccaccccauccugaacaugguggacaccaagaagagcagccugaacaucagcggcuacaacuucagccugggcgccgccgugaaggccggcgccugcaugcuggacggcggcaacaugcuggagaccaucaaggugaccccccagaccauggacggcauccugaagagcauccugaaggugaagaagagccugggcauguucgugagcgacacccccggcgagagaaaccccuacgagaacauccuguacaagaucugccugagcggcgacggcuggcccuacaucgccagcagaaccagcaucgugggcagagccugggagaacaccaccguggaccuggagagcgacggcaagccccagaaggugggcagcgccggcagcaacaagagccugcagagcgccggcuuccccaccggccugaccuacagccagcugaugacccugaaggacagcaugaugcagcuggaccccagcgccaagaccuggaucgacaucgagggcagacccgaggaccccguggagaucgcccuguaccagcccaugagcggcugcuacauccacuucuucagagagcccaccgaccugaagcaguucaagcaggacgccaaguacagccacggcaucgacguggccgaccuguuccccgcccagcccggccugaccagcgccgugaucgaggcccugcccagaaacauggugcugaccugccagggcagcgacgacaucaagagacugcuggacagccagggcagaaaggacaucaagcugaucgacaucgcccugagcaaggccgacagcagaagauucgagaacgccgugugggaccagugcaaggaccugugccacaugcacaccggcguggugguggagaagaagaagagaggcggcaaggaggagaucaccccccacugcgcccugauggacugcaucauguacgacgccgccgugagcggcggccugaacauccccgugcugagagccgugcugcccagagacaugguguucagaaccagcagccccaagguggugcugugaggacuagucccuguucccagagcccacuuuuuuuucuuuuuuugaaauaaaauagccugucuuucagaucucaaaggcucuuuucagagccaccaaaaaaaaaaaaaaaaaaaaaaaaaaaaaaaaaaaaaaaaaaaaaaaaaaaaaaaaaaaaaaaaagaauu

SEQ ID NO: 20870 - RNA, 2002 nt, Artificial Sequence
  mRNA product Design a-1 (hSL-A64-N5) comprising derived and/or modified sequence from LASV(Lassa virus/H.sapiens-wt/NGA/2016/ISTH_0009;Clade II)__AVO03572__SP-IgE_NP(2-569) (opt4)
aggagagucccgcagucggcguccagcggcucugcuuguucgugugugugucguugcaggccuuauucaagcuuaccauggacuggaccuggauccuguuccugguggccgccgccaccagagugcacagcagcgccagcaaggaggugaagagcuuccuguggacccagagccugagaagagagcugagcggcuacugcagcaacaucaagcugcagguggugaaggacgcccaggcccugcugcacggccuggacuucagcgaggugagcaacgugcagagacugaugagaaagcagaagagagacgacagcgaccugaagagacugagagaccugaaccaggccgugaacaaccugguggagcugaagagcacccagcagaagagcauccugagagugggcacccugaccagcgacgaccugcugacccuggccgccgaccuggagaagcugaagagcaaggugaucagaaccgagagaccccugagcagcggcguguacaugggcaaccugagcacccagcagcuggagcagagaagagcccugcugaacaugaucggcauggugggcggcgcccagggcacccagcccggcagagacggcguggugagagugugggacgugaagaaccccgaccugcugaacaaccaguucggcaccaugcccagccugacccuggccugccugaccaagcagggccagguggaccugaacgacgccgugcuggcccugaccgaccugggccugaucuacaccgccaaguaccccaacagcagcgaccuggacagacugagccagagccaccccauccugaacaugguggacaccaagaagagcagccugaacaucagcggcuacaacuucagccugggcgccgccgugaaggccggcgccugcaugcuggacggcggcaacaugcuggagaccaucaaggugaccccccagaccauggacggcauccugaagagcauccugaaggugaagaagagccugggcauguucgugagcgacacccccggcgagagaaaccccuacgagaacauccuguacaagaucugccugagcggcgacggcuggcccuacaucgccagcagaaccagcaucgugggcagagccugggagaacaccaccguggaccuggagagcgacggcaagccccagaaggugggcagcgccggcagcaacaagagccugcagagcgccggcuuccccaccggccugaccuacagccagcugaugacccugaaggacagcaugaugcagcuggaccccagcgccaagaccuggaucgacaucgagggcagacccgaggaccccguggagaucgcccuguaccagcccaugagcggcugcuacauccacuucuucagagagcccaccgaccugaagcaguucaagcaggacgccaaguacagccacggcaucgacguggccgaccuguuccccgcccagcccggccugaccagcgccgugaucgaggcccugcccagaaacauggugcugaccugccagggcagcgacgacaucaagagacugcuggacagccagggcagaagagacaucaagcugaucgacaucgcccugagcaaggccgacagcagaagauucgagaacgccgugugggaccagugcaaggaccugugccacaugcacaccggcguggugguggagaagaagaagagaggcggcaaggaggagaucaccccccacugcgcccugauggacugcaucauguacgacgccgccgugagcggcggccugaacauccccgugcugagagccgugcugcccagagacaugguguucagaaccagcagccccaagguggugcugugaggacuagucccuguucccagagcccacuuuuuuuucuuuuuuugaaauaaaauagccugucuuucagaucucaaaggcucuuuucagagccaccaaaaaaaaaaaaaaaaaaaaaaaaaaaaaaaaaaaaaaaaaaaaaaaaaaaaaaaaaaaaaaaaagaauu

SEQ ID NO: 20871 - RNA, 2002 nt, Artificial Sequence
  mRNA product Design a-1 (hSL-A64-N5) comprising derived and/or modified sequence from LASV(Lassa virus/H.sapiens-wt/NGA/2016/ISTH_0017;Clade II)__AVO03568__SP-IgE_NP(2-569) (opt4)
aggagagucccgcagucggcguccagcggcucugcuuguucgugugugugucguugcaggccuuauucaagcuuaccauggacuggaccuggauccuguuccugguggccgccgccaccagagugcacagcagcgccagcaaggaggugaagagcuuccuguggacccagagccugagaagagagcugagcggcuacugcagcagcaucaagcugcagguggugaaggacgcccaggcccugcugcacggccuggacuucagcgaggugagcaacgugcagagacugaugagaaagcagaagagagacgacagcgaccugaagagacugagagaccugaaccaggccgugaacaaccugguggagcugaagagcacccagcagaagagcauccugagagugggcacccugaccagcgacgaccugcugacccuggccgccgaccuggagaagcugaagagcaaggugaucagaaccgagagaccccugagcagcggcguguacaugggcaaccugagcacccagcagcuggagcagagaagagcccugcugaacaugaucggcauggccggcggcgcccagggcacccagcccggcagagacggcguggugagagugugggacgugaagaaccccgaccugcugaacaaccaguucggcaccaugcccagccugacccuggccugccugaccaagcagggccagguggaccugaacgacgccgugcuggcccugaccgaccugggccugaucuacaccgccaaguaccccaacagcagcgaccuggacagacugagccagagccaccccauccugaacaugguggacaccaagaagagcagccugaacaucagcggcuacaacuucagccugggcgccgccgugaaggccggcgccugcaugcuggacggcggcaacaugcuggagaccaucaaggugaccccccagaccauggacggcauccugaagagcauccugaaggugaagagaagccugggcauguucgugagcgacgcccccggcgagagaaaccccuacgagaacauccuguacaagaucugccugagcggcgacggcuggcccuacaucgccagcagaaccagcaucgugggcagagccugggagaacaccaccguggaccuggagagcgacggcaagccccagaaggugggcgccaccggcagcaacaagagccugcagagcgccggcuuccccaccggccugaccuacagccagcugaugacccugaaggacagcaugaugcagcuggaccccagcgccaagaccuggaucgacaucgagggcagacccgaggaccccguggagguggcccuguaccagcccgugagcggcugcuacauccacuucuucagagagcccaccgaccugaagcaguucaagcaggacgccaaguacagccacggcaucgacguggccgaccuguuccccgcccagcccggccugaccagcgccgugaucgaggcccugcccagaaacauggugcugaccugccagggcagcgacgacaucaagaagcugcuggacagccagggcagaaaggacaucaagcugaucgacaucgcccugagcaaggccgacagcagaagauucgagaacgccgugugggaccagugcaaggaccugugccacaugcacaccggcguggugguggagaagaagaagagaggcggcaaggaggagaucaccccccacugcgcccugauggacugcaucauguacgacgccgccgugagcggcggccugaacauccccgugcugagagccgugcugcccagagacaugguguucagaaccagcagccccaagguggugcugugaggacuagucccuguucccagagcccacuuuuuuuucuuuuuuugaaauaaaauagccugucuuucagaucucaaaggcucuuuucagagccaccaaaaaaaaaaaaaaaaaaaaaaaaaaaaaaaaaaaaaaaaaaaaaaaaaaaaaaaaaaaaaaaaagaauu

SEQ ID NO: 20872 - RNA, 2002 nt, Artificial Sequence
  mRNA product Design a-1 (hSL-A64-N5) comprising derived and/or modified sequence from LASV(Lassa virus/H.sapiens-wt/NGA/2018/ISTH_0959;Clade II)__AVV65100__SP-IgE_NP(2-569) (opt4)
aggagagucccgcagucggcguccagcggcucugcuuguucgugugugugucguugcaggccuuauucaagcuuaccauggacuggaccuggauccuguuccugguggccgccgccaccagagugcacagcagcgccagcaaggaggugaagagcuuccuguggacccagagccugagaagagagcugagcggcuacugcagcaacaucaagcugcagguggugaaggacgcccaggcccugcugcacggccuggacuucagcgaggugagcaacgugcagagacugaugagaaagcagaagagagacgacagcgaccugaagagacugagagaccugaaccaggccgugaacaaccugguggagcugaagagcacccagcagaagagcauccugagagugggcacccugaccagcgacgaccugcugacccuggccgccgaccuggagaagcugaagagcaaggugaucagaaccgagagaccccugagcagcggcguguacaugggcaaccugagcacccagcagcuggagcagagaagagcccugcugaaccugaucggcauggugggcggcgcccagggcacccagcccggcagagacggcguggugagagugugggacgugaagaaccccgaccugcugaacaaccaguucggcaccaugcccagccugacccuggccugccugaccaagcagggccagguggaccugaacgacguggugcuggcccugaccgaccugggccugaucuacaccgccaaguaccccaacagcagcgaccuggacagacugagccagagccaccccauccugaacaugguggacaccaagaagagcagccugaacaucagcggcuucaacuucagccugggcgccgccgugaaggccggcgccugcaugcuggacggcggcaacaugcuggagaccaucaaggugaccccccagaccauggacggcauccugaagagcauccugaaggugaagaagagccugggcauguucgugagcgacacccccggcgagagaaaccccuacgagaacauccuguacaagaucugccugagcggcgacggcuggcccuacaucgccagcagaaccagcaucgugggcagagccugggagaacaccaccguggaccuggagagcgacggcaagccccacaaggugggcaccgccggcagcaacaagagccugcagagcgccggcuuccccaccggccugaccuacagccagcugaugacccugaaggacagcaugaugcagcuggaccccagcgccaagaccuggaucgacaucgagggcagacccgaggaccccguggagaucgcccuguaccagcccaugagcggcugcuacauccacuucuucagagagcccaccgaccugaagcaguucaagcaggacgccaaguacagccacggcaucgacguggccgaccuguuccccgcccagcccggccugaccagcgccgugaucgaggcccugcccagaaacauggugcugaccugccagggcagcgacgacaucaagagacugcuggacagccagggcagaaaggacaucaagcugaucgacaucgcccugagcaagaccgacagcagaagauucgagaacgccgugugggaccagugcaaggaccugugccacaugcacaccggcguggugguggagaagaagaagagaggcggcaaggaggagaucaccccccacugcgcccugauggacugcaucauguacgacgccgccgugagcggcggccugaacauccccgugcugagagccgugcugcccagagacaugguguucagaaccagcagccccaagguggugcugugaggacuagucccuguucccagagcccacuuuuuuuucuuuuuuugaaauaaaauagccugucuuucagaucucaaaggcucuuuucagagccaccaaaaaaaaaaaaaaaaaaaaaaaaaaaaaaaaaaaaaaaaaaaaaaaaaaaaaaaaaaaaaaaaagaauu

SEQ ID NO: 20873 - RNA, 2002 nt, Artificial Sequence
  mRNA product Design a-1 (hSL-A64-N5) comprising derived and/or modified sequence from LASV(LASV003-NIG-2008;Clade II)__AIT17581__SP-IgE_NP(2-569) (opt4)
aggagagucccgcagucggcguccagcggcucugcuuguucgugugugugucguugcaggccuuauucaagcuuaccauggacuggaccuggauccuguuccugguggccgccgccaccagagugcacagcagcgccagcaaggaggugaagagcuuccuguggacccagagccugagaagagagcugagcggcuacugcagcagcaucaagcugcagguggugaaggacgcccaggcccugcugcacggccuggacuucagcgaggugagcaacgugcagagacugaugagaaagcagaagagagacgacagcgaccugaagagacugagagaccugaaccaggccgugaacaaccugguggagcugaagagcacccagcagaagagcgugcugagagugggcacccugaccagcgacgaccugcugacccuggccgccgaccuggagaagcugaagagcaaggugaucagaaccgagagaccccugagcagcggcguguacaugggcaaccugagcgcccagcagcuggagcagagaagaacccugcugaacaugaucggcauggugggcggcgcccagggcacccagcccggcagagacggcguggugagagugugggacgugaagaaccccgaccugcugaacaaccaguucggcaccaugcccagccugacccuggccugccugaccaagcagggccagguggaccugaacgacguggugcuggcccugaccgaccugggccugaucuacaccgccaaguaccccaacagcagcgaccuggacagacugagccagagccaccccauccugagcaugguggacaccaagaagagcagccugaacaucagcggcuacaacuucagccugggcgccgccgugaaggccggcgccugcaugcuggacggcggcaacaugcuggagaccaucaaggugaccccccagaccauggacggcauccugaagagcauccugaaggugaagaagagccugggcauguucgugagcgacacccccggcgagagaaaccccuacgagaacauccuguacaagaucugccugagcggcgacggcuggcccuacaucgccagcagaaccagcaucgugggcagagccugggagaacaccaccguggaccuggagagcgacggcaagccccagaaggugggcaccgccggcagcaacaagagccugcagagcgccggcuuccccaccggccugaccuacagccagcugaugacccugaaggacagcaugaugcagcuggaccccagcgccaagaccuggaucgacaucgagggcagacccgaggaccccguggagaucgcccuguaccagcccaugagcggcugcuacauccacuucuucagagagcccaccgaccugaagcaguucaagcaggacgccaaguacagccacggcaucgacgugaccgaccuguuccccgcccagcccggccugaccagcgccgugaucgaggcccugcccagaaacauggugcugaccugccagggcagcgacgacaucaagagacugcuggacagccagggcagaagagacaucaagcugaucgacaucgcccugagcaaggccgacagcagaagauucgagaacgccgugugggaccagugcaaggaccugugccacaugcacaccggcguggugguggagaagaagaagagaggcggcaaggaggagaucaccccccacugcgcccugauggacugcaucauguacgacgccgccgugagcggcggccugaacauccccgugcugagagccgugcugcccagagacaugguguucagaaccagcagccccaagguggugcugugaggacuagucccuguucccagagcccacuuuuuuuucuuuuuuugaaauaaaauagccugucuuucagaucucaaaggcucuuuucagagccaccaaaaaaaaaaaaaaaaaaaaaaaaaaaaaaaaaaaaaaaaaaaaaaaaaaaaaaaaaaaaaaaaagaauu

SEQ ID NO: 20874 - RNA, 2002 nt, Artificial Sequence
  mRNA product Design a-1 (hSL-A64-N5) comprising derived and/or modified sequence from LASV(LASV035-NIG-2009;Clade II)__AIT17589__SP-IgE_NP(2-569) (opt4)
aggagagucccgcagucggcguccagcggcucugcuuguucgugugugugucguugcaggccuuauucaagcuuaccauggacuggaccuggauccuguuccugguggccgccgccaccagagugcacagcagcgccagcaaggaggugaagagcuuccuguggacccagagccugagaagagagcugagcggcuacugcagcagcaucaagcugcagguggugaaggacgcccaggcccugcugcacggccuggacuucagcgaggugagcaacgugcagagacugaugagaaagcagaagagagacgacagcgaccugaagagacugagagaccugaaccaggccgugaacaaccugguggagcugaagagcacccagcagaagagcauccugagagugggcacccugaccagcgacgaccugcugacccuggccgccgaccuggagaagcugaagagcaaggugaucagaaccgagagaccccugagcagcggcguguacaugggcaaccugagcgcccagcagcuggagcagagaagagcccugcugaacaugaucggcauggugggcggcgcccagggcacccagcccggcagagacggcguggugagagugugggacgugaagaaccccgaccugcugaacaaccaguucggcaccaugcccagccugacccuggccugccugaccaagcagggccagguggaccugaacgacgccgugcuggcccugaccgaccugggccugaucuacaccgccaaguaccccaacagcagcgaccuggacagacugagccagagccaccccauccugaacaugguggacaccaagaagagcagccugaacaucagcggcuacaacuucagccugggcgccgccgugaaggccggcgccugcaugcuggacggcggcaacaugcuggagaccaucaaggugaccccccagaccauggacggcauccugaagagcauccugaaggugaagagaagccugggcauguucgugagcgacacccccggcgagagaaaccccuacgagaacauccuguacaagaucugccugagcggcgacggcuggcccuacaucgccagcagaaccagcaucgugggcagagccugggagaacaccaccguggaccuggagagcgacggcaagccccagaaggugggcaccaccggcagcaacaagagccugcagagcgccggcuuccccaccggccugaccuacagccagcugaugacccugaaggacagcaugaugcagcuggaccccagcgccaagaccuggaucgacaucgagggcagacccgaggaccccguggagaucgcccuguaccagcccaugagcggcugcuacauccacuucuucagagagcccaccgaccugaagcaguucaagcaggacgccaaguacagccacggcaucgacguggccgaccuguuccccgcccagcccggccugaccagcgccgugaucgaggcccugcccagaaacauggugcugaccugccagggcagcgacgacaucaagaagcugcuggacagccagggcagaagagacaucaagcugaucgacaucgcccugagcaaggccgacagcagaaaguucgagaacgccgugugggaccagugcaaggaccugugccacaugcacaccggcguggugguggagaagaagaagagaggcggcaaggaggagaucaccccccacugcgcccugauggacugcaucauguacgacgccgccgugagcggcggccugaacauccccgugcugagagccgugcugcccagagacaugguguucagaaccagcagccccaagguggugcugugaggacuagucccuguucccagagcccacuuuuuuuucuuuuuuugaaauaaaauagccugucuuucagaucucaaaggcucuuuucagagccaccaaaaaaaaaaaaaaaaaaaaaaaaaaaaaaaaaaaaaaaaaaaaaaaaaaaaaaaaaaaaaaaaagaauu

SEQ ID NO: 20875 - RNA, 2002 nt, Artificial Sequence
  mRNA product Design a-1 (hSL-A64-N5) comprising derived and/or modified sequence from LASV(LASV1000-NIG-2009;Clade II)__AIT17783__SP-IgE_NP(2-569) (opt4)
aggagagucccgcagucggcguccagcggcucugcuuguucgugugugugucguugcaggccuuauucaagcuuaccauggacuggaccuggauccuguuccugguggccgccgccaccagagugcacagcagcgccagcaaggaggugaagagcuuccuguggacccagagccugagaagagagcugagcggcuacugcagcaacaucaagcugcagguggugaaggacgcccaggcccugcugcacggccuggacuucagcgaggugagcaacgugcagagacugaugagaaagcagaagagagacgacagcgaccugaagagacugagagaccugaaccaggccgugaacaaccugguggagcugaagagcacccagcagaagagcauccugagagugggcacccugaccagcgacgaccugcugacccuggccgccgaccuggagaagcugaagagcaaggugaucagaaccgagagaccccugagcagcggcguguacaugggcaaccugagcacccagcagcuggagcagagaagagcccugcugaacaugaucggcauggugggcggcgcccagggcacccagcccggcagagacggcguggugagagugugggacgugaagaaccccgaccugcugaacaaccaguucggcaccaugcccagccugacccuggccugccugaccaagcagggccagguggaccugaacgacguggugcuggcccugaccgaccugggccugaucuacaccgccaaguaccccaacagcagcgaccuggacagacugagccagagccaccccauccugaacaugguggacaccaagaagagcagccugaacaucagcggcuacaacuucagccugggcgccgccgugaaggccggcgccugcaugcuggacggcggcaacaugcuggagaccaucaaggugaccccccagaccauggacggcauccugaagagcauccugaaggugaagaagagccugggcauguucgugagcgacacccccggcgagagaaaccccuacgagaacauccuguacaagaucugccugagcggcgacggcuggcccuacaucgccagcagaaccagcaucgugggcagagccugggagaacaccaccguggaccuggagagcgacggcaagccccagaaggugggcaccgccggcagcaacaagagccugcagagcgccggcuuccccaccggccugaccuacagccagcugaugacccugaaggacagcaugaugcagcuggaccccagcgccaagaccuggaucgacaucgagggcagacccgaggaccccguggagaucgcccuguaccagcccgugagcggcugcuacauccacuucuucagagagcccaccgaccugaagcaguucaagcaggacgccaaguacagccacggcaucgacguggccgaccuguuccccgcccagcccggccugaccagcgccgugaucgaggcccugcccagaaacauggugcugaccugccagggcagcgacgacaucaagagacugcuggacagccagggcagaagagacaucaagcugaucgacaucgcccugagcaaggccgacagcagaagauucgagaacgccgugugggaccagugcaaggaccugugccacaugcacaccggcguggugguggagaagaagaagagaggcggcaaggaggagaucaccccccacugcgcccugauggacugcaucauguacgacgccgccgugagcggcggccugaacauccccgugcugagagccgugcugcccagagacaugguguucagaaccagcagccccaagguggugcugugaggacuagucccuguucccagagcccacuuuuuuuucuuuuuuugaaauaaaauagccugucuuucagaucucaaaggcucuuuucagagccaccaaaaaaaaaaaaaaaaaaaaaaaaaaaaaaaaaaaaaaaaaaaaaaaaaaaaaaaaaaaaaaaaagaauu

SEQ ID NO: 20876 - RNA, 2002 nt, Artificial Sequence
  mRNA product Design a-1 (hSL-A64-N5) comprising derived and/or modified sequence from LASV(LASV221-NIG-2010;Clade II)__AIT17625__SP-IgE_NP(2-569) (opt4)
aggagagucccgcagucggcguccagcggcucugcuuguucgugugugugucguugcaggccuuauucaagcuuaccauggacuggaccuggauccuguuccugguggccgccgccaccagagugcacagcagcgccagcaaggaggugaagagcuuccuguggacccagagccugagaagagagcugagcggcuacugcagcagcaucaagcugcagguggugaaggacgcccaggcccugcugcacggccuggacuucagcgaggugagcaacgugcagagacugaugagaaagcagagaagagacgacagcgaccugaagagacugagagaccugaaccaggccgugaacaaccugguggagcugaagagcacccagcagaagagcauccugagagugggcacccugaccagcgacgaccugcugacccuggccgccgaccuggagaagcugaagagcaaggugaucagaaccgagagaccccugagcagcggcguguacaugggcaaccugagcacccagcagcuggagcagagaagagcccugcugaacaugaucggcauggugggcggcgcccagggcacccagcccggcagagacggcguggugagagugugggacgugaagaaccccgaccugcugaacaaccaguucggcaccaugcccagccugacccuggccugccugaccaagcagggccagguggaccugaacgacgccgugcuggcccugaccgaccugggccugaucuacaccgccaaguaccccaacagcagcgaccuggacagacugagccagagccaccccauccugaacaugguggacaccaagaagagcagccugaacaucagcggcuacaacuucagccugggcgccgccgugaaggccggcgccugcaugcuggacggcggcaacaugcuggagaccaucaaggugaccccccagaccguggacggcauccugaagagcauccugaaggugaagagaagccugggcauguucgugagcgacacccccggcgagagaaaccccuacgagaacauccuguacaagaucugccugagcggcgacggcuggcccuacaucgccagcagaaccagcaucgugggcagagccugggagaacaccaccguggaccuggagagcgacggcaagccccagaaggugggcaccgccggcagcaacaagagccugcagagcgccggcuuccccaccggccugaccuacagccagcugaugacccugaaggacagcaugaugcagcuggaccccagcgccaagaccuggaucgacaucgagggcagacccgaggaccccguggagaucgcccuguaccagcccaugagcggcugcuacauccacuucuucagagagcccaccgaccugaagcaguucaagcaggacgccaaguacagccacggcaucgacguggccgaccuguuccccgcccagcccggccugaccagcgccgugaucgaggcccugcccagaaacauggugcugaccugccagggcagcgacgacaucaagagacugcuggacagccagggcagaagagacaucaagcugaucgacaucgcccugagcaaggccgacagcagaaaguucgagaacgccgugugggaccagugcaaggaccugugccacaugcacaccggcguggugguggagaagaagaagagaggcggcaaggaggagaucaccccccacugcgcccugauggacugcaucauguacgacgccgccgugagcggcggccugaacauccccgugcugagagccgugcugcccagagacaugguguucagaaccagcagccccaagguggugcugugaggacuagucccuguucccagagcccacuuuuuuuucuuuuuuugaaauaaaauagccugucuuucagaucucaaaggcucuuuucagagccaccaaaaaaaaaaaaaaaaaaaaaaaaaaaaaaaaaaaaaaaaaaaaaaaaaaaaaaaaaaaaaaaaagaauu

SEQ ID NO: 20877 - RNA, 2002 nt, Artificial Sequence
  mRNA product Design a-1 (hSL-A64-N5) comprising derived and/or modified sequence from LASV(LASV237-NIG-2010;Clade II)__AIT17639__SP-IgE_NP(2-569) (opt4)
aggagagucccgcagucggcguccagcggcucugcuuguucgugugugugucguugcaggccuuauucaagcuuaccauggacuggaccuggauccuguuccugguggccgccgccaccagagugcacagcagcgccagcaaggaggugaagagcuuccuguggacccagagccugagaagagagcugagcggcuacugcagcaacaucaagcugcagguggugaaggacgcccaggcccugcugcacggccuggacuucagcgaggugagcaacgugcagagacugaugagaaagcagaagagagacgacagcgaccugaagagacugagagaccugaaccaggccgugaacaaccugguggagcugaagagcacccagcagaagagcauccugagagugggcacccugaccagcgacgaccugcugacccuggccgccgaccuggagaagcugaagagcaaggugaucagaaccgagagaccccugagcagcggcguguacaugggcaaccugagcacccagcagcuggagcagagaagagcccugcugaacaugaucggcauggugggcggcgcccagggcacccagcccggcagagacggcguggugagagugugggacgugaagaaccccgaccugcugaacaaccaguucggcaccaugcccagccugacccuggccugccugaccaagcagggccagguggaccugaacgacgccgugcuggcccugaccgaccugggccugaucuacaccgccaaguaccccaacagcagcgaccuggacagacugagccagagccaccccauccugaacaugguggacaucaagaagagcagccugaacaucagcggcuacaacuucagccugggcgccgccgugaaggccggcgccugcaugcuggacggcggcaacaugcuggagaccaucaaggugaccccccagaccauggacggcauccugaagagcauccugaaggugaagagaagccugggcauguucgugagcgacacccccggcgagagaaaccccuacgagaacauccuguacaagaucugccugagcggcgacggcuggcccuacaucgccagcagaaccagcaucgugggcagagccugggagaacaccaccguggaccuggagagcgacggcaagccccagaaggugggcagcgccggcagcaacaagagccugcagagcgccggcuuccccaccggccugaccuacagccagcugaugacccugaaggacagcaugaugcagcuggaccccagcgccaagaccuggaucgacaucgagggcagacccgaggaccccguggagaucgcccuguaccagcccaugagcggcugcuacauccacuucuucagagagcccaccgaccugaagcaguucaagcaggacgccaaguacagccacggcaucgacguggccgaccuguuccccgcccagcccggccugaccagcgccgugaucgaggcccugcccagaaacauggugcugaccugccagggcagcgacgacaucaagagacugcuggacagccagggcagaagagacaucaagcugaucgacaucgcccugagcaaggccgacagcagaagauucgagaacgccgugugggaccagugcaaggaccugugccacaugcacaccggcguggugguggagaagaagaagagaggcggcaaggaggagaucaccccccacugcgcccugauggacugcaucauguacgacgccgccgugagcggcggccugaacauccccgugcugagagccgugcugcccagagacaugguguucagaaccagcagccccaagguggugcugugaggacuagucccuguucccagagcccacuuuuuuuucuuuuuuugaaauaaaauagccugucuuucagaucucaaaggcucuuuucagagccaccaaaaaaaaaaaaaaaaaaaaaaaaaaaaaaaaaaaaaaaaaaaaaaaaaaaaaaaaaaaaaaaaagaauu

SEQ ID NO: 20878 - RNA, 2002 nt, Artificial Sequence
  mRNA product Design a-1 (hSL-A64-N5) comprising derived and/or modified sequence from LASV(LASV253-NIG-2011;Clade II)__AIT17671__SP-IgE_NP(2-569) (opt4)
aggagagucccgcagucggcguccagcggcucugcuuguucgugugugugucguugcaggccuuauucaagcuuaccauggacuggaccuggauccuguuccugguggccgccgccaccagagugcacagcagcgccagcaaggaggugaagagcuuccuguggacccagagccugagaagagagcugagcggcuacugcagcagcaucaagcugcagguggugaaggacgcccaggcccugcugcacggccuggacuucagcgaggugagcaacgugcagagacugaugagaaagcagaagagagacgacagcgaccugaagagacugagagaccugaaccaggccgugaacaaccugguggagcugaagagcacccagcagaagagcgugcugagagugggcacccugaccagcgacgaccugcugacccuggccgccgaccuggagaagcugaagagcaaggugaucagaaccgagagaccccugagcagcggcguguacaugggcaaccugagcacccagcagcuggagcagagaagagcccugcugaacaugaucggcauggugggcggcgcccagggcacccagcccggcagagacggcguggugagagugugggacgugaagaaccccgaccugcugaacaaccaguucggcaccaugcccagccugacccuggccugccugaccaagcagggccagguggaccugaacgacguggugcuggcccugaccgaccugggccugaucuacaccgccaaguaccccaacagcagcgaccuggacagacugagccagagccaccccauccugaacaugguggacaccaagaagagcagccugaacaucagcggcuacaacuucagccugggcgccgccgugaaggccggcgccugcaugcuggacggcggcaacaugcuggagaccaucaaggugaccccccagaccauggacggcauccugaagagcauccugaaggugaagaagagccugggcauguucgugagcgacacccccggcgagagaaaccccuacgagaacauccuguacaagaucugccugagcggcgacggcuggcccuacaucgccagcagaaccagcaucgugggcagagccugggagaacaccaccguggaccuggagagcgacggcaagccccagaaggugggcaccgccggcagcaacaagagccugcagagcgccggcuuccccaccggccugaccuacagccagcugaugacccugaaggacagcaugaugcagcuggaccccagcgccaagaccuggaucgacaucgagggcagacccgaggaccccguggagaucgcccuguaccagcccaugagcggcugcuacauccacuucuucagagagcccaccgaccugaagcaguucaagcaggacgccaaguacagccacggcaucgacgugaccgaccuguuccccgcccagcccggccugaccagcgccgugaucgaggcccugcccagaaacauggugcugaccugccagggcagcgacgacaucaagagacugcuggacagccagggcagaagagacaucaagcugaucgacaucgcccugagcaaggccgacagcagaagauucgagaacgccgugugggaccagugcaaggaccugugccacaugcacaccggcguggugguggagaagaagaagagaggcggcaaggaggagaucaccccccacugcgcccugauggacugcaucauguacgacgccgccgugagcggcggccugaacauccccgugcugagagccgugcugcccagagacaugguguucagaaccagcagccccaagguggugcugugaggacuagucccuguucccagagcccacuuuuuuuucuuuuuuugaaauaaaauagccugucuuucagaucucaaaggcucuuuucagagccaccaaaaaaaaaaaaaaaaaaaaaaaaaaaaaaaaaaaaaaaaaaaaaaaaaaaaaaaaaaaaaaaaagaauu

SEQ ID NO: 20879 - RNA, 2002 nt, Artificial Sequence
  mRNA product Design a-1 (hSL-A64-N5) comprising derived and/or modified sequence from LASV(LASV254-NIG-2011;Clade II)__AIT17675__SP-IgE_NP(2-569) (opt4)
aggagagucccgcagucggcguccagcggcucugcuuguucgugugugugucguugcaggccuuauucaagcuuaccauggacuggaccuggauccuguuccugguggccgccgccaccagagugcacagcagcgccagcaaggaggugaagagcuuccuguggacccagagccugagaagagagcugagcggcuacugcagcagcaucaagcugcagguggugaaggacgcccaggcccugcugcacggccuggacuucagcgaggugagcaacgugcagagacugaugagaaagcagaagagagacgacagcgaccugaagagacugagagaccugaaccaggccgugaacaaccugguggagcugaagagcacccagcagaagagcgugcugagagugggcacccugaccagcgacgaccugcugacccuggccgccgaccuggagaagcugaagagcaaggugaucagaaccgagagaccccugagcagcggcguguacaugggcaaccugagcacccagcagcuggagcagagaagagcccugcugaacaugaucggcauggugggcggcgcccagggcacccagcccggcagagacggcguggugagagugugggacgugaagaaccccgaccugcugaacaaccaguucggcaccaugcccagccugacccuggccugccugaccaagcagggccagguggaccugaacgacgccgugcuggcccugaccgaccugggccugaucuacaccgccaaguaccccaacagcagcgaccuggacagacugagccagagccaccccauccugaacaugguggacaccaagaagagcagccugaacaucagcggcuacaacuucagccugggcgccgccgugaaggccggcgccugcaugcuggacggcggcaacaugcuggagaccaucaaggugaccccccagaccauggacggcauccugaagagcauccugaaggugaagaagagccugggcauguucgugagcgacacccccggcgagagaaaccccuacgagaacauccuguacaagaucugccugagcggcgacggcuggcccuacaucgccagcagaaccagcaucgugggcagagccugggagaacaccaucguggaccuggagagcgacggcaagccccagaaggugggcaccgccggcagcaacaagagccugcagagcgccggcuuccccaccggccugaccuacagccagcugaugacccugaaggacagcaugaugcagcuggaccccagcgccaagaccuggaucgacaucgagggcagacccgaggaccccguggagaucgcccuguaccagcccaugagcggcugcuacauccacuucuucagagagcccaccgaccugaagcaguucaagcaggacgccaaguacagccacggcaucgacguggccgaccuguuccccgcccagcccggccugaccagcgccgugaucgaggcccugcccagaaacauggugcugaccugccagggcagcgacgacaucaagagacugcuggacagccagggcagaagagacaucaagcugaucgacaucgcccugagcaaggccgacagcagaagauucgagaacgccgugugggaccagugcaaggaccugugccacaugcacaccggcguggugguggagaagaagaagagaggcggcaaggaggagaucaccccccacugcgcccugauggacugcaucauguacgacgccgccgugagcggcggccugaacauccccgugcugagagccgugcugcccagagacaugguguucagaaccagcagccccaagguggugcugugaggacuagucccuguucccagagcccacuuuuuuuucuuuuuuugaaauaaaauagccugucuuucagaucucaaaggcucuuuucagagccaccaaaaaaaaaaaaaaaaaaaaaaaaaaaaaaaaaaaaaaaaaaaaaaaaaaaaaaaaaaaaaaaaagaauu

SEQ ID NO: 20880 - RNA, 2002 nt, Artificial Sequence
  mRNA product Design a-1 (hSL-A64-N5) comprising derived and/or modified sequence from LASV(Nig08-04;Clade II)__ADU56611__SP-IgE_NP(2-569) (opt4)
aggagagucccgcagucggcguccagcggcucugcuuguucgugugugugucguugcaggccuuauucaagcuuaccauggacuggaccuggauccuguuccugguggccgccgccaccagagugcacagcagcgccagcaaggaggugaagagcuuccuguggacccagagccugagaagagagcugagcggcuacugcagcaacaucaagcugcagguggugaaggacgcccaggcccugcugcacggccuggacuucagcgaggugagcaacgugcagagacugaugagaaagcagaagagagacgacggcgaccugaagagacugagagaccugaaccaggccgugaacaaccugguggagcugaagagcacccagcagaagagcgugcugagagugggcacccugaccagcgacgaccugcugacccuggccgccgaccuggagaagcugaagagcaaggugaucagaaccgagagaccccugagcagcggcguguacaugggcaaccugagcacccagcagcuggagcagagaaaggcccugcugagcaugaucggcauggugggcggcgcccagggcacccagcccggcagagacggcguggugagagugugggacgugaagaaccccgaccugcugaacaaccaguucggcaccaugcccagccugacccuggccugccugaccaagcagggccagguggaccugaacgacgccgugcuggcccugaccgaccugggccugaucuacaccgccaaguaccccaacagcagcgaccuggacagacugagccagagccaccccauccugaacaugguggacaccaagaagagcagccugaacaucagcggcuacaacuucagccugggcgccgccgugaaggccggcgccugcaugcuggacggcggcaacaugcuggagaccaucaaggugaccccccagaccauggacggcauccugaagagcauccugaaggugaagagaagccugggcauguucgugagcgacacccccggcgagagaaaccccuacgagaacauccuguacaagaucugccugagcggcgacggcuggcccuacaucgccagcagaaccagcaucgugggcagagccugggagaacaccaccguggaccuggagagcgacggcaagccccagaaggugggcaccgccggcagcaacaagagccugcagagcgccggcuuccccaccggccugaccuacagccagcugaugacccugaaggacagcaugaugcagcuggaccccagcgccaagaccuggaucgacaucgagggcagacccgaggaccccguggagaucgcccuguaccagcccaugagcggcugcuacauccacuucuucagagagcccaccgaccugaagcaguucaagcaggacgccaaguacagccacggcaucgacgugaccgaccuguucagcgcccagcccggccugaccagcgccgugaucgaggcccugcccagaaacauggugcugaccugccagggcagcgacgacaucaagaagcugcuggacagccagggcagaagagacaucaagcugaucgacaucagccugaacaaggccgacagcagaagauucgagaacgccgugugggaccagugcaaggaccugugccacaugcacaccggcguggugguggagaagaagaagagaggcggcaaggaggagaucaccccccacugcgcccugauggacugcaucauguucgacgccgccgugagcggcggccugaacauccccauccugagagccgugcugcccagagacaugguguucagaaccagcagccccaagguggugcugugaggacuagucccuguucccagagcccacuuuuuuuucuuuuuuugaaauaaaauagccugucuuucagaucucaaaggcucuuuucagagccaccaaaaaaaaaaaaaaaaaaaaaaaaaaaaaaaaaaaaaaaaaaaaaaaaaaaaaaaaaaaaaaaaagaauu

SEQ ID NO: 20881 - RNA, 2005 nt, Artificial Sequence
  mRNA product Design a-1 (hSL-A64-N5) comprising derived and/or modified sequence from LASV(GA391;Clade III)__AAA46284__SP-IgE_NP(2-570) (opt4)
aggagagucccgcagucggcguccagcggcucugcuuguucgugugugugucguugcaggccuuauucaagcuuaccauggacuggaccuggauccuguuccugguggccgccgccaccagagugcacagcagcgccagcaaggaggugagaagcugccuguggacccagagccugagaagagagcugagcggcuacugcagcaacaucaagcugcagguggugaaggacgcccaggcccugcugcacggccuggacuucagcgaggugagcaacgugcagagacugaugagaaagcagaagagagacgacggcgaccugaagagacugagagaccugaaccaggccgugaacaaccugguggagcugaagagcacccagcagaagagcgugcugagagugggcacccugagcagcgacgaccugcugauccuggccgccgaccuggagaagcugaagagcaaggugaccagaaccgagagaccccugagcagcggcguguacaugggcaaccugagcagccagcagcuggaccagagaagagcccugcugaacaugaucggcaugaccggcgugagcggcggcggcaagggcgccagcaacggcaucgugagagugugggacgugaagaacgccgagcugcugaacaaccaguucggcaccaugcccagccugacccuggccugccugaccaagcagggccagguggaccugaacgacgccgugcaggcccugaccgaccugggccugaucuacaccgccaaguaccccaacagcagcgaccuggacagacugagccagagccaccccauccugaacaugaucgacaccaagaagagcagccugaacaucagcggcuacaacuucagccugggcgccgccgugaaggccggcgccugcaugcuggacggcggcaacaugcuggagaccaucaaggugagcccccagaccauggacggcauccugaagagcauccugaaggugaagaagagccugggcauguucgugagcgacacccccggcgagagaaaccccuacgagaacauccuguacaagaucugccugagcggcgacggcuggagcuacaucgccagcagaaccagcaucgugggcagagccugggagaacaccgugguggaccuggagcaggacaacaagccccagaagaucggcaacggcggcagcaacaagagccugcagagcgccggcuucgccgccggccugaucuacagccagcugaugacccugaaggacuucaagugcuucaaccugauccccaacgccaagaccuggauggacaucgagggcagacccgaggaccccguggagaucgcccuguaccagcccagcagcggcugcuacgugcacuucuucagagagcccaccgaccugaagcaguucaagcaggacgccaaguacagccacggcagagacgugaccgaccuguucgccgcccagcccggccugaccagcgccgugaucgaggcccugcccagaaacauggugaucaccugccagggcagcgaggacaucagaaagcugcuggagagccagggcagaagagacaucaagcugaucgacaucacccugagcaaggccgacagcagaaaguucgagaacgccgugugggaccaguucaaggaccugugccacaugcacaccggcguggugguggagaagaagaagagaggcggcaaggaggagaucaccccccacugcgcccugauggacugcaucauguucgacgccgccgugagcggcggccuggacgccaaggugcugagaguggugcugcccagagacaugguguucagaaccagcacccccaagguggugcugugaggacuagucccuguucccagagcccacuuuuuuuucuuuuuuugaaauaaaauagccugucuuucagaucucaaaggcucuuuucagagccaccaaaaaaaaaaaaaaaaaaaaaaaaaaaaaaaaaaaaaaaaaaaaaaaaaaaaaaaaaaaaaaaaagaauu

SEQ ID NO: 20882 - RNA, 2002 nt, Artificial Sequence
  mRNA product Design a-1 (hSL-A64-N5) comprising derived and/or modified sequence from LASV(Nig08-A19;Clade III)__ADU56619__SP-IgE_NP(2-569) (opt4)
aggagagucccgcagucggcguccagcggcucugcuuguucgugugugugucguugcaggccuuauucaagcuuaccauggacuggaccuggauccuguuccugguggccgccgccaccagagugcacagcagcgccagcaaggaggugaagagcuuccuguggacccagagccugagaagagagcugagcggcuacugcagcaacaucaagcugcagguggugaaggacgcccaggcccugcugcacggccuggacuucagcgaggugagcaacgugcagagacugaugagaaagcagaagagagacgacggcgaccugaagagacugagagaccugaaccaggccgugaacaaccugguggagcugaagagcacccagcagaagagcgugcugagagugggcacccugagcagcgacgaccugcuggugcuggccgccgaccuggagaagcugaagagcaagguggugagaaccgagagaccccugagcagcggcaucuacaugggcaaccugagcagccagcagcuggaccagagaaaggcccugcugaacaugaucggcaugaccggcggcaacggcggcagaaacaccaccagcgacggcaucgugagagugugggacgugaagaacgccgagcugcugaacaaccaguucggcaccaugcccagccugacccuggccugccugaccaagcagggccagguggaccugaacgacgccgugcaggcccugaccgaccugggccugaucuacaccgccaaguaccccaacagcagcgaccuggacagacuggcccagagccaccccauccugaacaugaucgacaccaagaagagcagccugaacaucagcggcuacaacuucagccugggcgccgccgugaaggccggcgccugcaugcuggacggcggcaacaugcuggagaccaucaaggugagcccccagaccauggacggcauccugaagagcauccugaaggugaagagaagccugggcauguucaucagcgacacccccggcgagagaaaccccuacgagaacauccuguacaagaucugccugagcggcgacggcuggcccuacaucgccagcagaaccagcaucgugggcagagccugggagaacaccgugguggaccuggagagcgacaacaagccccagaagaccggcaacggcggcagcaacaagagccugcagagcgccggcuucgccgccggccugaccuacagccagcugaugacccugaaggacagcaugcugcagcuggaccccaacgccaagaccuggauggacaucgagggcagacccgaggaccccguggagaucgcccuguaccagcccagcagcggcugcuacauccacuucuucagagagcccaccgaccugaagcaguucaagcaggacgccaaguacagccacggcaucgacgugaccgaccuguucgccgcccagcccggccugaccagcgccgugaucgaggcccugcccagaaacauggugaucaccugccagggcagcgaggacaucagaaagcugcuggagagccagggcagaagagacaucaagcugaucgacaucagccugagcaagguggacagcagaaaguucgagaacgccgugugggaccaguucaaggaccugugccacaugcacaccggcaucgugguggagaagaagaagagaggcggcaaggaggagaucaccccccacugcgcccugauggacugcaucauguucgacgccgccgugagcggcggcguggacgccaaggugcugagagccgugcugcccagagacaugguguucagaaccagcacccccaagguggugcugugaggacuagucccuguucccagagcccacuuuuuuuucuuuuuuugaaauaaaauagccugucuuucagaucucaaaggcucuuuucagagccaccaaaaaaaaaaaaaaaaaaaaaaaaaaaaaaaaaaaaaaaaaaaaaaaaaaaaaaaaaaaaaaaaagaauu

SEQ ID NO: 20883 - RNA, 2002 nt, Artificial Sequence
  mRNA product Design a-1 (hSL-A64-N5) comprising derived and/or modified sequence from LASV(G1180-SLE-2010;Clade IV)__AIT17169__SP-IgE_NP(2-569) (opt4)
aggagagucccgcagucggcguccagcggcucugcuuguucgugugugugucguugcaggccuuauucaagcuuaccauggacuggaccuggauccuguuccugguggccgccgccaccagagugcacagcagcgccagcaaggagaucaagagcuuccuguggacccagagccugagaagagagcugagcggcuacugcagcaacaucaagcugcagguggugaaggacgcccaggcccugcugcacggccuggacuucagcgaggugagcaacgugcagagacugaugagaaaggagagaagagacgacaacgaccugaagagacugagagaccugaaccaggccgugaacaaccugguggagcugaagagcacccagcagaagagcauccugagagugggcacccugaccagcgacgaccugcugauccuggccgccgaccuggagaagcugaagagcaaggugaucagaaccgagagaccccugagcgccggcguguacaugggcaaccugagcagccagcagcuggaccagagaagagcccugcugagcaugaucggcaugagcagcggcaaccagagagcccaggccggcagagacggcguggugagagugugggacgugaagaacguggagcugcugaacaaccaguucggcaccaugcccagccugacccuggccugccugaccaagcagggccagguggaccugaacgacgccgugcaggcccugaccgaccugggccugaucuacaccgccaaguaccccaacaccagcgaccuggacagacugacccagagccaccccauccugaacaugaucgacaccaagaagagcagccugaacaucagcggcuacaacuucagccugggcgccgccgugaaggccggcgccugcaugcuggacggcggcaacaugcuggagaccaucaaggugagcccccagaccauggacggcauccugaagagcauccugaaggugaagaaggcccugggcauguucaucagcgacacccccggcgagagaaaccccuacgagaacauccuguacaagaucugccugagcggcgacggcuggcccuacaucgccagcagaaccagcaucaccggcagagccugggagaacaccgugguggaccuggagagcgacggcaagccccagaaggccggcagcaacaacagcaacaagagccugcagagcgugggcuucaccgccggccugaccuacagccagcugaugacccugaaggacgccaugcugcagcuggaccccaacgccaagaccuggauggacaucgagggcagacccgaggaccccguggagaucgcccuguaccagcccagcagcggcugcuacauccacuucuucagagagcccaccgaccugaagcaguucaagcaggacgccaaguacagccacggcaucgacgugaccgaccuguucgccgcccagcccggccugaccagcgccgugaucgacgcccugcccagaaacauggugaucaccugccagggcagcgacgacaucagaaagcugcuggagagccagggcagaaaggacaucaagcugaucgacaucgcccugagcaagaccgacagcagaaaguacgagaacgccgugugggaccaguacaaggaccugugccacaugcacaccggcguggugguggagaagaagaagagaggcggcaaggaggagaucaccccccacugcgcccugauggacugcaucauguucgacgccgccgugagcggcggccugaacaccagcgugcugagagccgugcugcccagagacaugguguucagaaccagcacccccagaguggugcugugaggacuagucccuguucccagagcccacuuuuuuuucuuuuuuugaaauaaaauagccugucuuucagaucucaaaggcucuuuucagagccaccaaaaaaaaaaaaaaaaaaaaaaaaaaaaaaaaaaaaaaaaaaaaaaaaaaaaaaaaaaaaaaaaagaauu

SEQ ID NO: 20884 - RNA, 2002 nt, Artificial Sequence
  mRNA product Design a-1 (hSL-A64-N5) comprising derived and/or modified sequence from LASV(G1442-SLE-2011;Clade IV)__AIT17181__SP-IgE_NP(2-569) (opt4)
aggagagucccgcagucggcguccagcggcucugcuuguucgugugugugucguugcaggccuuauucaagcuuaccauggacuggaccuggauccuguuccugguggccgccgccaccagagugcacagcagcgccagcaaggaggugaagagcuuccuguggacccagagccugagaagagagcugagcggcuacugcagcaacaucaagcugcagguggugaaggacgcccaggcccugcugcacggccuggacuucagcgaggugagcaacgugcagagacugaugagaaagcagagaagagacgacaacgaccugaagagacugagagaccugaaccaggccgugaacaaccugguggagcugaagagcacccagcagaagagcgugcugagagugggcacccugaccagcgacgaccugcuggugcuggccgccgaccuggagaagcugaagagcaaggugaucagaaccgagagaccccugagcgccggcguguacaugggcaaccugagcagccagcagcuggaccagagaagagcccugcugaacaugaucggcaugagcggcggcauccagggcaccagaaccggcagagacggcguggugagagugugggacgugaagaacgccgaccugcugaacaaccaguucggcaccaugcccagccugacccuggccugccugaccaagcagggccagguggaccugaacgacguggugcaggcccugaccgaccugggccugaucuacaccgccaaguaccccaacgccagcgaccuggacagacugacccagagccaccccauccugaacaugaucgacaccaagaagagcagccugaacaucagcggcuacaacuucagccugggcgccgccgugaaggccggcgccugcaugcuggacggcggcaacaugcuggagaccaucaaggugagcccccagaccauggacggcauccugaagagcauccugaaggugaagaagacccugggcauguucaucagcgacacccccggcgagagaaaccccuacgagaacauccuguacaagaucugccugagcggcgacggcuggcccuacaucgccagcagaaccagcaucaccggcagagccugggagaacaccgugguggaccuggagagcgacggcaagccccagaaggccggcagcaacaacagcaacaagagccugcagagcgccggcuucgccgccggccugaccuacagccagcugaugacccugaaggacgccaugcugcagcuggaccccaacgccaagaccuggauggacaucgagggcagacccgaggaccccguggagaucgcccuguaccagcccagcagcggcugcuacauccacuucuucagagagcccaccgaccugaagcaguucaagcaggacgccaaguacagccacggcaucgacgugaccgaccuguucgccgcccagcccggccugaccagcgccgugaucgaggcccugcccagaaacauggugaucaccugccagggcagcgacgacaucaagaagcugcuggagagccagggcagaaaggacaucaagcugaucgacaucgcccugagcaagaccgacagcagaaaguacgagaacgccgugugggaccaguacaaggaccugugccacaugcacaccggcguggugguggagaagaagaagagaggcggcaaggaggagaucaccccccacugcgcccugauggacugcaucauguucgacgccgccgugagcggcggccugaacacccuggugcugagagccgugcugcccagagacaugguguucagaaccagcacccccagaguggugcugugaggacuagucccuguucccagagcccacuuuuuuuucuuuuuuugaaauaaaauagccugucuuucagaucucaaaggcucuuuucagagccaccaaaaaaaaaaaaaaaaaaaaaaaaaaaaaaaaaaaaaaaaaaaaaaaaaaaaaaaaaaaaaaaaagaauu

SEQ ID NO: 20885 - RNA, 2002 nt, Artificial Sequence
  mRNA product Design a-1 (hSL-A64-N5) comprising derived and/or modified sequence from LASV(G3010-SLE-2013;Clade IV)__AIT17345__SP-IgE_NP(2-569) (opt4)
aggagagucccgcagucggcguccagcggcucugcuuguucgugugugugucguugcaggccuuauucaagcuuaccauggacuggaccuggauccuguuccugguggccgccgccaccagagugcacagcagcgccagcaaggagaucaagagcuuccuguggacccagagccugagaagagagcugagcggcuacugcagcaacaucaagcugcagguggugaaggacgcccaggcccugcugcacggccuggacuucagcgaggugagcaacgugcagagacugaugagaaaggagagaagagacgacaacgaccugaagagacugagagaccugaaccaggccgugaacaaccugguggagcugaagagcacccagcagaagagcauccugagagugggcacccugaccagcgacgaccugcugauccuggccgccgaccuggagaagcugaagagcaaggugaccagaaccgagagaccccugagcgccggcguguacaugggcaaccugagcagccagcagcuggaccagagaagagcccugcugagcaugaucggcaugagcagcggcgugcagggcgccagagccggcagagacggcguggugagagugugggacgugaagaacgccgagcugcugaacaaccaguucggcaccaugcccagccugacccuggccugccugaccaagcagggccagguggaccugaacgacguggugcaggcccugaccgaccugggccugaucuacaccgccaaguaccccaacaccagcgaccuggacagacugacccagagccaccccauccugaacaugaucgacaccaagaagagcagccugaacaucagcggcuacaacuucagccugggcgccgccgugaaggccggcgccugcaugcuggacggcggcaacaugcuggagaccaucaaggugagcccccagaccauggacggcauccugaagagcauccugaaggugaagaaggcccugggcauguucaucagcgagacccccggcgagagaaaccccuacgagaacauccuguacaagaucugccugagcggcgacggcuggcccuacaucgccagcagaaccagcaucaccggcagagccugggagaacaccgugguggaccuggagagcgacggcaagccccagaaggccggcagcaacaacagcaacaagagccugcagagcgccggcuucaccgccggccugaccuacagccagcugaugacccugaaggacgccaugcugcagcuggaccccaacgccaagaccuggauggacaucgagggcagacccgaggaccccguggagguggcccuguaccagcccagcagcggcugcuacauccacuucuucagagagcccaccgaccugaagcaguucaagcaggacgccaaguacagccacggcaucgacgugaccgaccuguucgccgcccagcccggccugaccagcgccgugaucgacgcccugcccagaaacauggugaucaccugccagggcagcgacgacaucaagaagcugcuggagagccagggcagaaaggacaucaagcugaucgacaucgcccugagcaagaccgacagcagaaaguacgagaacgccgugugggaccaguacaaggaccugugccacaugcacaccggcguggugguggagaagaagaagagaggcggcaaggaggagaucaccccccacugcgcccugauggacugcaucauguucgacgccgccgugagcggcggccugaacaccagcgugcugagagccgugcugcccagagacaugguguucagaaccagcacccccagaguggugcugugaggacuagucccuguucccagagcccacuuuuuuuucuuuuuuugaaauaaaauagccugucuuucagaucucaaaggcucuuuucagagccaccaaaaaaaaaaaaaaaaaaaaaaaaaaaaaaaaaaaaaaaaaaaaaaaaaaaaaaaaaaaaaaaaagaauu

SEQ ID NO: 20886 - RNA, 2002 nt, Artificial Sequence
  mRNA product Design a-1 (hSL-A64-N5) comprising derived and/or modified sequence from LASV(G502-SLE-2009;Clade IV)__AIT17127__SP-IgE_NP(2-569) (opt4)
aggagagucccgcagucggcguccagcggcucugcuuguucgugugugugucguugcaggccuuauucaagcuuaccauggacuggaccuggauccuguuccugguggccgccgccaccagagugcacagcagcgccagcaaggagaucaagagcuuccuguggacccagagccugagaagagagcugagcggcuacugcagcaacaucaagcugcagguggugaaggacgcccaggcccugcugcacggccuggacuucagcgaggugagcaacgugcagagacugaugagaaaggagagaagagacgacaacgaccugaagagacugagagaccugaaccaggccgugaacaaccugguggagcugaagagcacccagcagaagagcauccugagagugggcacccugaccagcgacgaccugcugauccuggccgccgaccuggagaagcugaagagcaaggugaucagaaccgagagaccccugagcgccggcguguacaugggcaaccugagcagccagcagcuggaccagagaagagcccugcugagcaugaucggcaugagcggcggcaaccagggcgugagagccggcaaggacggcguggugagagugugggacgugaagaacgccgagcugcugaacaaccaguucggcaccaugcccagccugacccuggccugccugaccaagcagggccagguggaccugaacgacgccgugcaggcccugaccgaccugggccugaucuacaccgccaaguaccccaacaccagcgaccuggacagacugacccagagccaccccauccugaacaugaucgacaccaagaagagcagccugaacaucagcggcuacaacuucagccugggcgccgccgugaaggccggcgccugcaugcuggacggcggcaacaugcuggagaccaucaaggugagcccccagaccauggacggcauccugaagagcauccugaaggugaagaaggcccugggcauguucaucagcgacacccccggcgagagaaaccccuacgagaacauccuguacaagaucugccugagcggcgacggcuggcccuacaucgccagcagaaccagcaucaccggcagagccugggagaacaccgugguggaccuggagagcgacggcaagccccagaaggccggcagcaacaacagcaacaagagccugcagagcgccggcuucaccgccggccugaccuacagccagcugaugacccugaaggacgccaugcugcagcuggaccccaacaccaagaccuggauggacaucgagggcagacccgaggaccccguggagaucgcccuguaccagcccagcagcggcugcuacauccacuucuucagagagcccaccgaccugaagcaguucaagcaggacgccaaguacagccacggcaucgacgugaccgaccuguucgccgcccagcccggccugaccagcgccgugaucgacgcccugcccagaaacauggugaucaccugccagggcagcgacgacaucagaaagcugcuggagagccagggcagaaaggacaucaagcugaucgacaucgcccugaacaagaccgacagcagaaaguacgagaacgccgugugggaccaguacaaggaccugugccacaugcacaccggcguggugguggagaagaagaagagaggcggcaaggaggagaucaccccccacugcgcccugauggacugcaucauguucgacgccgccgugagcggcggccugaacaccagcgugcugagagccgugcugcccagagacaugguguucagaaccagcacccccagaguggugcugugaggacuagucccuguucccagagcccacuuuuuuuucuuuuuuugaaauaaaauagccugucuuucagaucucaaaggcucuuuucagagccaccaaaaaaaaaaaaaaaaaaaaaaaaaaaaaaaaaaaaaaaaaaaaaaaaaaaaaaaaaaaaaaaaagaauu

SEQ ID NO: 20887 - RNA, 2002 nt, Artificial Sequence
  mRNA product Design a-1 (hSL-A64-N5) comprising derived and/or modified sequence from LASV(G733-SLE-2010;Clade IV)__AIT17155__SP-IgE_NP(2-569) (opt4)
aggagagucccgcagucggcguccagcggcucugcuuguucgugugugugucguugcaggccuuauucaagcuuaccauggacuggaccuggauccuguuccugguggccgccgccaccagagugcacagcagcgccagcaaggagaucaagagcuuccuguggacccagagccugagaagagagcugagcggcuacugcagcaacaucaagcugcagguggugaaggacgcccaggcccugcugcacggccuggacuucagcgaggugagcaacgugcagagacugaugagaaaggagagaagagacgacaacgaccugaagagacugagagaccugaaccaggccgugaacaaccugguggagcugaagagcacccagcagaagagcgugcugagagugggcacccugaccagcgacgagcugcuggugcuggccgccgaccuggagaagcugaagagcaaggugaucagaaccgagagaccccugagcgccggcguguacaugggcaaccugagcagccagcagcuggaccagagaagagcccugcugagcaugaucggcaugagcggcggcaaccagggcgccagaaccggcagagacggcguggugagagugugggacgugaagaacgccgagcugcugaacaaccaguucggcaccaugcccagccugacccuggccugccugaccaagcagggccagguggaccugaacgacgccgugcaggcccugaccgaccugggccugaucuacaccgccaaguaccccaacaccagcgaccuggacagacugacccagagccaccccauccugaacaugaucgacaccaagaagagcagccugaacaucagcggcuacaacuucagccugggcgccgccgugaaggccggcgccugcaugcuggacggcggcaacaugcuggagaccaucaaggugagcccccagaccauggacggcauccugaagagcauccugaaggugaagaaggcccugggcauguucaucagcgacacccccggcgagagaaaccccuacgagaacauccuguacaagaucugccugagcggcgacggcuggcccuacaucgccagcagaaccagcaucaccggcagagccugggagaacaccgugguggaccuggagagcgacggcaagccccagaaggccggcagcaacaacagcaacaagagccugcagagcgccggcuucaccgccggccugaccuacagccagcugaugacccugaaggacgccaugcugcagcuggaccccaacgccaagaccuggauggacaucgagggcagacccgaggaccccguggagaucgcccuguaccagcccagcagcggcugcuacauccacuucuucagagagcccaccgaccugaagcaguucaagcaggacgccaaguacagccacggcaucgacgugaccgaccuguucgccgcccagcccggccugaccagcgccgugaucgacgcccugcccagaaacauggugaucaccugccagggcagcgacgacaucagaaagcugcuggagagccagggcagaaaggacaucaagcugaucgacaucgcccugagcaagaucgacagcagaaaguacgagaacgccgugugggaccaguacaaggaccugugccacaugcacaccggcguggugguggagaagaagaagagaggcggcaaggaggagaucaccccccacugcgcccugauggacugcaucauguucgacgccgccgugagcggcggccugaacagccuggugcugagagccgugcugcccagagacaugguguucagaaccagcacccccagaguggugcugugaggacuagucccuguucccagagcccacuuuuuuuucuuuuuuugaaauaaaauagccugucuuucagaucucaaaggcucuuuucagagccaccaaaaaaaaaaaaaaaaaaaaaaaaaaaaaaaaaaaaaaaaaaaaaaaaaaaaaaaaaaaaaaaaagaauu

SEQ ID NO: 20888 - RNA, 2002 nt, Artificial Sequence
  mRNA product Design a-1 (hSL-A64-N5) comprising derived and/or modified sequence from MOPV/LASV reassortant(IGS-1;Clade IV)__AFY05578__SP-IgE_NP(2-569) (opt4)
aggagagucccgcagucggcguccagcggcucugcuuguucgugugugugucguugcaggccuuauucaagcuuaccauggacuggaccuggauccuguuccugguggccgccgccaccagagugcacagcagcgccagcaaggagaucaagagcuuccuguggacccagagccugagaagagagcugagcggcuacugcagcaacaucaagcugcagguggugaaggacgcccaggcccugcugcacggccuggacuucagcgaggugagcaacgugcagagacugaugagaaaggagagaagagacgacaacgaccugaagagacugagagaccugaaccaggccgugaacaaccugguggagcugaagagcacccagcagaagagcauccugagagugggcacccugaccagcgacgaccugcugauccuggccgccgaccuggagaagcugagaagcaaggugaucagaaccgagagaccccugagcgccggcguguacaugggcaaccugagcagccagcagcuggaccagagaagagcccugcugaacaugaucggcaugagcggcggcaaccagggcgccagagccggcagagacggcguggugagagugugggacgugaagaacgccgagcugcugagcaaccaguucggcaccaugcccagccugacccuggccugccugaccaagcagggccagguggaccugaacgacgccgugcaggcccugaccgaccugggccugaucuacaccgccaaguaccccaacaccagcgaccuggacagacugacccagagccaccccauccugaacaugaucgacaccaagaagagcagccugaacaucagcggcuacaacuucagccugggcgccgccgugaaggccggcgccugcaugcuggacggcggcaacaugcuggagaccaucaaggugagcccccagaccauggacggcauccugaagagcauccugaaggugaagaaggcccugggcauguucaucagcgacacccccggcgagagaaaccccuacgagaacauccuguacaagaucugccugagcggcgacggcuggcccuacaucgccagcagaaccagcaucaccggcagagccugggagaacaccgugguggaccuggagagcgacggcaagccccagaaggccgacagcaacaacagcagcaagagccugcagagcgccggcuucaccgccggccugaccuacagccagcugaugacccugaaggacgccaugcugcagcuggaccccaacgccaagaccuggauggacaucgagggcagacccgaggaccccguggagaucgcccuguaccagcccagcagcggcugcuacauccacuucuucagagagcccaccgaccugaagcaguucaagcaggacgccaaguacagccacggcaucgacgugaccgaccuguucgccacccagcccggccugaccagcgccgugaucgacgcccugcccagaaacauggugaucaccugccagggcagcgacgacaucagaaagcugcuggagagccagggcagaaaggacaucaagcugaucgacaucgaccugagcaagaccgacagcagaaaguacgagaacgccgugugggaccaguacaaggaccugugccacaugcacaccggcguggugguggagaagaagaagagaggcggcaaggaggagaucaccccccacugcgcccugauggacugcaucauguucgacgccgccgugagcggcggccugaacaccagcgugcugagagccgugcugcccagagacaugguguucagaaccagcacccccagaguggugcugugaggacuagucccuguucccagagcccacuuuuuuuucuuuuuuugaaauaaaauagccugucuuucagaucucaaaggcucuuuucagagccaccaaaaaaaaaaaaaaaaaaaaaaaaaaaaaaaaaaaaaaaaaaaaaaaaaaaaaaaaaaaaaaaaagaauu

SEQ ID NO: 20889 - RNA, 2002 nt, Artificial Sequence
  mRNA product Design a-1 (hSL-A64-N5) comprising derived and/or modified sequence from LASV(LM765-SLE-2012;Clade IV)__AIT17815__SP-IgE_NP(2-569) (opt4)
aggagagucccgcagucggcguccagcggcucugcuuguucgugugugugucguugcaggccuuauucaagcuuaccauggacuggaccuggauccuguuccugguggccgccgccaccagagugcacagcagcgccagcaaggagaucaagagcuuccuguggacccagagccugagaagagagcugagcggcuacugcagcaacaucaagcugcagguggugaaggacgcccaggcccugcugcacggccuggacuucagcgaggugagcaacgugcagagacugaugagaaaggagagaagagacgacaacgaccugaagagacugagagaccugaaccaggccgugaacaaccugguggagcugaagagcacccagcagaagagcauccugagagugggcacccugaccagcgacgaccugcugauccuggccgccgaccuggagaagcugaagagcaaggugaccagaaccgagagaccccugagcgccggcguguacaugggcaaccugagcagccagcagcuggaccagagaagagcccugcuggacaugaucggcaugagcggcagcaaccagggcgccagagccggcagagacggcguggugagagugugggacgugaagaacgccgagcugcugaacaaccaguucggcaccaugcccagccugacccuggccugccugaccaagcagggccagguggaccugaacgacgccgugcaggcccugaccgaccugggccugaucuacaccgccaaguaccccaacaccagcgaccuggacagacugacccagagccaccccauccugaacaugaucgacaccaagaagagcagccugaacaucagcggcuacaacuucagccugggcgccgccgugaaggccggcgccugcaugcuggacggcggcaacaugcuggagaccaucaaggugagcccccagaccauggacggcauccugaagagcauccugaaggugaagaaggcccugggcauguucaucagcgacgcccccggcgagagaaaccccuacgagaacauccuguacaagaucugccugagcggcgacggcuggcccuacaucgccagcagaaccagcaucaccggcagagccugggagaacaccgugguggaccuggagagcgacggcaagccccagaaggccggcagcaacggcagcaacaagagccugcagagcgccggcuucaccgccggccugaccuacagccagcugaugacccugaaggacgccaugcugcagcuggaccccaacgccaagaccuggauggacaucgagggcagacccgaggaccccguggagaucgcccuguaccagcccagcagcggcugcuacauccacuucuucagagagcccaccgaccugaagcaguucaagcaggacgccaaguacagccacggcaucgacgugaccgaccuguucgccgcccagcccggccugaccagcgccgugaucgacgcccugcccagaaacauggugaucaccugccagggcagcgacgacaucagaaagcuguucgagagccagggcagaaaggacaucaagcugaucgacaucgcccugagcaagaccgacagcagaaaguacgagaacgccgugugggaccaguacaaggaccugugccacaugcacaccggcaucgugguggagaagaagaagagaggcggcaaggaggagaucaccccccacugcgcccugauggacugcaucauguucgacgccgccgugagcggcggccugaacaccagcgugcugagagccgugcugcccagagacaugguguucagaaccagcacccccagaguggugcugugaggacuagucccuguucccagagcccacuuuuuuuucuuuuuuugaaauaaaauagccugucuuucagaucucaaaggcucuuuucagagccaccaaaaaaaaaaaaaaaaaaaaaaaaaaaaaaaaaaaaaaaaaaaaaaaaaaaaaaaaaaaaaaaaagaauu

SEQ ID NO: 20890 - RNA, 2002 nt, Artificial Sequence
  mRNA product Design a-1 (hSL-A64-N5) comprising derived and/or modified sequence from LASV(LM776-SLE-2012;Clade IV)__AIT17825__SP-IgE_NP(2-569) (opt4)
aggagagucccgcagucggcguccagcggcucugcuuguucgugugugugucguugcaggccuuauucaagcuuaccauggacuggaccuggauccuguuccugguggccgccgccaccagagugcacagcagcgccagcaaggagaucaagagcuuccuguggacccagagccugagaagagagcugagcagcuacugcagcaacaucaagcugcagguggugaaggacgcccaggcccugcugcacggccuggacuucagcgaggugagcaacgugcagagacugaugagaaaggagagaagagacgacaacgaccugaagagacugagagaccugaaccaggccgugaacaaccugguggagcugaagagcacccagcagaagagcauccugagagugggcacccugaccagcgacgaccugcugauccuggccgccgaccuggagaagcugaagagcaaggugaccagaaccgagagaccccugagcgccggcguguacaugggcaaccugagcagccagcagcuggaccagagaagagcccugcugagcaugaucggcaugagcggcagcaaccagggcgccagagccggcagagacggcguggugagagugugggacgugaagaacgccgagcugcugaacaaccaguucggcaccaugcccagccugacccuggccugccugaccaagcagggccagguggaccugaacgacgccgugcaggcccugaccgaccugggccugaucuacaccgccaaguaccccaacaccagcgaccuggacagacugacccagagccaccccauccugaacaugaucgacaccaagaagagcagccugaacaucagcggcuacaacuucagccugggcgccgccgugaaggccggcgccugcaugcuggacggcggcaacaugcuggagaccaucaaggugagcccccagaccauggacggcauccugaagagcauccugaaggugaagaaggcccugggcauguucaucagcgacacccccggcgagagaaaccccuacgagaacauccuguacaagaucugccugagcggcgacggcuggcccuacaucgccagcagaaccagcaucaccggcagagccugggagaacaccgugguggaccuggagagcgacggcaagccccagaaggccggcagcaacaacagcaacaagagccugcagagcgccggcuucaccgccggccugaccuacagccagcugaugacccugaaggacgccaugcugcagcuggaccccaacgccaagaccuggauggacaucgagggcagacccgaggaccccguggagguggcccuguaccagcccagcagcggcugcuacauccacuucuucagagagcccaccgaccugaagcaguucaagcaggacgccaaguacagccacggcaucgacgugaccgaccuguucgccgcccagcccggccugaccagcgccgugaucgacgcccugcccagaaacauggugaucaccugccagggcagcgacgacaucagaaagcugcuggagagccagggcagaaaggacaucaagcugaucgacaucgcccugagcaagaccgacagcagaaaguacgagaacgccgugugggaccaguacaaggaccugugccacaugcacaccggcguggugguggagaagaagaagagaggcggcaaggaggagaucaccccccacugcgcccugauggacugcaucauguucgacgccgccgugagcggcggccugaacaccagcgugcugagagccgugcugcccagagacaugguguucagaaccagcacccccagaguggugcugugaggacuagucccuguucccagagcccacuuuuuuuucuuuuuuugaaauaaaauagccugucuuucagaucucaaaggcucuuuucagagccaccaaaaaaaaaaaaaaaaaaaaaaaaaaaaaaaaaaaaaaaaaaaaaaaaaaaaaaaaaaaaaaaaagaauu

SEQ ID NO: 20891 - RNA, 2002 nt, Artificial Sequence
  mRNA product Design a-1 (hSL-A64-N5) comprising derived and/or modified sequence from LASV(Mad39;Clade IV)__ANH09723__SP-IgE_NP(2-569) (opt4)
aggagagucccgcagucggcguccagcggcucugcuuguucgugugugugucguugcaggccuuauucaagcuuaccauggacuggaccuggauccuguuccugguggccgccgccaccagagugcacagcagcgccagcaaggagaucaagagcuuccuguggacccagagccugagaagagagcugagcggcuacugcagcaacaucaagcugcagguggugaaggacgcccaggcccugcugcacggccuggacuucagcgaggugagcaacgugcagagacugaugagaaagcagagaagagacgacaacgaccugaagagacugagagaccugaaccaggccgugaacaaccugguggagcugaagagcacccagcagaagagcgugcugagagugggcacccugaccagcgacgaccugcugacccuggccgccgaccuggagaagcugaagagcaaggugaccagaaccgagagaccccugaccgccggcguguacaugggcaaccugagcagccagcagcuggaccagagaagagcccugcugaacaugaucggcaugagcggcggcaaccagggcgccagaaccggcagagacggcguggugagagugugggacgugaagaacgccgagcugcugaacaaccaguucggcaccaugcccagccugacccuggccugccugaccaagcagggccagguggaccugaacgacguggugcaggcccugaccgaccugggccugaucuacaccgccaaguaccccaacaccagcgaccuggacagacugacccagagccaccccauccugaacaugaucgacaccaacaagagcagccugaacaucagcggcuacaacuucagccugggcgccgccgugaaggccggcgccugcaugcuggacggcggcaacaugcuggagaccaucaaggugagcccccagaccauggacggcauccugaagagcauccugaaggugaagaagagccugggcauguucaucagcgacacccccggcgagagaaaccccuacgagaacauccuguacaagaucugccugagcggcgacggcuggcccuacaucgccagcagaaccagcaucaccggcagagccugggagaacaccgugguggaccuggagagcggcggcaagccccagaaggccggcagcaacaacagcaacaagagccugcagagcgccggcuucgccgccggccugaccuacagccagcugaugacccugaaggacgccaugcugcagcuggaccccaacgccaagaccuggauggacaucgagggcagacccgaggaccccguggagaucgcccuguaccagcccaucagcggcugcuacauccacuucuucagagagcccaccgaccugaagcaguucaagcaggacgccaaguacagccacggcaucgacgugaccgaccuguucgccgcccagcccggccugaccagcgccgugaucgaggcccugcccagaaacauggugaucaccugccagggcagcgacgacaucagaaagcuguucgagagccagggcagaaaggacaucaagcugaucgacaucgcccugagcaagaccgacagcagaaaguacgagaacgccgugugggaccaguacaaggaccugugccacaugcacaccggcguggugguggagaagaagaagaagggcggcaaggaggagaucaccccccacugcgcccugauggacugcaucauguucgacgccgccgugagcggcggccugaacacccuggugcugagagccgugcugcccagagacaugguguucagaaccagcacccccaagguggugcugugaggacuagucccuguucccagagcccacuuuuuuuucuuuuuuugaaauaaaauagccugucuuucagaucucaaaggcucuuuucagagccaccaaaaaaaaaaaaaaaaaaaaaaaaaaaaaaaaaaaaaaaaaaaaaaaaaaaaaaaaaaaaaaaaagaauu

SEQ ID NO: 20892 - RNA, 2002 nt, Artificial Sequence
  mRNA product Design a-1 (hSL-A64-N5) comprising derived and/or modified sequence from LASV(Z0947-SLE-2011;Clade IV)__AIT17841__SP-IgE_NP(2-569) (opt4)
aggagagucccgcagucggcguccagcggcucugcuuguucgugugugugucguugcaggccuuauucaagcuuaccauggacuggaccuggauccuguuccugguggccgccgccaccagagugcacagcagcgccagcaaggagaucaagagcuuccuguggacccagagccugagaagagagcugagcggcuacugcagcaacaucaagcugcagguggugaaggacgcccaggcccugcugcacggccuggacuucagcgaggugagcaacgugcagagacugaugagaaaggagagaagagacgacaacgaccugaagagacugagagaccugaaccaggccgugaacaaccugguggagcugaagagcacccagcagaagagcauccugagagugggcacccugaccagcgacgaccugcugauccuggccgccgaccuggagaagcugaagagcaaggugaccagaaccgagagaccccugagcgccggcguguacaugggcaaccugagcagccagcagcuggaccagagaagagcccugcugaacaugaucggcaugagcggcagcaaccagggcgccagaaccggcagagacggcguggugagagugugggacgugaagaacgccgagcugcugaacaaccaguucggcaccaugcccagccugacccuggccugccugaccaagcagggccagguggaccugaacgacgccgugcaggcccugaccgaccugggccugaucuacaccgccaaguaccccaacaccagcgaccuggacagacugacccagagccaccccauccugaacaugaucgacaccaagaagagcagccugaacaucagcggcuacaacuucagccugggcgccgccgugaaggccggcgccugcaugcuggacggcggcaacaugcuggagaccaucaaggugagcccccagaccauggacggcauccugaagagcauccugaaggugaagaaggcccugggcauguucaucagcgacgcccccggcgagagaaaccccuacgagaacauccuguacaagaucugccugagcggcgacggcuggcccuacaucgccagcagaaccagcaucaccggcagagccugggagaacaccgugguggaccuggagagcgacggcaagccccagaaggccggcagcaacggcagcaacaagagccugcagagcgccggcuucaccgccggccugaccuacagccagcugaugacccugaaggacgccaugcugcagcuggaccccaacgccaagaccuggauggacaucgagggcagacccgaggaccccguggagaucgcccuguaccagcccagcagcggcugcuacauccacuucuucagagagcccaccgaccugaagcaguucaagcaggacgccaaguacagccacggcaucgacgugaccgaccuguucgccgcccagcccggccugaccagcgccgugaucgacgcccugcccagaaacauggugaucaccugccagggcagcgacgacaucagaaagcuguucgagagccagggcagaaaggacaucaagcugaucgacaucgcccugagcaagaccgacagcagaaaguacgagaacgccgugugggaccaguacaaggaccugugccacaugcacaccggcaucgugguggagaagaagaagagaggcggcaaggaggagaucaccccccacugcgcccugauggacugcaucauguucgacgccgccgugagcggcggccugaacaccagcgugcugagagccgugcugcccagagacaugguguucagaaccagcacccccagaguggugcugugaggacuagucccuguucccagagcccacuuuuuuuucuuuuuuugaaauaaaauagccugucuuucagaucucaaaggcucuuuucagagccaccaaaaaaaaaaaaaaaaaaaaaaaaaaaaaaaaaaaaaaaaaaaaaaaaaaaaaaaaaaaaaaaaagaauu

SEQ ID NO: 20893 - RNA, 2002 nt, Artificial Sequence
  mRNA product Design a-1 (hSL-A64-N5) comprising derived and/or modified sequence from LASV(Josiah;Clade IV)__NP_694869__SP-IgE_NP(2-569) (opt5)
aggagagucccgcagucggcguccagcggcucugcuuguucgugugugugucguugcaggccuuauucaagcuuaccauggacuggaccuggauccuguuccucguggccgcugccacaagaguccacagcagcgccuccaaggagaucaaaucuuuccuguggacccagagccucagacgggaacuguccggcuacugcucuaacauuaagcugcaaguggucaaagacgcucaggcccugcuccacgggcuggauuuuagcgagguuuccaaugugcagcgccuuaugagaaaggaacggcgcgacgauaacgaccugaaaagacuccgggaucugaaucaggcggugaacaaucuggucgagcucaagucuacacaacaaaagagcauccugcgcgugggaacgcuuaccuccgacgaucugcucauucuggcugccgaccuugaaaaacuuaagagcaaaguuaucagaacagagcggccccucucugccggcguguauauggggaaccuguccagccagcagcuggaucagcgcagagcucuccugaauaugauuggaaugucuggcgggaaccagggagcccgggcuggccgcgacggcgucgugagaguuugggaugugaagaaugccgagcuucugaacaaucaguucgggaccaugccuucccucacacuggcgugucuuaccaaacagggacaagucgaccugaacgaugccgugcaggcucucacagaccugggccugaucuacaccgccaaguauccgaauacgagcgaccucgaucggcugacccagucucaucccauccuuaacaugauugacacaaagaaauccagccugaauaucuccggguacaacuuuucucucggagcugccgugaaggcgggcgccugcaugcuggaugggggaaacaugcuugaaaccauuaaagucagcccucaaacaauggacggcauccugaaguccauucucaaaguuaagaaagcucugggcauguucaucagcgauacccccggggagcgcaauccuuaugaaaacauucuguacaagaucugucucucuggagacggcuggcccuauaucgccuccagaacgagcauuacagggcgggcuugggagaauaccgugguggaucuggagucugacggaaagccucagaaagccgauagcaacaauuccucuaagagccuucaguccgccggcuuuacagcugggcugaccuacagccagcucaugacccugaaagacgcgaugcugcaacuugauccgaacgccaagacauggauggacaucgaaggaagacccgaggacccugucgaaauugcucucuaccagcccucuuccggcugcuauauccacuucuuucgcgagccuacggaucugaaacaguucaagcaggacgccaaguacagccauggcauugaugugaccgaccuguuugccacacaacccgggcucaccucugcuguuaucgaugcccugccgcggaauauggugaucacaugucagggauccgacgauauuagaaaacuucuggaaagccagggccgcaaggacaucaaacucauugauaucgcgcuguccaagaccgacucucggaaauaugagaacgcugucugggaucaguacaaggaccugugccacaugcauacgggggugguuguggagaagaaaaagagaggaggcaaagaagagauuacaccucacugugcccuuauggauugcaucauguucgacgccgcugucagcgggggccucaauaccuccgugcugcgcgccguccugccccgggacaugguguuuagaaccucuacaccucgcguugugcucugaggacuagucccuguucccagagcccacuuuuuuuucuuuuuuugaaauaaaauagccugucuuucagaucucaaaggcucuuuucagagccaccaaaaaaaaaaaaaaaaaaaaaaaaaaaaaaaaaaaaaaaaaaaaaaaaaaaaaaaaaaaaaaaaagaauu

SEQ ID NO: 20894 - RNA, 2002 nt, Artificial Sequence
  mRNA product Design a-1 (hSL-A64-N5) comprising derived and/or modified sequence from LASV(LP;Clade I)__AAF86702__SP-IgE_NP(2-569) (opt5)
aggagagucccgcagucggcguccagcggcucugcuuguucgugugugugucguugcaggccuuauucaagcuuaccauggacuggaccuggauccuguuccucguggccgcugccacaagaguccacagcagcaacuccaaggagaucaaaucuuuccuguggacccagagccucagacgggaacuguccggcuacugcucuaauauuaagcuccaaguggucaaagacgcccaggcucugcuccacgggcuggauuuuagcgagguuuccaacgugcagcgccuuaugagaaagcagaaacgggacgaugccgaccugaagcgccucagagaucugaaucaagcggugaacaaucuggucgaacucaagucuacacagcagaaaaacgugcugcggguuggaacgcuuagcuccgacgaucugaucacccucgcugccgaccuggagaaacuuaaaagcaaggugauucgcacagaaagaccccugucuuccggcgucuauauggggaaucucagcucucagcaacuggaucagcggcgcgcccugcucuccaugaucggaaugagcggcgggccucagggaaacagaaccggcggcgacggggugguucgggugugggaugucaaaaaugcugagcugcuuaacaaucaguucggaacaaugccgucucugacccucgccugucugacaaagcaaggccagguggaccuuaacgaugcugugcaggcccugaccgaccucgggcugauuuacacggcgaaguaucccaauuccagcgaccuggauaugcucacccaaucccauccuauccugggaauggucgacacaaagaagucuagccuuaacaucuccggcuacaauuuuagccugggggccgcuguuaaagccggagcuugcaugcucgauggcggcaacaugcuggagaccauuaaggugucuccccagacaauggacgggauccuuaaauccauucugaaggugaaacgcagccucggaauguucaucucugauaccccuggcgaaagaaaccccuaugagaauauucuguacaagaucugucugagcggggaaggauggccuuauauugccucccggacgucuaucacaggccgcgcgugggagaacacccucgucgaccuggagagcgauaauaagccgcccaaacuuaacuccgccgggagcaauaagucucugcaggcugccggacucaacgcuggccugacauacucccagcugaugacccuuaaagacugcaugcuccaacuggauccuagcucuaagaccuggaucgacauugaaggcagacccgaggauccuguggaaaucgcccuguuucagcccuccagcggguguuacauucacuucuuucgggagccgacagaccucaaacaguucaagcaggacgccaaguauucccauggaaucgauguuacggaccuguuuucuacccaaccuggccuuacaagcgcugugauugaagcgcugcccagaaauaugguccuuaccugccagggguccgaugacaucaaaaagcugcuggagucucagggacgccgggauaucaaacuuauugacaucagccucuccaaggccgauagcagaaaauucgagaacgcugugugggaccaguacaaggaucugugucacaugcauacaggcguuguggucgaaaagaaaaagcgcgggggcaaagaggaaauuaccccucacugcgcccugcucgacuguaucauguuugaugccgcuacgacaggaucucugaauauuaccacccuucgggccgugcugcccagagacauggucuuccgcacauccacccccaaggugguucucugaggacuagucccuguucccagagcccacuuuuuuuucuuuuuuugaaauaaaauagccugucuuucagaucucaaaggcucuuuucagagccaccaaaaaaaaaaaaaaaaaaaaaaaaaaaaaaaaaaaaaaaaaaaaaaaaaaaaaaaaaaaaaaaaagaauu

SEQ ID NO: 20895 - RNA, 2002 nt, Artificial Sequence
  mRNA product Design a-1 (hSL-A64-N5) comprising derived and/or modified sequence from LASV(803213;Clade II)__AAF86704__SP-IgE_NP(2-569) (opt5)
aggagagucccgcagucggcguccagcggcucugcuuguucgugugugugucguugcaggccuuauucaagcuuaccauggacuggaccuggauccuguuccucguggccgcugccacaagaguccacagcagcgccuccaaggaggugaaaucuuuccuguggacccagagccucagacgggaacuguccggcuacugcucuaacaucaaacuucaagucguuaaggacgcucaggcccugcuccacgggcuggauuuuagcgaggugaauaacgugcagcgccuuaugagaaagcagaaacgggacgauggagaccugaagcgccucagagaucugaaucaagcggucaacaaucugguggaacucaaguccacacagcagaaaucuauucugcggguuggcacgcuuaccagcgacgaucugcucacacuggcugccgaccuugagaagcugaaauccaaggugauccgcaccgaaagaccccucagcucuggggucuauaugggaaaccuguccacacagcaacuggagcagcggcgcgcccuccugaauaugauuggcauggugggaggagcucagggcacccagccuggcagagaugggguugugcgggucugggacgugaaaaacccggaucuucugaauaaccaauucggaacaaugcccagccucacccuggccugucuuacgaagcagggccagguggaccugaaugaugcuguccucgcccugaccgaccuggggcucaucuacacagcgaaguauccuaacucuuccgaccuggaucgccuuagccaaucucaucccauucugaauaugguugacaccaaaaaguccagccucaacaucuccggauacaauuuuucucugggcgccgcugugaaagccggggcuugcaugcuugauggaggcaacaugcuggagacaaucaaggugaccccucagacgauggacggcauucucaaaagcauccugaaggucaaaagaucccuggggauguucgugagcgauacacccggagaacggaacccuuaugagaauauucucuacaagaucugucugucuggcgacggguggccguauauugccucccgcaccagcaucguugggagagcgugggaaaacacaaccguggaucuugagucugacggcaagccccagaaagucgggaccgccggaagcaauaagucccugcagucugcuggcuuuccuacaggccucacguacagccaacugaugacccugaaagauuccaugaugcagcuugaccccagcgccaagacauggauugauaucgaggggcggccugaagaccccguggagaucgcucucuaccagccgaugucuggaugcuauauucacuucuuuagagaaccuaccgaccugaaacaguucaagcaagaugccaaguacucccauggcaucgacguugccgaucuguuucccgcucagccugggcucacaagcgcggugauugaggcccugccccgcaacaugguccuuaccugucagggaucugacgauaucaaaaagcugcucgacucccagggccggagagauauuaaacugaucgacaucagccuguccaagguggauucucgcaaauucgaaaaugcugucugggaccaaugcaaggaucuuugucacaugcauacgggggugguuguggagaagaaaaagcggggcggaaaagaggaaauuacaccccacugcgcccucauggacuguaucauguuugaugccgcugucagcggcgggcugaacauuccugugcugagagccguucucccgcgcgacaugguguuccggaccuccucucccaaggucgugcugugaggacuagucccuguucccagagcccacuuuuuuuucuuuuuuugaaauaaaauagccugucuuucagaucucaaaggcucuuuucagagccaccaaaaaaaaaaaaaaaaaaaaaaaaaaaaaaaaaaaaaaaaaaaaaaaaaaaaaaaaaaaaaaaaagaauu

SEQ ID NO: 20896 - RNA, 2005 nt, Artificial Sequence
  mRNA product Design a-1 (hSL-A64-N5) comprising derived and/or modified sequence from LASV(GA391;Clade III)__CAA36646__SP-IgE_NP(2-570) (opt5)
aggagagucccgcagucggcguccagcggcucugcuuguucgugugugugucguugcaggccuuauucaagcuuaccauggacuggaccuggauccuguuccucguggccgcugccacaagaguccacagcagcgccuccaaggaggugagaucuuuccuguggacccagagccuccggcgcgaacuguccggcuacugcucuaacaucaaacuucaagucguuaaggacgcucaggcccugcuccacgggcuggauuuuagcgagguguccaaugugcagagacuuaugcggaaacagaagcgcgacgauggagaccugaaaagacuccgggaucugaaccaagcggucaauaaccugguggaacucaagucuacacagcagaaaagcguucugcgcgugggcacgcuuuccagcgacgaucugcucauucuggcugccgaccuugagaaacugaagucuaaagucaccagaacagaacggccccucuccagcgggguguauaugggaaaucugucuucccagcaacuggaucagcgcagagcccuccugaacaugaucggcaugaccgggguuagcggaggcggcaagggggcuucugacggaauugugcgggucugggaugugaaaaaugccgagcuucugaacaaucaguucggcacaaugccuucccucacccuggcuugucuuacaaagcaggggcaaguggaccugaacgaugccguccaggcgcucaccgaccugggacugaucuacacggccaaguauccgaauagcuccgaccucgaucgccugucucagagccaucccauucuuaacaugaucgacaccaaaaaguccagccugaauaucucuggcuacaacuuuucccucggggcugccguuaaagcuggagccugcaugcuggauggcggcaauaugcuugagacaauuaaggugagcccucaaaccauggacgggauccugaaaucuauucucaaggugaaaaagagccugggaauguucgucuccgauacacccggcgaaagaaacccuuaugagaacauccuguacaagauuugucucucuggggacggauggcccuauaucgcgagccggaccuccauugugggccgcgccugggaaaauacgguuguggaucuggagcaggacaacaaaccucagaagaucgggaauggaggcagcaacaaaucucuucaguccgcuggcuuugccgcugggcugacauacagccaacucaugacccugaaggauuucaaaugcuuuaaucugaucccgaacgccaagacauggauggacauugagggaagacccgaagauccugucgagaucgcccuuuaccagcccucuuccggcuguuaugugcacuucuuucgggaaccuaccgaccucaagcaguucaaacaggacgcuaaguacagccaugggauugauguuaccgaccuguuugcggcccaacccggacugacauccgcugugaucgaggcccucccgagaaauauggucauuacgugccagggcucugaagauauccgcaaacugcuugagagccaggggcggagagacaucaagcugauugauaucacccucuccaaagccgacucucgcaaguucgagaacgcugugugggaucaguuuaaggaccugugucacaugcauacaggcgucgugguugaaaagaagaaacggggaggcaaggaggaaauuaccccucacugcgcccugauggauuguaucauguucgacgcggcugugagcgggggacuugaugccaaaguccucagagugguucugccccgcgacaugguguuccggacauccaccccuaaggucgugcugugaggacuagucccuguucccagagcccacuuuuuuuucuuuuuuugaaauaaaauagccugucuuucagaucucaaaggcucuuuucagagccaccaaaaaaaaaaaaaaaaaaaaaaaaaaaaaaaaaaaaaaaaaaaaaaaaaaaaaaaaaaaaaaaaagaauu

SEQ ID NO: 20897 - RNA, 2002 nt, Artificial Sequence
  mRNA product Design a-1 (hSL-A64-N5) comprising derived and/or modified sequence from LASV(AV;Clade V)__CCA30315__SP-IgE_NP(2-569) (opt5)
aggagagucccgcagucggcguccagcggcucugcuuguucgugugugugucguugcaggccuuauucaagcuuaccauggacuggaccuggauccuguuccucguggccgcugccacaagaguccacagcagcgccuccaaggaggugaaaucuuuccuguggacccagagccucagacgggaacuguccggcuacugcucuaacaucaaacuucaagucguuaaggacgcucaggcccugcuccacgggcuggauuuuagcgagguguccaaugugcagcgccuuaugagaaagcagcggcgcgacgauucugaccugaaaagacuccgggaucugaaccaagcggucaauaaccugguggaacucaagagcacacagcagaaguccguucugcgcgugggaacgcuuagcucugacgaucugcucacccuggcugccgaccuugagaaacugaaguccaaagucacaagaaccgaacggccccucagcucuggcguguauauggggaaucuguccagccagcaacuggaucagcgcagagcccuccugaaccuuauuggaaugacaaauggcucucaggggucccaggcuggacgggacggcguugugcgcgucugggaugugaagaacgccgagcugcucaauaaccaauucggcaccaugccuagccugacacuugcuugucugaccaaacagggacagguggaccucaaugaugucguucaagcccugacggaccuggggcucaucuacaccgcgaaguauccgaacacauccgaccuggauagacuuacccagucucaucccauucugaauaugaucgacacaaagaaaagcucccucaacauuagcggcuacaauuuuucucugggggccgcugugaaggccggagcuugcaugcuugauggcgggaacaugcuggagaccaucaaaguguccccucagagcauggacggaauccucaagucuauucugaaagucaagcgggcccugggcauguucgugagcgauacgcccggcgaacgcaacccuuaugagaauauccucuacaaaauuugucuguccggggacggauggcccuauaucgcgucuagaacaagcauuguuggccgggccugggaaaacaccguggucgaucuugagacagacgggaagccucagaagaucggauccggcaauagcaacaaaucucugcaauccgcuggguuuagcgccggacucaccuacucucagcugaugacccugaaggaugcuaugcuucagcucgacccgaaugccaaaacauggauggauauugagggcagacccgaagacccuguggagguugcccuguaccagcccaucuccggcugcuauauccacuucuuucgcgaaccuacggaccugaagcaauucaaacaggaugcuaaguacagccaugggauugacaucgcggaucucuuugccgcucagcccggacugaccuccgccgugauugaggcccuuccgcggaacauggucaucacaugucagggcucugaagacauuaagaaacugcucgagagccaagggagaaaggauaucaaacugaucgacauugcucuguccaagaucgauucucgcaaauucgagaaugccgugugggaccaguauaaggaucuuugccacaugcauaccggagucgugguugaaaagaaaaagcggggcgggaaagaggaaauuacaccucacugugcgcucauggacugcaucauguuugaugcugccgugagcggcggacugaacacccugguccucagagccgugcugccccgcgacaugguuuuccggacguccacaccuagagugguccuuugaggacuagucccuguucccagagcccacuuuuuuuucuuuuuuugaaauaaaauagccugucuuucagaucucaaaggcucuuuucagagccaccaaaaaaaaaaaaaaaaaaaaaaaaaaaaaaaaaaaaaaaaaaaaaaaaaaaaaaaaaaaaaaaaagaauu

SEQ ID NO: 20898 - RNA, 2002 nt, Artificial Sequence
  mRNA product Design a-1 (hSL-A64-N5) comprising derived and/or modified sequence from LASV(Togo/2016/7082;Clade VI)__AMR44578__SP-IgE_NP(2-569) (opt5)
aggagagucccgcagucggcguccagcggcucugcuuguucgugugugugucguugcaggccuuauucaagcuuaccauggacuggaccuggauccuguuccucguggccgcugccacaagaguccacagcagcaacuccaaggaggugaaaucuuuccuguggacccagagccucagacgggaacuguccggcuacugcucuaauaucaaacuucaagucguuaaagacgcccaggcucugcuccacgggcuggauuuuagcgagguguccaacgugcagcgccuuaugagaaagcagaaacgggacgauggagaccugaagcgccucagagaucugaaucaagccgucaacaaucugguggaacucaagucuguucagcagaaaagcauucugcgggugggcacacuuacguccgacgaucugcucacccuggcggcugaccuugagaagcugaaaagcaaggucacacgcaccgaaagaccccucucuuccgggguguauaugggaaaccugagcucucagcaacuggaucagcggcgcgcccuccuguccaugaucggcaugagcgggggaaaucagaacucucagccuaaaggcgacggcguugugagagucugggaugugaagaaugccgaccuucugaacaaucaauucgggacaaugccgucccucacccuggcuugucuuacaaagcagggacagguggaucugaacgacgccguccaagcucucaccgaccugggccugauuuacacggccaaauaucccaauagcuccgaucucgaccggcugucucagagccauccuauccuuaacaugauugauaccaagaaauccagccugaauaucucuggguacaacuuuucccucggagcggccaucaagacaggcgcuugcaugcuggacgggggaaacaugcuugagaccauuaaaguuacaccccagaccauggauggcauccucaagagcauucugaaagugaagcgcucucugggcauguucaucagcgacacgccuggggagagaaaucccuaugaaaacauucuguacaagaucugucucuccggagauggcuggccuuauauugccucucggacagcuaucaucgggcgcgccugggagaauaccguggucgaccuggaaagcgauuccaaaccgcagaagauuggaagcaacggcucuaauaaaucccuucaaagcgcgggguuugcccccggacugacauacucucagcucaugacccugaaggacuccaugcugcagcuugauccuaacgcuaaaaccuggaucgacauugagggcagacccgaggacccuguggaaguugcccucuuccagcccaucagcggcugcuacauucacuuuuuccgggagccgacagaucugaagcaauuuaagcaggacgcuaaauauucccaugggaucgaugugacggaccuguucgccgcccagccuggacucaccucugcugucaucgaagcgcugcccagaaauauggugcuuacaugucagggcagcgaugacauuaagaaacugcucgauucccaagggcgccgggacaucaagcugauugauguuucucugaacaaaaucgacagcagaaaguuugagaaugccgugugggaucaguacaaggaccuuugccacaugcauaccggagucguggucgaaaagaagaaaaagggcgggaaagaggagauuacaccucacugugcucuccuggauugcaucauguucgacgccgccguguccggcggacugaacgcuaccguucuccgcgccgugcugccccgggacauggucuuuagaacgagcucucccaaggugguucuuugaggacuagucccuguucccagagcccacuuuuuuuucuuuuuuugaaauaaaauagccugucuuucagaucucaaaggcucuuuucagagccaccaaaaaaaaaaaaaaaaaaaaaaaaaaaaaaaaaaaaaaaaaaaaaaaaaaaaaaaaaaaaaaaaagaauu

SEQ ID NO: 20899 - RNA, 2002 nt, Artificial Sequence
  mRNA product Design a-1 (hSL-A64-N5) comprising derived and/or modified sequence from LASV(KAK-428;Clade n.d. (VII))__ANH09741__SP-IgE_NP(2-569) (opt5)
aggagagucccgcagucggcguccagcggcucugcuuguucgugugugugucguugcaggccuuauucaagcuuaccauggacuggaccuggauccuguuccucguggccgcugccacaagaguccacagcagcaacuccaaggaggugaaaucuuuccuguggacccagagccucagacgggaacuguccggcuacugcacaaauaucaaacuucaagucguuaaggacgcccaggcucugcuccacgggcuggauuuuucugaggugagcaacgugcagcgccuuaugagaaagcagaaacgggacgauaaugaccugaagcgccucagagaucugaaccaagccgucaauaaccugguggaacucaaguccguucagcagaaaucugugcugaaggucggaacgcuuaauagcgacgaucugcucacccuggcggcugaccuugagaaacugaaguccaaagugguucggacagaacgcccccucagcucuggcguguauauggggaaccuguccagccagcaacuggaucagagacgggcccuccugaauaugauuggaauggccggcgggucucagggaaaccagccuucccgcgacggcgucgugagagugugggaugucaagaaugcugaccuucugaacaaucaauucggcaccaugccgagccucacacuggccugucuuaccaagcaggggcagguugaucugaacgacguggugcucgcucugacagaccugggacucaucuacaccgccaaauaucccaauucuuccgaucuggaccggcuuagccaaaaccauccuguccugaacaugauugaugugaauaaguccucucucaacaucagcggcuacaauuuuucccugggggcggccguuaaagcuggagccugcaugcuugacggcgggaacaugcuggagacgauuaagaucagcccccagaccguggauggaauccucaaaucuauucugaaggucaaacgcgcucugggcauguucguguccgacacaccuggcgagagaaaucccuaugaaaacauccucuacaagguuugucugagcgggaauggauggccuuauauugccucucggaccagcaucgugggccgcgcgugggagaacacagucguggaucuugaauccaauaagaaccagccgaaagucgggaauaacggaucuaauaagaugcugcagagcuccggcuuugccaccgggcucacguacagccaacugaugacacugagagacucuaugcuucagcucgaucccaccgcuaaaacauggauugacaucgagggacggccugaggaucccguggaacuggcccuguuccagccuuccagcggcugcuacauucacuuuuucagagagcccaccgaccucaagcaguuuaaacaagacgcuaaguauucucauggcaucgauguuaacgaccuguucuccgcccagccggggcuuaccagcgccgugcuggaagcucucccucgcaauaugguccugacaugucagggauccgaugacauccggaagcugcuugauucucaggacagaaaagauauuaagcucaucgacauuagccuguccaaagcggaugcccgcaaguuugagaacgacgugugggaucaauucaaagaccugugccacaugcauacgggcaucguuguggaaaagaagaaaaagggagggaaacaggagaugacaccccacugugcucuccuggauugcauuauguuugacgccgccgucucuggcgggcuuaacgugccuacccugcgggcugugcuccccaccgacaugguuuucagaacaaucaccacgaaggucgugcugugaggacuagucccuguucccagagcccacuuuuuuuucuuuuuuugaaauaaaauagccugucuuucagaucucaaaggcucuuuucagagccaccaaaaaaaaaaaaaaaaaaaaaaaaaaaaaaaaaaaaaaaaaaaaaaaaaaaaaaaaaaaaaaaaagaauu

SEQ ID NO: 20900 - RNA, 2002 nt, Artificial Sequence; identical to SEQ ID NO: 20894
  mRNA product Design a-1 (hSL-A64-N5) comprising derived and/or modified sequence from LASV(Pinneo-NIG-1969;Clade I)__AIT17837__SP-IgE_NP(2-569) (opt5)

SEQ ID NO: 20901 - RNA, 2002 nt, Artificial Sequence
  mRNA product Design a-1 (hSL-A64-N5) comprising derived and/or modified sequence from LASV(ISTH0009-NIG-2011;Clade II)__AIT17405__SP-IgE_NP(2-569) (opt5)
aggagagucccgcagucggcguccagcggcucugcuuguucgugugugugucguugcaggccuuauucaagcuuaccauggacuggaccuggauccuguuccucguggccgcugccacaagaguccacagcagcguguccaaggaggucaaaucuuuccuguggacccagagccucagacgggaacuguccggcuacugcucuaacaucaaacuucaaguugugaaggacgcccaggcucugcuccacgggcuggauuuuagcgagguguccaauguccagcgccuuaugagaaagcagaaacgggacgauucugaccugaagcgccucagagaucugaaccaagccgugaauaaccugguugaacucaagagcacacagcagaaauccauucugcgggugggaacgcuuaccagcgacgaucugcucacacuggcggcugaccuugagaagcugaaaucuaaggucauccgcaccgaaagaccccucuccagcggcguguauauggggaaucugucuacacagcaacuggagcagcggcgcgcccuccugaacaugauuggaaugguuggcggggcccagggaacccagccuggcagagauggcgugguccgggugugggacgugaaaaauccggaucuucugaacaaucaauucgggacaaugcccucccucacccuggcuugucuuacgaagcagggacaggucgaccugaacgaugccguucucgcucugaccgaccugggccucaucuacacagccaaguauccuaauagcucugaccuggaucgccuuucccaaagccaucccauucugaacaugguggacaucaaaaaguccucucucaauaucagcggguacaacuuuucccugggagcggccgugaaagcuggcgccugcaugcuugaugggggaaauaugcuggagaccauuaaggucacaccucagaccauggacggcauccucaaaagcauucugaaggugaaaagaucucugggcauguucguuuccgauacgcccggggaacggaacccuuaugagaacauccucuacaagauuugucugagcggagacggcuggccguauaucgcuucucgcacaagcauuguggggagagccugggaaaauaccacagucgaucuugaguccgacggaaagccccagaaagugggcucugcggggagcaacaagucccugcagagcgccggauuuccuaccggccucaccuacucucaacugaugacacugaaagauuccaugaugcagcuugaccccagcgcuaagacguggaucgauaucgagggccggccugaagaccccguugagauugcccucuaccagccgaugucugggugcuauauccacuucuuuagagaaccuaccgaccugaaacaguucaagcaagaugcuaaguacucccauggaauugacguggccgaucuguuucccgcccagccuggccucacaagcgcugucaucgaggcgcugccccgcaauauggugcuuaccugucagggguccgacgauauuaaacggcugcucgacucucagggaagacgcgauaucaagcugaucgacauugcccugagcaaagcugauucccggagauucgaaaacgccgucugggaccaaugcaaggaucuuugucacaugcauacaggcgugguuguggagaaaaagaagcgcgggggcaaagaggaaaucacgccccacugcgcccucauggacuguauuauguaugaugcugccgucucuggaggccugaauaucccugugcugcgggcgguucucccgagagacaugguguuucgcaccagcucccccaaggucgugcugugaggacuagucccuguucccagagcccacuuuuuuuucuuuuuuugaaauaaaauagccugucuuucagaucucaaaggcucuuuucagagccaccaaaaaaaaaaaaaaaaaaaaaaaaaaaaaaaaaaaaaaaaaaaaaaaaaaaaaaaaaaaaaaaaagaauu

SEQ ID NO: 20902 - RNA, 2002 nt, Artificial Sequence
  mRNA product Design a-1 (hSL-A64-N5) comprising derived and/or modified sequence from LASV(ISTH2010-NIG-2012;Clade II)__AIT17483__SP-IgE_NP(2-569) (opt5)
aggagagucccgcagucggcguccagcggcucugcuuguucgugugugugucguugcaggccuuauucaagcuuaccauggacuggaccuggauccuguuccucguggccgcugccacaagaguccacagcagcgccuccaaggaggugaaaucuuuccuguggacccagagccucagacgggaacuguccggcuacugcucuaacaucaaacuucaagucguuaaggacgcucaggcccugcuccacgggcuggauuuuagcgagguguccaaugugcagcgccuuaugagaaagcagaaacgggacgauucugaccugaagcgccucagagaucugaaccaagcggucaauaaccugguggaacucaagagcacacagcagaaauccauucugcggguuggaacgcuuaccagcgacgaucugcucacacuggcugccgaccuugagaagcugaaaucuaaggugauccgcaccgaaagaccccucuccagcggcgucuauauggggaaucugucuacacagcaacuggagcagcggcgcgcccuccugaaccuuauuggaauggugggcggggcucagggaacccagccuggcagagauggcguugugcgggucugggacgugaaaaauccggaucugcucaacaaucaauucgggacaaugcccucccugacccuugccugucugacgaagcagggacagguggaccucaacgaugcuguccuggcccugaccgaccucggccugaucuacacagcgaaguauccuaauagcucugaccuugaucgccugucccaaagccaucccauucucaacaugguugacaccaaaaaguccucucugaauaucagcggguuuaacuucucccuuggagccgcugugaaagccggcgcuugcaugcuggaugggggaaauaugcucgagacaaucaaggugaccccucagacgauggacggcauucugaaaagcauccugaaggucaaaaagucucucggcauguuuguguccgauacacccggggaaagaaacccuuacgagaacauucuguauaagaucugucuuagcggagacggcuggccguacauugccucucggaccagcaucguugggcgcgcgugggaaaauacaaccguggaucuggaguccgacggaaaaccccacaaggucggcaccgccgggucuaacaaaagccuccaguccgcuggauucccuacaggccugacguauagccagcugaugacccuuaaggauucuaugaugcaacucgaccccuccgccaaaacauggauugauaucgagggcagaccugaagaccccguggagaucgcucuguaccagccgaugagcgggugcuacauucacuuuuuccgggaaccuaccgaccugaagcaguuuaagcaggaugccaaauauucucauggaaucgacguugccgaucucuuccccgcucaaccuggccugacauccgcggugauugaggcccuucccagaaauaugguccugaccugucaggggagcgacgauaucaagcgccuccuggacucccagggacggagagauauuaaacugaucgacaucgcucuuucuaaggccgauagccgccgguuugaaaacgccgugugggaccagugcaaagaucucugucauaugcacacgggcgucgugguugagaagaagaaaagagggggcaaggaggaaauuacaccccacugcgcucugauggacuguaucauguacgaugccgcgguguccggaggccugaauauuccuguccuccgcgcugugcugccgcgggacaugguuuucagaaccucuagccccaaagugguccuuugaggacuagucccuguucccagagcccacuuuuuuuucuuuuuuugaaauaaaauagccugucuuucagaucucaaaggcucuuuucagagccaccaaaaaaaaaaaaaaaaaaaaaaaaaaaaaaaaaaaaaaaaaaaaaaaaaaaaaaaaaaaaaaaaagaauu

SEQ ID NO: 20903 - RNA, 2002 nt, Artificial Sequence
  mRNA product Design a-1 (hSL-A64-N5) comprising derived and/or modified sequence from LASV(Lassa virus/H.sapiens-wt/NGA/2015/ISTH_0543;Clade II)__AVO03640__SP-IgE_NP(2-569) (opt5)
aggagagucccgcagucggcguccagcggcucugcuuguucgugugugugucguugcaggccuuauucaagcuuaccauggacuggaccuggauccuguuccucguggccgcugccacaagaguccacagcagcgccuccaaggaggugaaaucuuuccuguggacccagagccucagacgggaacuguccggcuacugcucuaacaucaaacuucaagucguuaaggacgcucaggcccugcuccacgggcuggauuuuagcgagguguccaaugugcagcgccuuaugagaaagcagaaacgggacgauucugaccugaagcgccucagagaucugaaccaagcggucaauaaccugguggaacucaagagcacacagcagaaauccauucugcggguuggaacgcuuaccagcgacgaucugcucacacuggcugccgaccuugagaagcugaaaucuaaggugauccgcaccgaaagaccccucuccagcggcgucuauauggggaaucugucuacacagcaacuggagcagcggcgcgcccuccugaacaugauuggaauggugggcggggcucagggaacccagccuggcagagauggcguugugcgggucugggacgugaaaaauccggaucuucugaacaaucaauucgggacaaugcccucccucacccuggccugucuuacgaagcagggacagguggaccugaacgaugcuguccucgcccugaccgaccugggccucaucuacacagcgaaguauccuaauagcucugaccuggaucgccuuucccaaagccaucccauucugaacaugguugacaccaaaaaguccucucucaauaucagcggguacaacuuuucccugggagccgcugugaaagccggcgcuugcaugcuugaugggggaaauaugcuggagacaaucaaggugaccccucagacgauggacggcauucucaaaagcauccugaaggucaaaaagucucugggcauguucguguccgauacacccggggaaagaaacccuuaugagaacauucucuacaagaucugucugagcggagacggcuggccguauauugccucucggaccagcaucguugggcgcgcgugggaaaauacaaccguggaucuugaguccgacggaaaaccccagaaggucggcucugccgggagcaacaaaucccugcagagcgcuggauuuccuaccggccucacauacucucaacugaugacgcugaaggauuccaugaugcagcuugaccccagcgccaaaaccuggauugauaucgagggcagaccugaagaccccguggagaucgcucucuaccagccgaugucugggugcuauauucacuucuuucgggaaccuacagaccugaagcaguucaagcaagaugccaaauacucccauggaaucgacguugccgaucuguuucccgcucagccuggccucaccagcgcggugauugaggcccugcccagaaauaugguccuuacaugucagggguccgacgauaucaagcgccugcucgacucucagggacggaaagauauuaagcugaucgacaucgcucugagcaaagccgauuccagacgcuucgaaaacgccgugugggaccaaugcaaggaucuuugucacaugcauaccggcgucgugguugagaagaaaaagagagggggcaaagaggaaauuacgccccacugcgcucucauggacuguaucauguaugaugccgcggugucuggaggccugaauauuccuguccugcgggcugugcucccgcgcgacaugguuuuucggacaagcucccccaaggugguccugugaggacuagucccuguucccagagcccacuuuuuuuucuuuuuuugaaauaaaauagccugucuuucagaucucaaaggcucuuuucagagccaccaaaaaaaaaaaaaaaaaaaaaaaaaaaaaaaaaaaaaaaaaaaaaaaaaaaaaaaaaaaaaaaaagaauu

SEQ ID NO: 20904 - RNA, 2002 nt, Artificial Sequence
  mRNA product Design a-1 (hSL-A64-N5) comprising derived and/or modified sequence from LASV(Lassa virus/H.sapiens-wt/NGA/2016/ISTH_0009;Clade II)__AVO03572__SP-IgE_NP(2-569) (opt5)
aggagagucccgcagucggcguccagcggcucugcuuguucgugugugugucguugcaggccuuauucaagcuuaccauggacuggaccuggauccuguuccucguggccgcugccacaagaguccacagcagcgccuccaaggaggugaaaucuuuccuguggacccagagccucagacgggaacuguccggcuacugcucuaacaucaaacuucaagucguuaaggacgcucaggcccugcuccacgggcuggauuuuagcgagguguccaaugugcagcgccuuaugagaaagcagaaacgggacgauucugaccugaagcgccucagagaucugaaccaagcggucaauaaccugguggaacucaagagcacacagcagaaauccauucugcggguuggaacgcuuaccagcgacgaucugcucacacuggcugccgaccuugagaagcugaaaucuaaggugauccgcaccgaaagaccccucuccagcggcgucuauauggggaaucugucuacacagcaacuggagcagcggcgcgcccuccugaacaugauuggaauggugggcggggcucagggaacccagccuggcagagauggcguugugcgggucugggacgugaaaaauccggaucuucugaacaaucaauucgggacaaugcccucccucacccuggccugucuuacgaagcagggacagguggaccugaacgaugcuguccucgcccugaccgaccugggccucaucuacacagcgaaguauccuaauagcucugaccuggaucgccuuucccaaagccaucccauucugaacaugguugacaccaaaaaguccucucucaauaucagcggguacaacuuuucccugggagccgcugugaaagccggcgcuugcaugcuugaugggggaaauaugcuggagacaaucaaggugaccccucagacgauggacggcauucucaaaagcauccugaaggucaaaaagucucugggcauguucguguccgauacacccggggaaagaaacccuuaugagaacauucucuacaagaucugucugagcggagacggcuggccguauauugccucucggaccagcaucguugggcgcgcgugggaaaauacaaccguggaucuugaguccgacggaaaaccccagaaggucggcucugccgggagcaacaaaucccugcagagcgcuggauuuccuaccggccucacauacucucaacugaugacgcugaaggauuccaugaugcagcuugaccccagcgccaaaaccuggauugauaucgagggcagaccugaagaccccguggagaucgcucucuaccagccgaugucugggugcuauauucacuucuuucgggaaccuacagaccugaagcaguucaagcaagaugccaaauacucccauggaaucgacguugccgaucuguuucccgcucagccuggccucaccagcgcggugauugaggcccugcccagaaauaugguccuuacaugucagggguccgacgauaucaagcgccugcucgacucucagggacggagagauauuaaacugaucgacaucgcucugagcaaggccgauucccgccgguucgaaaacgccgugugggaccaaugcaaagaucuuugucacaugcauaccggcgucgugguugagaagaagaaaagagggggcaaggaggaaauuacgccccacugcgcucucauggacuguaucauguaugaugccgcggugucuggaggccugaauauuccuguccugcgcgcugugcucccgcgggacaugguuuuuagaacaagcucccccaaagugguccugugaggacuagucccuguucccagagcccacuuuuuuuucuuuuuuugaaauaaaauagccugucuuucagaucucaaaggcucuuuucagagccaccaaaaaaaaaaaaaaaaaaaaaaaaaaaaaaaaaaaaaaaaaaaaaaaaaaaaaaaaaaaaaaaaagaauu

SEQ ID NO: 20905 - RNA, 2002 nt, Artificial Sequence
  mRNA product Design a-1 (hSL-A64-N5) comprising derived and/or modified sequence from LASV(Lassa virus/H.sapiens-wt/NGA/2016/ISTH_0017;Clade II)__AVO03568__SP-IgE_NP(2-569) (opt5)
aggagagucccgcagucggcguccagcggcucugcuuguucgugugugugucguugcaggccuuauucaagcuuaccauggacuggaccuggauccuguuccucguggccgcugccacaagaguccacagcagcgccuccaaggaggugaaaucuuuccuguggacccagagccucagacgggaacuguccggcuacugcucuagcaucaaacuucaagucguuaaggacgcucaggcccugcuccacgggcuggauuuuuccgaggugucuaacgugcagcgccuuaugagaaagcagaaacgggacgauagcgaccugaagcgccucagagaucugaaucaagcggucaacaaucugguggaacucaaguccacacagcagaaaagcauucugcggguuggaacgcuuaccucugacgaucugcucacacuggcugccgaccuugagaagcugaaauccaaggugauccgcaccgaaagaccccucagcucuggcgucuauauggggaaccuguccacacagcaacuggagcagcggcgcgcccuccugaauaugauuggaauggcuggcggggcccagggaacccagccuggcagagauggcgugguucgggugugggacgucaaaaacccggaucuucugaauaaccaauucgggacaaugcccagccucacccuggcuugucuuacgaagcagggacagguggaccugaaugaugccgugcucgcgcugaccgaccugggccucaucuacacagccaaguauccuaacucuuccgaccuggaucgccuuagccaaucccaucccauucugaauauggucgacaccaaaaagucuagccucaacaucuccggguacaauuuuagccugggagcugccguuaaagcuggcgccugcaugcuugaugggggaaacaugcuggagacaaucaaggugaccccucagacgauggacggcauucucaaaucuauccugaaggugaaaagaucccugggcauguucgucagcgaugcgcccggggaacggaauccuuaugagaacauucucuacaagaucugucugucuggagacggcuggccguauauugccagccgcacauccaucguggggagagcuugggaaaacaccacaguugaucuugagucugacggaaagccccagaaagugggcgccaccgggagcaauaagucccugcagagcgcuggauuuccuaccggccucacauacucucaacugaugacgcugaaagauuccaugaugcagcuugaccccagcgccaagaccuggauugauaucgagggccggccugaagaccccgucgagguggcccucuaccagccgguuucugggugcuauauccacuucuuuagagaaccuacagaccugaaacaguucaagcaagaugcuaaguacucccauggaauugacguggcggaucuguuucccgcccagccuggccucaccagcgcugucaucgaggcccugccccgcaacauggugcuuacaugucagggguccgacgauauuaaaaagcugcucgacucucagggacggaaagauaucaagcugauugacaucgcccugagcaaagcugauuccagacgcuucgaaaaugccgucugggaccaaugcaaggaucuuugucacaugcauaccggcgugguuguggagaagaaaaagagagggggcaaagaggaaaucacgccccacugcgcgcucauggacuguauuauguaugaugcugccgucucuggaggccugaacaucccugugcugcgggccguucucccgcgcgacaugguguuucggacaagcucccccaaggucgugcugugaggacuagucccuguucccagagcccacuuuuuuuucuuuuuuugaaauaaaauagccugucuuucagaucucaaaggcucuuuucagagccaccaaaaaaaaaaaaaaaaaaaaaaaaaaaaaaaaaaaaaaaaaaaaaaaaaaaaaaaaaaaaaaaaagaauu

SEQ ID NO: 20906 - RNA, 2002 nt, Artificial Sequence
  mRNA product Design a-1 (hSL-A64-N5) comprising derived and/or modified sequence from LASV(Lassa virus/H.sapiens-wt/NGA/2018/ISTH_0959;Clade II)__AVV65100__SP-IgE_NP(2-569) (opt5)
aggagagucccgcagucggcguccagcggcucugcuuguucgugugugugucguugcaggccuuauucaagcuuaccauggacuggaccuggauccuguuccucguggccgcugccacaagaguccacagcagcgccuccaaggaggugaaaucuuuccuguggacccagagccucagacgggaacuguccggcuacugcucuaacaucaaacuucaagucguuaaggacgcucaggcccugcuccacgggcuggauuuuagcgagguguccaaugugcagcgccuuaugagaaagcagaaacgggacgauucugaccugaagcgccucagagaucugaaccaagcggucaauaaccugguggaacucaagagcacccagcagaaauccauucugcggguuggaacgcuuaccagcgacgaucugcucacacuggcugccgaccuugagaagcugaaaucuaaggugauccgcaccgaaagaccccucuccagcggcgucuauauggggaaucugucuacacagcaacuggagcagcggcgcgcccuccugaaccuuauuggaauggugggcggggcucagggaacccagccuggcagagauggcguugugcgggucugggacgugaaaaauccggaucugcucaacaaucaauucgggacaaugcccucccugacccuugccugucugacgaagcagggacagguggaccucaacgaugucguucuggcucugaccgaccucggccugaucuacacagccaaguauccuaauagcucugaccuugaucgccugucccaaagccaucccauucucaacaugguggacaccaaaaaguccucucugaauaucagcggguuuaacuucucccuuggagcggccgugaaagcuggcgccugcaugcuggaugggggaaauaugcucgagacaaucaaggucaccccucagacgauggacggcauucugaaaagcauccugaaggugaaaaagucucucggcauguuuguuuccgauacacccggggaaagaaacccuuacgagaacauucuguauaagaucugucuuagcggagacggcuggccguacauugcuucucggaccagcaucguggggcgcgccugggaaaauacaaccgucgaucuggaguccgacggaaaaccccacaaggugggcaccgcggggucuaacaaaagccuccaguccgccggauucccuacaggccugacguauagccagcugaugacccuuaaggauucuaugaugcaacucgaccccuccgcuaaaacauggauugauaucgagggcagaccugaagaccccguugagaucgcccuguaccagccgaugagcgggugcuacauucacuuuuuccgggaaccuaccgaccugaagcaguuuaagcaggaugcuaaauauucucauggaaucgacguggccgaucucuuccccgcccaaccuggccugacauccgcugucauugaggcgcuucccagaaauauggugcugaccugucaggggagcgacgauaucaagcgccuccuggacucccagggacggaaagauauuaagcugaucgacaucgcccuuucuaaaacggauagcagacgcuuugaaaacgcugucugggaccagugcaaggaucucugucauaugcacacaggcgugguuguggagaagaaaaagagagggggcaaagaggaaauuacaccccacugcgcccugauggacuguaucauguacgaugccgcugucuccggaggccugaauauuccugugcuccgggccguucugccgcgcgacaugguguuccggaccucuagccccaaggucgugcuuugaggacuagucccuguucccagagcccacuuuuuuuucuuuuuuugaaauaaaauagccugucuuucagaucucaaaggcucuuuucagagccaccaaaaaaaaaaaaaaaaaaaaaaaaaaaaaaaaaaaaaaaaaaaaaaaaaaaaaaaaaaaaaaaaagaauu

SEQ ID NO: 20907 - RNA, 2002 nt, Artificial Sequence
  mRNA product Design a-1 (hSL-A64-N5) comprising derived and/or modified sequence from LASV(LASV003-NIG-2008;Clade II)__AIT17581__SP-IgE_NP(2-569) (opt5)
aggagagucccgcagucggcguccagcggcucugcuuguucgugugugugucguugcaggccuuauucaagcuuaccauggacuggaccuggauccuguuccucguggccgcugccacaagaguccacagcagcgccuccaaggaggugaaaucuuuccuguggacccagagccucagacgggaacuguccggcuacugcucuagcaucaaacuucaagucguuaaggacgcucaggcccugcuccacgggcuggauuuuuccgaggugucuaacgugcagcgccuuaugagaaagcagaaacgggacgauagcgaccugaagcgccucagagaucugaaucaagcggucaacaaucugguggaacucaaguccacccagcagaaaagcguucugcgggugggaacgcuuaccucugacgaucugcucacacuggcugccgaccuugagaagcugaaauccaaggucauucgcaccgaaagaccccucagcucuggcguguauauggggaaccuguccgcccagcaacuggagcagcggcgcacacuccugaauaugaucggaaugguuggcggggcucagggaacccagccuggcagagauggcgugguccgggugugggacgugaaaaacccggaucuucugaauaaccaauucgggacaaugcccagccucacccuggccugucuuacgaagcagggacaggucgaccugaaugauguugugcucgcucugaccgaccugggccucauuuacacagccaaguauccuaacucuuccgaccuggaucgccuuagccaaucccaucccauccugucuaugguggacaccaaaaagagcucccucaauauuagcggguacaacuuuucucugggagcggccgucaaagcuggcgccugcaugcuugaugggggaaauaugcuggagacaaucaaggugaccccucagacgauggacggcauccucaaauccauucugaagguuaaaaagagccugggcauguucgugucugauacacccggggaaagaaacccuuaugagaauauccucuacaagauuugucugagcggagacggcuggccguauaucgcuucccggaccucuauugucgggcgcgccugggaaaacacaaccguggaucuugagagcgacggaaaaccccagaagguuggcaccgcgggguccaacaaaagccugcagucugccggauuuccuacaggccucacguacucccaacugaugacccugaaggauagcaugaugcagcuugaccccucugcuaaaacauggaucgauauugagggcagaccugaagaccccguggagaucgcccucuaccagccgauguccgggugcuauauccacuucuuucgggaaccuaccgaccugaagcaguucaagcaagaugcuaaauacagccauggaauugacgucacagaucuguuucccgcccagccuggccucaccuccgccgugaucgaggcucugcccagaaauaugguccuuacgugucaggggucugacgauauuaagcgccugcucgacagccagggacggagagauaucaaacugauugacaucgcgcuguccaaggccgauucucgccgguucgaaaacgcugugugggaccaaugcaaagaucuuugucacaugcauacaggcguuguggucgagaagaagaaaagagggggcaaggaggaaaucacaccccacugcgcccucauggacuguauuauguaugaugccgcugugagcggaggccugaauaucccuguucugcgcgccgugcucccgcgggacauggucuuuagaaccuccagccccaaaguggugcugugaggacuagucccuguucccagagcccacuuuuuuuucuuuuuuugaaauaaaauagccugucuuucagaucucaaaggcucuuuucagagccaccaaaaaaaaaaaaaaaaaaaaaaaaaaaaaaaaaaaaaaaaaaaaaaaaaaaaaaaaaaaaaaaaagaauu

SEQ ID NO: 20908 - RNA, 2002 nt, Artificial Sequence
  mRNA product Design a-1 (hSL-A64-N5) comprising derived and/or modified sequence from LASV(LASV035-NIG-2009;Clade II)__AIT17589__SP-IgE_NP(2-569) (opt5)
aggagagucccgcagucggcguccagcggcucugcuuguucgugugugugucguugcaggccuuauucaagcuuaccauggacuggaccuggauccuguuccucguggccgcugccacaagaguccacagcagcgccuccaaggaggugaaaucuuuccuguggacccagagccucagacgggaacuguccggcuacugcucuagcaucaaacuucaagucguuaaagacgcucaggcccugcuccacgggcuggauuuuuccgaggugucuaacgugcagcgccuuaugagaaagcagaaacgggacgauagcgaccugaagcgccucagagaucugaaucaagcggucaacaaucugguggaacucaaguccacacagcagaaaagcauucugcggguuggaacgcuuaccucugacgaucugcucacacuggcugccgaccuugagaagcugaaauccaaggugauccgcaccgaaagaccccucagcucuggcgucuauauggggaaccuguccgcccagcaacuggagcagcggcgcgcucuccugaauaugauuggaauggugggcggggcccagggaacacagccuggcagagauggcguugugcgggucugggacgugaaaaacccggaucuucugaauaaccaauucgggaccaugcccagccucacacuggcuugucuuaccaagcagggacagguggaccugaaugaugccguccucgcgcugacggaccugggccucaucuacaccgccaaguauccuaacucuuccgaccuggaucgccuuagccaaucccaucccauucugaauaugguugacacaaagaagucuagccucaacaucuccggguacaauuuuagccugggagcugccgugaaagcuggcgccugcaugcuugaugggggaaacaugcuggagaccaucaaggugacaccucagaccauggacggcauucucaaaucuauccugaaggucaaaagaucccugggcauguucgugagcgauacgcccggggaacggaauccuuaugagaacauucucuacaagaucugucugucuggagacggcuggccguauauugcgagccgcacauccaucguugggagagccugggaaaacaccacaguggaucuugagucugacggaaagccccagaaagucggcaccaccgggagcaauaagucccugcagagcgcuggauuuccuacaggccucacguacucucaacugaugacccugaaagauuccaugaugcagcuugaccccagcgccaagacauggauugauaucgagggccggccugaagaccccguggagaucgcucucuaccagccgaugucugggugcuauauucacuucuuuagagaaccuaccgaccugaaacaguucaagcaagaugccaaguacucccauggaaucgacguugccgaucuguuucccgcucagccuggccucacaagcgcggugauugaggcccugccccgcaacaugguccuuaccugucagggguccgacgauaucaaaaagcugcucgacucucagggacggagagauauuaaacugaucgacaucgcucugagcaaggccgauucccgcaaauucgaaaaugccgugugggaccaaugcaaggaucuuugucacaugcauacgggcgucgugguugagaagaaaaagagagggggcaaagaggaaauuacaccccacugcgcucucauggacuguaucauguaugaugccgcggugucuggaggccugaacauuccuguccugcgggcugugcucccgcgcgacaugguuuuucggaccagcucccccaaggugguccugugaggacuagucccuguucccagagcccacuuuuuuuucuuuuuuugaaauaaaauagccugucuuucagaucucaaaggcucuuuucagagccaccaaaaaaaaaaaaaaaaaaaaaaaaaaaaaaaaaaaaaaaaaaaaaaaaaaaaaaaaaaaaaaaaagaauu

SEQ ID NO: 20909 - RNA, 2002 nt, Artificial Sequence
  mRNA product Design a-1 (hSL-A64-N5) comprising derived and/or modified sequence from LASV(LASV1000-NIG-2009;Clade II)__AIT17783__SP-IgE_NP(2-569) (opt5)
aggagagucccgcagucggcguccagcggcucugcuuguucgugugugugucguugcaggccuuauucaagcuuaccauggacuggaccuggauccuguuccucguggccgcugccacaagaguccacagcagcgccuccaaggaggugaaaucuuuccuguggacccagagccucagacgggaacuguccggcuacugcucuaacaucaaacuucaagucguuaaggacgcucaggcccugcuccacgggcuggauuuuagcgagguguccaaugugcagcgccuuaugagaaagcagaaacgggacgauucugaccugaagcgccucagagaucugaaccaagcggucaauaaccugguggaacucaagagcacacagcagaaauccauucugcggguuggaacgcuuaccagcgacgaucugcucacacuggcugccgaccuugagaagcugaaaucuaaggugauccgcaccgaaagaccccucuccagcggcgucuauauggggaaucugucuacacagcaacuggagcagcggcgcgcccuccugaacaugauuggaauggugggcggggcucagggaacccagccuggcagagauggcguugugcgggucugggacgugaaaaauccggaucuucugaacaaucaauucgggacaaugcccucccucacccuggccugucuuacgaagcagggacagguggaccugaacgaugucguucucgcucugaccgaccugggccucaucuacacagccaaguauccuaauagcucugaccuggaucgccuuucccaaagccaucccauucugaacaugguggacaccaaaaaguccucucucaauaucagcggguacaacuuuucccugggagcggccgugaaagcuggcgccugcaugcuugaugggggaaauaugcuggagacaaucaaggucaccccucagacgauggacggcauucucaaaagcauccugaaggugaaaaagucucugggcauguucguuuccgauacacccggggaaagaaacccuuaugagaacauucucuacaagaucugucugagcggagacggcuggccguauauugcuucucggaccagcaucguggggcgcgccugggaaaauacaaccgucgaucuugaguccgacggaaaaccccagaaggugggcaccgcggggucuaacaaaagccugcaguccgccggauuuccuacaggccucacguacagccaacugaugacccugaaggauucuaugaugcagcuugaccccuccgcuaaaacauggauugauaucgagggcagaccugaagaccccguugagaucgcccucuaccagccggugagcgggugcuauauucacuucuuucgggaaccuaccgaccugaagcaguucaagcaagaugcuaaauacucucauggaaucgacgucgccgaucuguuucccgcccagccuggccucacauccgcugugauugaggcgcugcccagaaauaugguccuuaccugucaggggagcgacgauaucaagcgccugcucgacucccagggacggagagauauuaaacugaucgacaucgcccugucuaaggcugauagccgccgguucgaaaacgccgugugggaccaaugcaaagaucuuugucacaugcauacgggcguuguggucgagaagaagaaaagagggggcaaggaggaaauuacaccccacugcgcccucauggacuguaucauguaugaugcugccguguccggaggccugaauauuccuguucugcgcgcggugcucccgcgggacauggucuuuagaaccucuagccccaaaguggugcugugaggacuagucccuguucccagagcccacuuuuuuuucuuuuuuugaaauaaaauagccugucuuucagaucucaaaggcucuuuucagagccaccaaaaaaaaaaaaaaaaaaaaaaaaaaaaaaaaaaaaaaaaaaaaaaaaaaaaaaaaaaaaaaaaagaauu

SEQ ID NO: 20910 - RNA, 2002 nt, Artificial Sequence
  mRNA product Design a-1 (hSL-A64-N5) comprising derived and/or modified sequence from LASV(LASV221-NIG-2010;Clade II)__AIT17625__SP-IgE_NP(2-569) (opt5)
aggagagucccgcagucggcguccagcggcucugcuuguucgugugugugucguugcaggccuuauucaagcuuaccauggacuggaccuggauccuguuccucguggccgcugccacaagaguccacagcagcgccuccaaggaggugaaaucuuuccuguggacccagagccucagacgggaacuguccggcuacugcucuagcaucaaacuucaagucguuaaggacgcucaggcccugcuccacgggcuggauuuuuccgaggugucuaacgugcagcgccuuaugagaaagcagcggcgcgacgauagcgaccugaaaagacuccgggaucugaaucaagcggucaacaaucugguggaacucaaguccacacagcaaaagagcauucugcgcguuggaacgcuuaccucugacgaucugcucacacuggcugccgaccuugagaaacugaaguccaaagugaucagaaccgaacggccccucagcucuggcgucuauauggggaaccuguccacacagcagcuggagcagcgcagagcccuccugaauaugauuggaauggugggcggggcucagggaacccagccuggccgggauggcguugugcgcgucugggacgugaagaacccggaucuucugaauaaccaauucgggacaaugcccagccucacccuggccugucuuacgaaacagggacagguggaccugaaugaugcuguccucgcccugaccgaccugggccucaucuacacagcgaaguauccuaacucuuccgaccuggauagacuuagccaaucccaucccauucugaauaugguugacaccaagaaaucuagccucaacaucuccggguacaauuuuagccugggagccgcugugaaggccggcgcuugcaugcuugaugggggaaacaugcuggagacaaucaaagugaccccucagacggucgacggcauucucaagucuauccugaaagugaagcggucccugggcauguucguuagcgauacacccggggaacgcaauccuuaugagaacauucucuacaaaaucugucugucuggagacggcuggccguauauugccagcagaaccuccaucguggggcgggcgugggaaaacacaaccgucgaucuugagucugacggaaagccccagaaggugggcaccgccgggagcaauaaaucccugcagagcgcuggauuuccuacaggccucacguacucucaacugaugacccugaaggauuccaugaugcagcuugaccccagcgccaaaacauggauugauaucgagggcagaccugaagaccccguugagaucgcucucuaccagccgaugucugggugcuauauucacuucuuucgcgaaccuaccgaccugaagcaguucaaacaagaugccaaguacucccauggaaucgacguggccgaucuguuucccgcucagccuggccucacaagcgcggucauugaggcccugccccggaacauggugcuuaccugucagggguccgacgauaucaagagacugcucgacucucagggacgccgggauauuaaacugaucgacaucgcucugagcaaggccgauuccagaaaauucgaaaaugccgucugggaccaaugcaaggaucuuugucacaugcauacgggcgugguuguggagaaaaagaagcgcgggggcaaagaggaaauuacaccccacugcgcucucauggacuguaucauguaugaugccgcggucucuggaggccugaacauuccugugcugcgggcuguucucccgagagacaugguguuucgcaccagcucccccaaggucgugcugugaggacuagucccuguucccagagcccacuuuuuuuucuuuuuuugaaauaaaauagccugucuuucagaucucaaaggcucuuuucagagccaccaaaaaaaaaaaaaaaaaaaaaaaaaaaaaaaaaaaaaaaaaaaaaaaaaaaaaaaaaaaaaaaaagaauu

SEQ ID NO: 20911 - RNA, 2002 nt, Artificial Sequence
  mRNA product Design a-1 (hSL-A64-N5) comprising derived and/or modified sequence from LASV(LASV237-NIG-2010;Clade II)__AIT17639__SP-IgE_NP(2-569) (opt5)
aggagagucccgcagucggcguccagcggcucugcuuguucgugugugugucguugcaggccuuauucaagcuuaccauggacuggaccuggauccuguuccucguggccgcugccacaagaguccacagcagcgccuccaaggaggugaaaucuuuccuguggacccagagccucagacgggaacuguccggcuacugcucuaacaucaaacuucaagucguuaaggacgcucaggcccugcuccacgggcuggauuuuagcgagguguccaaugugcagcgccuuaugagaaagcagaaacgggacgauucugaccugaagcgccucagagaucugaaccaagcggucaauaaccugguggaacucaagagcacacagcagaaauccauucugcggguuggaacgcuuaccagcgacgaucugcucacacuggcugccgaccuugagaagcugaaaucuaaggugauccgcaccgaaagaccccucuccagcggcgucuauauggggaaucugucuacacagcaacuggagcagcggcgcgcccuccugaacaugauuggaauggugggcggggcucagggaacccagccuggcagagauggcguugugcgggucugggacgugaaaaauccggaucuucugaacaaucaauucgggacaaugcccucccucacccuggccugucuuacgaagcagggacagguggaccugaacgaugcuguccucgcccugaccgaccugggccucaucuacacagcgaaguauccuaauagcucugaccuggaucgccuuucccaaagccaucccauucugaacaugguugacaucaaaaaguccucucucaauaucagcggguacaacuuuucccugggagccgcugugaaagccggcgcuugcaugcuugaugggggaaauaugcuggagaccauuaaggugacaccucagaccauggacggcauccucaaaagcauucugaaggucaaaagaucucugggcauguucguguccgauacgcccggggaacggaacccuuaugagaacauccucuacaagauuugucugagcggagacggcuggccguauaucgccucucgcacaagcauuguugggagagcgugggaaaauaccacaguggaucuugaguccgacggaaagccccagaaagucggcucugccgggagcaacaagucccugcagagcgcuggauuuccuaccggccucaccuacucucaacugaugacacugaaagauuccaugaugcagcuugaccccagcgccaagacguggaucgauaucgagggccggccugaagaccccguggagauugcucucuaccagccgaugucugggugcuauauccacuucuuuagagaaccuaccgaccugaaacaguucaagcaagaugccaaguacucccauggaauugacguugccgaucuguuucccgcucagccuggccucacaagcgcggugaucgaggcccugccccgcaauaugguccuuaccugucagggguccgacgauauuaaacggcugcucgacucucagggaagacgcgauaucaagcugaucgacauugcucugagcaaagccgauucccggagauucgaaaacgccgugugggaccaaugcaaggaucuuugucacaugcauacaggcgucgugguugagaaaaagaagcgcgggggcaaagaggaaaucacgccccacugcgcucucauggacuguauuauguaugaugccgcggugucuggaggccugaauaucccuguccugcgggcugugcucccgagagacaugguuuuucgcaccagcucccccaaggugguccugugaggacuagucccuguucccagagcccacuuuuuuuucuuuuuuugaaauaaaauagccugucuuucagaucucaaaggcucuuuucagagccaccaaaaaaaaaaaaaaaaaaaaaaaaaaaaaaaaaaaaaaaaaaaaaaaaaaaaaaaaaaaaaaaaagaauu

SEQ ID NO: 20912 - RNA, 2002 nt, Artificial Sequence
  mRNA product Design a-1 (hSL-A64-N5) comprising derived and/or modified sequence from LASV(LASV253-NIG-2011;Clade II)__AIT17671__SP-IgE_NP(2-569) (opt5)
aggagagucccgcagucggcguccagcggcucugcuuguucgugugugugucguugcaggccuuauucaagcuuaccauggacuggaccuggauccuguuccucguggccgcugccacaagaguccacagcagcgccuccaaggaggugaaaucuuuccuguggacccagagccucagacgggaacuguccggcuacugcucuagcaucaaacuucaagucguuaaggacgcucaggcccugcuccacgggcuggauuuuuccgaggugucuaacgugcagcgccuuaugagaaagcagaaacgggacgauagcgaccugaagcgccucagagaucugaaucaagcggucaacaaucugguggaacucaaguccacccagcagaaaagcguucugcgggugggaacgcuuaccucugacgaucugcucacacuggcugccgaccuugagaagcugaaauccaaggucauucgcaccgaaagaccccucagcucuggcguguauauggggaaccuguccacacagcaacuggagcagcggcgcgcccuccugaauaugaucggaaugguuggcggggcucagggaacccagccuggcagagauggcgugguccgggugugggacgugaaaaacccggaucuucugaauaaccaauucgggacaaugcccagccucacccuggccugucuuacgaagcagggacaggucgaccugaaugauguugugcucgcucugaccgaccugggccucauuuacacagccaaguauccuaacucuuccgaccuggaucgccuuagccaaucccaucccauccugaauaugguggacaccaaaaagucuagccucaacauuuccggguacaauuuuagccugggagcggccgucaaagcuggcgccugcaugcuugaugggggaaacaugcuggagacaaucaaggugaccccucagacgauggacggcauccucaaaucuauucugaagguuaaaaagucccugggcauguucgugagcgauacacccggggaaagaaauccuuaugagaacauccucuacaagauuugucugucuggagacggcuggccguauaucgcuagccggaccuccauugucgggcgcgccugggaaaacacaaccguggaucuugagucugacggaaaaccccagaagguuggcaccgcggggagcaauaaaucccugcagagcgccggauuuccuacaggccucacguacucucaacugaugacccugaaggauuccaugaugcagcuugaccccagcgcuaaaacauggaucgauauugagggcagaccugaagaccccguggagaucgcccucuaccagccgaugucugggugcuauauccacuucuuucgggaaccuaccgaccugaagcaguucaagcaagaugcuaaauacucccauggaauugacgucacagaucuguuucccgcccagccuggccucaccagcgccgugaucgaggcucugcccagaaacaugguccuuacgugucagggguccgacgauauuaagcgccugcucgacucucagggacggagagauaucaaacugauugacaucgcgcugagcaaggccgauucccgccgguucgaaaaugcugugugggaccaaugcaaagaucuuugucacaugcauacaggcguuguggucgagaagaagaaaagagggggcaaggaggaaaucacaccccacugcgcccucauggacuguauuauguaugaugccgcugugucuggaggccugaacaucccuguucugcgcgccgugcucccgcgggacauggucuuuagaaccagcucccccaaaguggugcugugaggacuagucccuguucccagagcccacuuuuuuuucuuuuuuugaaauaaaauagccugucuuucagaucucaaaggcucuuuucagagccaccaaaaaaaaaaaaaaaaaaaaaaaaaaaaaaaaaaaaaaaaaaaaaaaaaaaaaaaaaaaaaaaaagaauu

SEQ ID NO: 20913 - RNA, 2002 nt, Artificial Sequence
  mRNA product Design a-1 (hSL-A64-N5) comprising derived and/or modified sequence from LASV(LASV254-NIG-2011;Clade II)__AIT17675__SP-IgE_NP(2-569) (opt5)
aggagagucccgcagucggcguccagcggcucugcuuguucgugugugugucguugcaggccuuauucaagcuuaccauggacuggaccuggauccuguuccucguggccgcugccacaagaguccacagcagcgccuccaaggaggugaaaucuuuccuguggacccagagccucagacgggaacuguccggcuacugcucuagcaucaaacuucaagucguuaaggacgcucaggcccugcuccacgggcuggauuuuuccgaggugucuaacgugcagcgccuuaugagaaagcagaaacgggacgauagcgaccugaagcgccucagagaucugaaucaagcggucaacaaucugguggaacucaaguccacacagcagaaaagcguucugcgggugggaacgcuuaccucugacgaucugcucacacuggcugccgaccuugagaagcugaaauccaaggucauucgcaccgaaagaccccucagcucuggcguguauauggggaaccuguccacacagcaacuggagcagcggcgcgcccuccugaauaugaucggaaugguuggcggggcucagggaacccagccuggcagagauggcgugguccgggugugggacgugaaaaacccggaucuucugaauaaccaauucgggacaaugcccagccucacccuggccugucuuacgaagcagggacaggucgaccugaaugaugcuguucucgcccugaccgaccugggccucauuuacacagcgaaguauccuaacucuuccgaccuggaucgccuuagccaaucccaucccauccugaauaugguggacaccaaaaagucuagccucaacauuuccggguacaauuuuagccugggagccgcugugaaagccggcgcuugcaugcuugaugggggaaacaugcuggagacaaucaaggucaccccucagacgauggacggcauccucaaaucuauucugaaggugaaaaagucccugggcauguucguuagcgauacacccggggaaagaaauccuuaugagaacauccucuacaagauuugucugucuggagacggcuggccguauaucgccagccggaccuccauuguggggcgcgcgugggaaaacacaaucgucgaucuugagucugacggaaaaccccagaaggugggcaccgccgggagcaauaaaucccugcagagcgcuggauuuccuaccggccucacauacucucaacugaugacgcugaaggauuccaugaugcagcuugaccccagcgccaaaaccuggauugauaucgagggcagaccugaagaccccguugagaucgcucucuaccagccgaugucugggugcuauauucacuucuuucgggaaccuacagaccugaagcaguucaagcaagaugccaaauacucccauggaaucgacguggccgaucuguuucccgcucagccuggccucaccagcgcggucauugaggcccugcccagaaacauggugcuuacaugucagggguccgacgauaucaagcgccugcucgacucucagggacggagagauauuaaacugaucgacaucgcucugagcaaggccgauucccgccgguucgaaaaugccgucugggaccaaugcaaagaucuuugucacaugcauaccggcgugguuguggagaagaagaaaagagggggcaaggaggaaauuacgccccacugcgcucucauggacuguaucauguaugaugccgcggucucuggaggccugaacauuccugugcugcgcgcuguucucccgcgggacaugguguuuagaacaagcucccccaaagucgugcugugaggacuagucccuguucccagagcccacuuuuuuuucuuuuuuugaaauaaaauagccugucuuucagaucucaaaggcucuuuucagagccaccaaaaaaaaaaaaaaaaaaaaaaaaaaaaaaaaaaaaaaaaaaaaaaaaaaaaaaaaaaaaaaaaagaauu

SEQ ID NO: 20914 - RNA, 2002 nt, Artificial Sequence
  mRNA product Design a-1 (hSL-A64-N5) comprising derived and/or modified sequence from LASV(Nig08-04;Clade II)__ADU56611__SP-IgE_NP(2-569) (opt5)
aggagagucccgcagucggcguccagcggcucugcuuguucgugugugugucguugcaggccuuauucaagcuuaccauggacuggaccuggauccuguuccucguggccgcugccacaagaguccacagcagcgccuccaaggaggugaaaucuuuccuguggacccagagccucagacgggaacuguccggcuacugcucuaacaucaaacuucaagucguuaaggacgcucaggcccugcuccacgggcuggauuuuagcgagguguccaaugugcagcgccuuaugagaaagcagaaacgggacgauggagaccugaagcgccucagagaucugaaccaagcggucaauaaccugguggaacucaagucuacccagcagaaaagcguucugcgggugggcacgcuuaccuccgacgaucugcucacacuggcugccgaccuugagaagcugaaaagcaaggucauucgcaccgaaagaccccucucuuccgggguguauaugggaaaucugagcacacagcaacuggagcagcggaaagcccuccugucuaugaucggcaugguugggggagcucagggcacccagccuggccgcgaugggguggucagagugugggacgugaagaacccggaucuucugaauaaccaauucggaacaaugcccucccucacccuggccugucuuacgaagcagggccaggucgaccugaaugaugcuguucucgcccugaccgaccuggggcucauuuacacagcgaaauauccuaacagcucugaccuggaucggcuuucccaaagccaucccauccugaauaugguggacaccaagaaauccucucucaacauuagcggauacaauuuuucccugggcgccgcugugaaggccggggcuugcaugcuugauggaggcaacaugcuggagacaaucaaagucaccccucagacgauggacggcauccucaagagcauucugaaagugaagcgcucucuggggauguucguuuccgauacacccggagaaagaaauccuuaugagaacauccucuacaagauuugucugagcggcgacggguggccguauaucgccucucggaccagcauugugggacgcgcgugggaaaacacaaccgucgaucuugaguccgacggcaaaccccagaagguggggaccgccggaucuaauaaaagccugcaguccgcuggcuuuccuacaggccucacguacagccaacugaugacccugaaggauucuaugaugcagcuugaccccuccgccaaaacauggaucgauauugaggggagaccugaagaccccguugagaucgcucucuaccagccgaugagcggaugcuauauccacuucuuucgggaaccuaccgaccugaagcaguucaagcaagaugccaaauacucucauggcauugacgugacagaucuguuuuccgcccagcccgggcucaccagcgcugucaucgaggcgcugccuagaaacauggugcuuacgugucagggauccgacgauauuaagaaacugcucgacucucagggccgccgggauaucaagcugauugacaucagccugaauaaagccgauuccagacgcuucgaaaacgcugucugggaccaaugcaaggaucuuugucacaugcauacaggggugguuguggagaagaaaaagcggggcggaaaagaggaaaucacaccccacugcgcccucauggacuguauuauguuugaugccgcugucucuggcgggcugaauauccccauucugagagccgugcucccucgcgacaugguuuuccggaccagcuccccgaaggugguccugugaggacuagucccuguucccagagcccacuuuuuuuucuuuuuuugaaauaaaauagccugucuuucagaucucaaaggcucuuuucagagccaccaaaaaaaaaaaaaaaaaaaaaaaaaaaaaaaaaaaaaaaaaaaaaaaaaaaaaaaaaaaaaaaaagaauu

SEQ ID NO: 20915 - RNA, 2005 nt, Artificial Sequence
  mRNA product Design a-1 (hSL-A64-N5) comprising derived and/or modified sequence from LASV(GA391;Clade III)__AAA46284__SP-IgE_NP(2-570) (opt5)
aggagagucccgcagucggcguccagcggcucugcuuguucgugugugugucguugcaggccuuauucaagcuuaccauggacuggaccuggauccuguuccucguggccgcugccacaagaguccacagcagcgccuccaaggaggugagaucuugccuguggacccagagccuccggcgcgaacuguccggcuacuguucuaacaucaaacuucaagucguuaaggacgcucaggcccugcuccacgggcuggauuucagcgagguguccaaugugcagagacuuaugcggaaacagaagcgcgacgauggagaccugaaaagacuccgggaucugaaccaagcggucaauaaccugguggaacucaagucuacacagcagaaaagcguucugcgcgugggcacgcuuuccagcgacgaucugcucauucuggcugccgaccuugagaaacugaagucuaaagucaccagaacagaacggccccucuccagcgggguguauaugggaaaucugucuucccagcaacuggaucagcgcagagcccuccugaacaugaucggcaugaccgggguuagcggaggcggcaagggggcuucuaauggaauugugcgggucugggacgugaaaaacgccgagcuucugaauaaccaguuuggcacaaugccuucccucacccuggcuugccuuacaaagcaggggcaaguggaucugaaugacgccguccaggcgcucaccgaucugggacugaucuacacggccaaguauccgaacagcuccgaccucgaccgccugucucagagccaucccauucuuaauaugaucgauaccaaaaaguccagccugaacaucucuggcuacaauuucucccucggggcugccguuaaagcuggagccuguaugcuggacggcggcaacaugcuugagacaauuaaggugagcccucaaaccauggaugggauccugaaaucuauucucaaggugaaaaagagccugggaauguuugucuccgacacacccggcgaaagaaacccuuaugagaauauccuguacaagauuugccucucuggggauggauggagcuauaucgcgucccggaccagcauugugggccgcgccugggaaaacacgguuguggaccuggagcaggauaauaaaccccagaagaucgggaacggaggcucuaauaaaucccuucagagcgcuggcuucgccgcugggcugaucuacucucaacucaugacacugaaggacuuuaaauguuucaaccugauuccuaaugccaagaccuggauggauaucgagggaagaccggaagaccccgucgagauugcccuuuaccagccuuccagcggcugcuaugugcacuuuuuccgggaacccacagaucucaagcaguuuaaacaggacgcuaaguacucccaugggagagacguuaccgaucuguucgcggcccaaccuggacugaccucugcugugaucgaggcccucccccgcaacauggucauuacaugucagggcagcgaagacauccggaaacugcuugagucccaggggagacgcgauaucaagcugauugacaucacgcucucuaaagccgauagccggaaguuugagaaugcugugugggaccaguucaaggaucugugccacaugcauaccggcgucgugguugaaaagaagaaaagaggaggcaaggaggaaauuacaccgcacugugcccugauggacugcaucauguuugaugcggcuguguccgggggacuugacgccaaaguccuccgcgugguucugccucgggauaugguguucagaaccagcacacccaaggucgugcugugaggacuagucccuguucccagagcccacuuuuuuuucuuuuuuugaaauaaaauagccugucuuucagaucucaaaggcucuuuucagagccaccaaaaaaaaaaaaaaaaaaaaaaaaaaaaaaaaaaaaaaaaaaaaaaaaaaaaaaaaaaaaaaaaagaauu

SEQ ID NO: 20916 - RNA, 2002 nt, Artificial Sequence
  mRNA product Design a-1 (hSL-A64-N5) comprising derived and/or modified sequence from LASV(Nig08-A19;Clade III)__ADU56619__SP-IgE_NP(2-569) (opt5)
aggagagucccgcagucggcguccagcggcucugcuuguucgugugugugucguugcaggccuuauucaagcuuaccauggacuggaccuggauccuguuccucguggccgcugccacaagaguccacagcagcgccuccaaggaggugaaaucuuuccuguggacccagagccucagacgggaacuguccggcuacugcucuaacaucaaacuucaagucguuaaggacgcucaggcccugcuccacgggcuggauuuuagcgagguguccaaugugcagcgccuuaugagaaagcagaaacgggacgauggagaccugaagcgccucagagaucugaaccaagcggucaauaaccugguggaacucaagucuacacagcagaaaagcguucugcgggugggcacgcuuuccagcgacgaucugcucguccuggcugccgaccuugagaagcugaaaucuaaggugguucgcaccgaaagaccccucuccagcgggauuuauaugggaaaucugucuucccagcaacuggaucagcggaaagcccuccugaacaugaucggcaugacagggggaaauggcggccgcaacaccacaagcgacgggauugugagagucugggaugugaagaaugcugagcuucugaacaaucaguucggaaccaugccuucucucacacuggccugucuuaccaagcagggccaaguggaccugaacgaugcuguccaggcccucacggaccuggggcugaucuacaccgcgaaauaucccaauuccagcgaccucgaucggcuggcccagucccauccgauucuuaacaugaucgacacaaagaaaucuagccugaauaucuccggauacaacuuuagccucggcgcugccguuaaggcuggggccugcaugcuggauggaggcaacaugcuugagaccauuaaagugucuccucaaacaauggacggcauccugaaguccauucucaaagugaagcgcagccuggggauguucaucucugauacccccggagaaagaaauccuuaugagaacauucuguacaagaucugucucagcggcgacggguggcccuauauugcgucccggacgucuaucgucggacgcgccugggaaaauacagugguugaucuggagagcgacaacaaaccucagaagaccggcaaugggggauccaacaaaagccuucagucugcuggcuuugccgcuggccugacauacucccagcucaugacccugaaggauagcaugcugcaacuugacccgaaugccaaaaccuggauggauaucgaggggagacccgaagacccuguggagauugcccucuaccagcccucuuccggaugcuauauccacuucuuucgggaaccuacagaccugaagcaguucaagcaggaugcuaaauacagccauggcauugacgucacggaucuguuugcggcccaacccgggcucaccuccgcugugaucgaggcccugccgagaaacaugguuauuacaugucagggaucugaagacauccgcaaacuucuggagagccagggccggagagauaucaagcucauugacaucucccugucuaagguggauagccgcaaauucgagaaugccgucugggaccaguuuaaggaucugugccacaugcauaccgggauuguggucgaaaagaaaaagcggggcggaaaagaggaaaucacaccucacugugcucuuauggacugcauuauguucgaugccgcgguguccggcgggguugacgcuaaggugcucagagccguccugccccgcgauaugguguuucggaccagcacgccuaaaguugugcugugaggacuagucccuguucccagagcccacuuuuuuuucuuuuuuugaaauaaaauagccugucuuucagaucucaaaggcucuuuucagagccaccaaaaaaaaaaaaaaaaaaaaaaaaaaaaaaaaaaaaaaaaaaaaaaaaaaaaaaaaaaaaaaaaagaauu

SEQ ID NO: 20917 - RNA, 2002 nt, Artificial Sequence
  mRNA product Design a-1 (hSL-A64-N5) comprising derived and/or modified sequence from LASV(G1180-SLE-2010;Clade IV)__AIT17169__SP-IgE_NP(2-569) (opt5)
aggagagucccgcagucggcguccagcggcucugcuuguucgugugugugucguugcaggccuuauucaagcuuaccauggacuggaccuggauccuguuccucguggccgcugccacaagaguccacagcagcgccuccaaggagaucaaaucuuuccuguggacccagagccucagacgggaacuguccggcuacugcucuaacauuaagcugcaaguggucaaagacgcucaggcccugcuccacgggcuggauuuuagcgagguuuccaaugugcagcgccuuaugagaaaggaacggcgcgacgauaacgaccugaaaagacuccgggaucugaaucaggcggugaacaaucuggucgagcucaagucuacacaacaaaagagcauccugcgcgugggaacgcuuaccuccgacgaucugcucauucuggcugccgaccuugaaaaacuuaagagcaaaguuaucagaacagagcggccccucucugccggcguguauauggggaaccuguccagccagcagcuggaucagcgcagagcucuccugucuaugauuggaauguccagcggcaaucagcgggcccaggcugggcgcgacggagucgugagaguuugggaugugaagaacgucgagcuucugaauaaccaguucggcaccaugccuucucucacacuggccugucuuaccaaacaaggccagguggaccugaaugaugcggugcaggcccucacagaccuggggcugaucuacaccgcuaaguauccgaacacguccgaccucgaucggcugacccaaagccaucccauccuuaauaugauugacacaaagaaauccucucugaacaucagcggauacaauuuuucccucggcgccgcugucaaggccggggcgugcaugcuggauggaggcaacaugcuugaaaccauuaaaguuagcccucagacaauggacgggauccugaagucuauucucaaagugaagaaagcccugggaauguucaucuccgauacccccggcgagcgcaacccuuaugaaaauauucuguacaagaucugucucagcggcgacggguggcccuauaucgcuucuagaacgagcauuacaggacgggccugggagaacaccguggucgaucuggaguccgacggcaagccucagaaagcugggucuaauaacagcaauaagucccuucagagcgugggauuuacagccggccugaccuacucucaacucaugacccugaaagaugccaugcugcagcuugacccgaacgcuaagacauggauggauaucgaagggagacccgaggacccuguugaaauugcgcucuaccagcccuccagcggaugcuauauccacuucuuucgcgagccuacggaccugaaacaguucaagcaagaugccaaguacucucauggcauugacgugaccgaucuguuugcugcccagcccggccucacauccgccgucaucgacgcucugccgcggaauauggugaucaccugucaggggagcgaugacauuagaaaacuucuggaaucccagggacgcaaggauaucaaacucauugacaucgcccugucuaagacagauagccggaaauaugagaacgcgguuugggaccaauacaaggaucugugccacaugcauaccggcguggucguggagaagaaaaagagagggggaaaagaagagauuacgccucacugugcucuuauggacugcaucauguucgaugccgccgucuccggcgggcucaauacaucugugcugcgcgcuguucugccccgggacaugguguuuagaaccagcaccccucgcgucgugcucugaggacuagucccuguucccagagcccacuuuuuuuucuuuuuuugaaauaaaauagccugucuuucagaucucaaaggcucuuuucagagccaccaaaaaaaaaaaaaaaaaaaaaaaaaaaaaaaaaaaaaaaaaaaaaaaaaaaaaaaaaaaaaaaaagaauu

SEQ ID NO: 20918 - RNA, 2002 nt, Artificial Sequence
  mRNA product Design a-1 (hSL-A64-N5) comprising derived and/or modified sequence from LASV(G1442-SLE-2011;Clade IV)__AIT17181__SP-IgE_NP(2-569) (opt5)
aggagagucccgcagucggcguccagcggcucugcuuguucgugugugugucguugcaggccuuauucaagcuuaccauggacuggaccuggauccuguuccucguggccgcugccacaagaguccacagcagcgccuccaaggaggugaaaucuuuccuguggacccagagccucagacgggaacuguccggcuacugcucuaacaucaaacuucaagucguuaaggacgcucaggcccugcuccacgggcuggauuuuagcgagguguccaaugugcagcgccuuaugagaaagcagcggcgcgacgauaacgaccugaaaagacuccgggaucugaaucaagcggucaacaaucugguggaacucaagucuacacagcaaaagagcguucugcgcgugggaacgcuuaccuccgacgaucugcucguccuggcugccgaccuugagaaacuuaagagcaaagugauuagaacagaacggccccucucugccggcguuuauauggggaaccuguccagccagcagcuggaucagcgcagagcucuccugaauaugaucggaaugucuggcgggauucagggaacccggacaggccgcgacggcguggucagagugugggaugugaagaacgccgaccuucugaauaaccaguucgggaccaugccuucccucacacuggcuugucuuaccaaacaaggacaggucgaucugaaugacguugugcaggcccucacggaccugggccugaucuacaccgcgaaguauccgaacgccagcgaucucgaccggcugacacaaucucaucccauucuuaauaugaucgauaccaagaaauccagccugaacaucuccggguacaauuuuucucucggagcugccgugaaggcuggcgccugcaugcuggacgggggaaacaugcuugagacaauuaaagucagcccucagaccauggauggcauccugaaguccauucucaaagugaagaaaacgcugggcauguucaucagcgacacacccggggagcgcaacccuuaugaaaauauucuguacaagaucugucucucuggagauggcuggcccuauauugcguccagaaccagcaucacagggcgggccugggagaacaccguuguggaccuggaaucugauggaaagccucagaaagcuggcagcaauaacuccaauaagucucuucagagcgccggguuugcugccggacugaccuacucccaacucaugacacugaaagacgccaugcugcagcuugauccgaacgcuaagacguggauggacaucgagggcagacccgaggacccugucgaaauugcgcucuaccagcccagcucuggcugcuauauccacuucuuucgcgagccuaccgaucugaaacaguucaagcaagacgccaaguacucccaugggauugaugugacagaccuguuugcugcccagcccggacucaccagcgccguuaucgaagcucugccgcggaauauggugauuacaugucagggcucugaugacaucaaaaagcugcuggagucccaggggagaaaagauaucaagcucauugacaucgcccugagcaaaaccgauucccgcaaguaugaaaacgcggucugggaccaauacaaggaucugugccacaugcauacgggaguggucguggagaaaaagaaacggggcgggaaggaggaaauuacaccucacugugcucuuauggacugcaucauguucgaugccgccguuucuggcggacucaauacccuggugcugagagcuguccucccccgcgacaugguguuucggaccagcacaccuagaguugugcugugaggacuagucccuguucccagagcccacuuuuuuuucuuuuuuugaaauaaaauagccugucuuucagaucucaaaggcucuuuucagagccaccaaaaaaaaaaaaaaaaaaaaaaaaaaaaaaaaaaaaaaaaaaaaaaaaaaaaaaaaaaaaaaaaagaauu

SEQ ID NO: 20919 - RNA, 2002 nt, Artificial Sequence
  mRNA product Design a-1 (hSL-A64-N5) comprising derived and/or modified sequence from LASV(G3010-SLE-2013;Clade IV)__AIT17345__SP-IgE_NP(2-569) (opt5)
aggagagucccgcagucggcguccagcggcucugcuuguucgugugugugucguugcaggccuuauucaagcuuaccauggacuggaccuggauccuguuccucguggccgcugccacaagaguccacagcagcgccuccaaggagaucaaaucuuuccuguggacccagagccucagacgggaacuguccggcuacugcucuaacauuaaacuucaaguggucaaagacgcucaggcccugcuccacgggcuggauuuuagcgagguuuccaaugugcagcgccuuaugagaaaggaacggcgcgacgauaacgaccugaaaagacuccgggaucugaaucaggcggugaacaaucuggucgagcucaagucuacacaacaaaagagcauccugcgcgugggaacgcuuaccuccgacgaucugcucauucuggcugccgaccuugaaaaacuuaagagcaaaguuacaagaaccgagcggccccucucugccggcguguauauggggaaccuguccagccagcagcuggaucagcgcagagcucuccugucuaugaucggaauguccagcggcguccagggggcccgggcuggacgcgacggcgugguuagagugugggaugucaagaaugccgagcuucugaacaaucaguucggcacaaugccuucucucacccuggcgugucuuacaaaacaggggcaaguggaccugaacgaugugguccaggcccucaccgaccugggacugauuuacacggcuaaguauccgaauaccuccgaccucgaucggcugacacagagccaucccauccuuaacaugaucgacaccaagaaauccucucugaauauuagcggcuacaacuuuucccucggggccgcuguuaaggccggagcgugcaugcuggauggcgggaauaugcuugaaacaaucaaagugagcccucaaaccauggacggcauucugaagucuauccucaaagugaagaaagcccugggaauguucauuuccgagacgcccggcgaacgcaacccuuaugagaacauccuguacaagauuugucucagcggggauggauggcccuauaucgcuucuagaacaagcaucaccggccgggccugggagaauacagucguggaccuggaauccgaugggaagccucagaaagcuggaucuaacaauagcaacaagucccuucagagcgccggcuuuaccgccgggcugaccuacucucagcucaugacacugaaagacgcuaugcugcaacuugauccgaaugcgaagacguggauggacauugagggaagacccgaagauccuguugagguggcccucuaccagcccuccagcggcugcuauauccacuucuuucgcgaaccuaccgaccugaaacaguucaagcaggacgcuaaguacucucauggcauugaugucacagaccuguuugccgcccaacccgggcucaccuccgcugugaucgaugcccugccgcggaacaugguuauuacaugucagggaagcgacgauaucaaaaagcugcuggagucccagggcagaaaagacaucaagcucauugauaucgcgcugucuaaaaccgacagccgcaaguaugagaaugcugugugggaucaguacaaggaccugugccacaugcauacgggggucguggucgaaaagaagaaacggggaggcaaggaggaaauuacaccucacugugcccuuauggauugcaucauguucgacgccgcuguguccgggggccucaacaccucuguucugagagccgugcugccccgcgauauggucuuucggaccagcacaccuagagugguucucugaggacuagucccuguucccagagcccacuuuuuuuucuuuuuuugaaauaaaauagccugucuuucagaucucaaaggcucuuuucagagccaccaaaaaaaaaaaaaaaaaaaaaaaaaaaaaaaaaaaaaaaaaaaaaaaaaaaaaaaaaaaaaaaaagaauu

SEQ ID NO: 20920 - RNA, 2002 nt, Artificial Sequence
  mRNA product Design a-1 (hSL-A64-N5) comprising derived and/or modified sequence from LASV(G502-SLE-2009;Clade IV)__AIT17127__SP-IgE_NP(2-569) (opt5)
aggagagucccgcagucggcguccagcggcucugcuuguucgugugugugucguugcaggccuuauucaagcuuaccauggacuggaccuggauccuguuccucguggccgcugccacaagaguccacagcagcgccuccaaggagaucaaaucuuuccuguggacccagagccucagacgggaacuguccggcuacugcucuaacauuaagcugcaaguggucaaagacgcucaggcccugcuccacgggcuggauuuuagcgagguuuccaaugugcagcgccuuaugagaaaggaacggcgcgacgauaacgaccugaaaagacuccgggaucugaaucaggcggugaacaaucuggucgagcucaagucuacacaacaaaagagcauccugcgcgugggaacgcuuaccuccgacgaucugcucauucuggcugccgaccuugaaaaacuuaagagcaaaguuaucagaacagagcggccccucucugccggcguguauauggggaaccuguccagccagcagcuggaucagcgcagagcucuccugucuaugauuggaauguccggcgggaaucagggaguccgggccggcaaggacggcgugguucgcgugugggaugucaaaaacgcugagcuucugaauaaccaguucgggaccaugccuagccucacacuggccugucuuaccaagcagggacaaguggaccugaaugaugcggugcaggcccucacagaccugggccugaucuacaccgcuaaguauccgaacacgucugaccucgauagacugacccagucccaucccauccuuaauaugauugacaccaaaaagagcucccugaacaucucuggguacaauuuuagccucggagccgcugucaaagccggcgcgugcaugcuggaugggggaaacaugcuugaaacaauuaagguuuccccucaaacaauggacggcauccugaaaagcauucucaaggugaaaaaggcccugggcauguucaucucugauacccccggggagcggaacccuuaugaaaauauucuguacaagaucugucucuccggagacggcuggcccuauaucgcuagccgcacgucuauuacagggagagccugggagaacaccguggucgaucuggagagcgacggaaaaccucagaaggcuggcuccaauaacucuaauaaaagccuucaguccgccggguuuacagccggacugaccuacagccagcucaugacccugaaggaugcuaugcugcaacuugacccgaacacaaaaacguggauggauaucgaaggccggcccgaggacccuguggaaauugcgcucuaccagcccucuuccggcugcuauauccacuucuuuagagagccuaccgaccugaagcaguucaagcaggaugccaaauacagccaugggauugacguuacagaucuguuugcugcccaacccggacucaccucugccgugaucgacgcucugccgcgcaauauggucaucacaugucagggcuccgaugacauucggaaacuucuggaaagccaggggagaaaggauaucaagcucauugacaucgcccugaacaaaaccgauucccgcaaguaugagaaugcggugugggaccaguacaaggaucugugccacaugcauacgggaguuguggucgagaaaaagaaacggggcgggaaggaagagauuacaccucacugugcucuuauggacugcaucauguucgaugccgccgugucuggcggacucaacaccagcguccugagagcugugcugccccgcgacaugguuuuucggaccuccacaccuagagugguccucugaggacuagucccuguucccagagcccacuuuuuuuucuuuuuuugaaauaaaauagccugucuuucagaucucaaaggcucuuuucagagccaccaaaaaaaaaaaaaaaaaaaaaaaaaaaaaaaaaaaaaaaaaaaaaaaaaaaaaaaaaaaaaaaaagaauu

SEQ ID NO: 20921 - RNA, 2002 nt, Artificial Sequence
  mRNA product Design a-1 (hSL-A64-N5) comprising derived and/or modified sequence from LASV(G733-SLE-2010;Clade IV)__AIT17155__SP-IgE_NP(2-569) (opt5)
aggagagucccgcagucggcguccagcggcucugcuuguucgugugugugucguugcaggccuuauucaagcuuaccauggacuggaccuggauccuguuccucguggccgcugccacaagaguccacagcagcgccuccaaggagaucaaaucuuuccuguggacccagagccucagacgggaacuguccggcuacugcucuaacauuaagcugcaaguggucaaagacgcucaggcccugcuccacgggcuggauuuuagcgagguuuccaaugugcagcgccuuaugagaaaggaacggcgcgacgauaacgaccugaaaagacuccgggaucugaaucaggcggugaacaaucuggucgagcucaagucuacacaacaaaagagcgugcugcgcguuggaacgcuuaccuccgacgaacugcucgugcuggcugccgaucuugagaaacuuaagagcaaagucaucagaacagagcggccccucucugccggcguguauauggggaaccuguccagccagcagcuggaccagcgcagagcucuccugucuaugauuggaauguccggcgggaaucagggagcccggaccggccgcgauggcguugugagagucugggacgugaagaacgcugaacuucugaauaaccaguucgggacaaugccuagccucacccuggccugucuuacaaaacagggacaaguggaucugaaugacgcgguccaggcccucaccgaucugggccugaucuacacggcuaaguauccgaacaccucugaccucgaccggcugacacagucccaucccauucuuaauaugaucgauaccaagaaaagcucccugaacaucucuggguacaauuuuagccucggagccgcuguuaaggccggcgcgugcaugcuggacgggggaaacaugcuugagacaauuaaaguguccccucaaaccauggauggcauccucaagagcauucugaaagugaagaaagcccugggcauguucaucucugacacgcccggggaacgcaacccuuaugagaauauucuguacaagaucugucucuccggagauggcuggcccuauauugcuagcagaacaucuaucaccgggcgggccugggagaacacagucguggaccuggaaagcgauggaaagccucagaaagcuggcuccaauaacucuaauaagagccuucaguccgccggguuuaccgccggacugaccuacagccagcucaugacacugaaagacgcuaugcugcaacuugauccgaacgcgaagacguggauggacaucgagggcagacccgaagauccuguugagauugcccucuaccagcccucuuccggcugcuauauccacuucuuucgcgaaccuaccgaccugaaacaguucaagcaggacgcuaaguacagccaugggauugaugugacagaccuguuugccgcccaacccggacucaccucugcugucaucgaugcccugccgcggaauauggugauuacaugucagggcuccgacgauaucagaaaacuucuggagagccaggggcgcaaggacaucaaacucauugauaucgcgcuguccaagauugacucucggaaauaugagaacgcuguuugggaucaguacaaggaccugugccacaugcauaccggaguggucguggaaaagaaaaagagaggcgggaaagaggaaaucacgccucacugugcccuuauggauugcauuauguucgacgccgcugucagcggcggacucaauucccuggugcugcgcgccguucucccccgggauaugguguuuagaacaucuaccccucgcgucgugcugugaggacuagucccuguucccagagcccacuuuuuuuucuuuuuuugaaauaaaauagccugucuuucagaucucaaaggcucuuuucagagccaccaaaaaaaaaaaaaaaaaaaaaaaaaaaaaaaaaaaaaaaaaaaaaaaaaaaaaaaaaaaaaaaaagaauu

SEQ ID NO: 20922 - RNA, 2002 nt, Artificial Sequence
  mRNA product Design a-1 (hSL-A64-N5) comprising derived and/or modified sequence from MOPV/LASV reassortant(IGS-1;Clade IV)__AFY05578__SP-IgE_NP(2-569) (opt5)
aggagagucccgcagucggcguccagcggcucugcuuguucgugugugugucguugcaggccuuauucaagcuuaccauggacuggaccuggauccuguuccucguggccgcugccacaagaguccacagcagcgccuccaaggagaucaaaucuuuccuguggacccagagccucagacgggaacuguccggcuacugcucuaacauuaaacuucaaguggucaaggacgcucaggcccugcuccacgggcuggauuuuagcgagguuuccaaugugcagcgccuuaugagaaaggaacggcgcgacgauaacgaccugaaaagacuccgggaucugaaucaggcggugaacaaucuggucgagcucaagucuacacaacaaaagagcauccugcgcgugggaacgcuuaccuccgacgaucugcucauucuggcugccgaccuugaaaaacugagaagcaagguuauccggacagagcgcccccucucugccggcguguauauggggaaccuguccagccagcagcuggaucagagacgggcucuccugaauaugauuggaaugucuggcgggaaccagggagcccgcgcuggcagagacggcgucgugcggguuugggaugugaaaaaugccgagcuucuguccaaccaguucgggaccaugccuagccucacacuggcgugucuuaccaagcagggacaagucgaccugaaugaugccgugcaggcucucacagaccugggccugaucuacaccgccaaauauccgaacacgucugaccucgaucgccugacccagucccaucccauccuuaauaugauugacacaaagaaaagcucccugaacaucucuggguacaauuuuagccucggagcugccgugaaggcgggcgccugcaugcuggaugggggaaacaugcuugaaaccauuaaggucuccccucaaacaauggacggcauccugaaaagcauucucaagguuaaaaaggcucugggcauguucaucucugauacccccggggagagaaacccuuaugaaaauauucuguacaaaaucugucucuccggagacggcuggcccuauaucgccagccggacgucuauuacagggagagcuugggagaacaccgugguggaucuggagagcgacggaaagccucagaaggccgauuccaauaacucuagcaaaucccuucagagcgccggcuuuacagcugggcugaccuacucucagcucaugacccugaaggacgcgaugcugcaacuugauccgaaugccaaaacauggauggacaucgaaggacgccccgaggacccugucgaaauugcucucuaccagcccuccagcggcugcuauauccacuucuuucgggagccuacggaucugaagcaguucaaacaggacgccaaguacucucauggcauugaugugaccgaccuguuugccacacaacccgggcucaccuccgcuguuaucgaugcccugccgagaaacauggugaucacaugucagggaagcgacgauauucgcaaacuucuggaaucccagggccggaaggacaucaagcucauugauaucgaccugucuaaaaccgauagcagaaaguaugagaaugcggucugggaccaguacaaagaucugugccacaugcauacgggggugguuguggagaagaagaaacgcggaggcaaggaagagauuacaccucacugugcucuuauggacugcaucauguucgacgccgccgucuccgggggccucaacaccucugugcugcgggcuguccugcccagagauaugguguuucgcaccagcacaccucggguugugcucugaggacuagucccuguucccagagcccacuuuuuuuucuuuuuuugaaauaaaauagccugucuuucagaucucaaaggcucuuuucagagccaccaaaaaaaaaaaaaaaaaaaaaaaaaaaaaaaaaaaaaaaaaaaaaaaaaaaaaaaaaaaaaaaaagaauu

SEQ ID NO: 20923 - RNA, 2002 nt, Artificial Sequence
  mRNA product Design a-1 (hSL-A64-N5) comprising derived and/or modified sequence from LASV(LM765-SLE-2012;Clade IV)__AIT17815__SP-IgE_NP(2-569) (opt5)
aggagagucccgcagucggcguccagcggcucugcuuguucgugugugugucguugcaggccuuauucaagcuuaccauggacuggaccuggauccuguuccucguggccgcugccacaagaguccacagcagcgccuccaaggagaucaaaucuuuccuguggacccagagccucagacgggaacuguccggcuacugcucuaacauuaagcugcaaguggucaaagacgcucaggcccugcuccacgggcuggauuuuagcgagguuuccaaugugcagcgccuuaugagaaaggaacggcgcgacgauaacgaccugaaaagacuccgggaucugaaucaggcggugaacaaucuggucgagcucaagucuacacaacaaaagagcauccugcgcgugggaacgcuuaccuccgacgaucugcucauucuggcugccgaccuugaaaaacuuaagagcaaaguuacaagaaccgagcggccccucucugccggcguguauauggggaaccuguccagccagcagcuggaucagcgcagagcucuccuggacaugaucggaaugucuggcuccaaucagggggcccgggcuggacgcgauggcgucgugagaguuugggacgugaagaacgccgagcuucugaauaaccaguucggcacaaugccuagccucacccuggcgugucuuacaaaacaggggcaagucgaucugaaugacgccgugcaggcucucaccgaccugggacugauuuacacggccaaguauccgaacaccucugaucucgaccggcugacacagucccaucccauccuuaauaugaucgauaccaagaaaagcucccugaacauuucuggcuacaauuuuagccucggggcugccgugaaggcgggagccugcaugcuggacggcgggaacaugcuugaaacaaucaaagucuccccucaaaccauggauggcauucucaagagcauccugaaaguuaagaaagcucugggaauguucauuucugacgcccccggcgagcgcaacccuuaugaaaauauccuguacaagauuugucucuccggggauggauggcccuauaucgcuagcagaacgucuaucacaggccgggccugggagaacaccgugguggaccuggagagcgaugggaagccucagaaagccggauccaauggcucuaacaagagccuucaguccgcuggguuuacagcgggacugaccuacagccagcucaugacccugaaagacgccaugcugcaacuugauccgaaugcuaagacauggauggacauugaaggcagacccgaggacccugucgaaaucgcccucuaccagcccucuuccggcugcuauauucacuucuuucgcgagccuacggaucugaaacaguucaagcaggacgccaaguacagccaugggaucgaugugaccgaccuguuugcugcccaacccggacucacaucugcgguuauugaugcucugccgcggaacauggugaucaccugucagggcuccgacgauaucagaaaacuuuucgaaagccaggggcgcaaggacauuaaacugaucgauauugcccucuccaagacagacucucggaaauaugagaaugccgucugggaucaguacaaggaccugugccacaugcauaccggaaucgugguugagaagaaaaagagaggcgggaaagaagagauuacgccucacugugcucugauggauugcaucauguuugacgccgcugugagcggcggacuuaacacauccguccuccgcgccgugcugccccgggacauggucuucagaaccucuaccccucgcgugguucugugaggacuagucccuguucccagagcccacuuuuuuuucuuuuuuugaaauaaaauagccugucuuucagaucucaaaggcucuuuucagagccaccaaaaaaaaaaaaaaaaaaaaaaaaaaaaaaaaaaaaaaaaaaaaaaaaaaaaaaaaaaaaaaaaagaauu

SEQ ID NO: 20924 - RNA, 2002 nt, Artificial Sequence
  mRNA product Design a-1 (hSL-A64-N5) comprising derived and/or modified sequence from LASV(LM776-SLE-2012;Clade IV)__AIT17825__SP-IgE_NP(2-569) (opt5)
aggagagucccgcagucggcguccagcggcucugcuuguucgugugugugucguugcaggccuuauucaagcuuaccauggacuggaccuggauccuguuccucguggccgcugccacaagaguccacagcagcgccuccaaggagaucaaaucuuuccuguggacccagagccucagacgggaacuguccucuuacugcagcaacauuaaacuucaaguggucaaggacgcucaggcccugcuccacggccuggauuuuuccgagguuucuaaugugcagcgccuuaugagaaaggaacggcgcgacgauaacgaccugaaaagacuccgggaucugaaucaggcggugaacaaucuggucgagcucaagagcacacaacagaaguccauccugcgcguggggacgcuuaccagcgacgaucugcucauucuggcugccgaccuugaaaaacugaagucuaaaguuacaagaaccgagcggccccucuccgccggaguguauaugggcaaccugagcucucagcagcuggaucaacgcagagcucuccuguccaugaucgggaugagcggaucuaaucagggcgcccgggcugggcgcgacggagucgugagaguuugggaugugaagaacgccgagcuucugaauaaccaguucggcacaaugccuucccucacccuggcgugucuuacaaaacagggccaagucgaccugaaugaugccgugcaggcucucaccgaccuggggcugauuuacacggccaaguauccgaacaccagcgaccucgaucggcugacacagucccaucccauccuuaauaugaucgacaccaagaaaucuagccugaacauuuccggauacaauuuuagccucggcgcugccgugaaggcgggggccugcaugcuggauggaggcaacaugcuugaaacaaucaaagucucuccucaaaccauggacgggauucugaaguccauccucaaaguuaagaaagcucugggaauguucauuagcgauacgcccggcgagcgcaacccuuaugaaaauauccuguacaagauuugucucucuggcgacggguggcccuauaucgccagcagaacauccaucaccggacgggcuugggagaacacagugguggaucuggagucugacggcaagccucagaaagccgggagcaauaacuccaauaagagccuucagucugccggauuuaccgcuggccugaccuacucccagcucaugacacugaaagaugcgaugcugcaacuugacccgaacgccaagacguggauggauauugaagggagacccgaggacccugucgaaguggcucucuaccagcccagcucuggaugcuauauccacuucuuucgcgagccuaccgaccugaaacaguucaagcaggaugccaaguacucccauggcauugacguuacagaucuguuugccgcucaacccggccucaccagcgccgugaucgacgcgcugccgcggaauauggucauuacaugucagggguccgaugacaucagaaaacuucuggaaucucagggacgcaaggauaucaaacucauugacaucgcucugagcaagaccgauucccggaaauaugagaacgccgugugggaccaguacaaggaucugugccacaugcauacgggcguuguggucgagaagaaaaagagagggggaaaagaagagauuacaccucacugugcccuuauggacugcaucauguucgaugcugccgugucuggcgggcucaauaccagcguccugcgcgcugugcugccccgggacaugguuuuuagaaccuccacaccucgcgugguccucugaggacuagucccuguucccagagcccacuuuuuuuucuuuuuuugaaauaaaauagccugucuuucagaucucaaaggcucuuuucagagccaccaaaaaaaaaaaaaaaaaaaaaaaaaaaaaaaaaaaaaaaaaaaaaaaaaaaaaaaaaaaaaaaaagaauu

SEQ ID NO: 20925 - RNA, 2002 nt, Artificial Sequence
  mRNA product Design a-1 (hSL-A64-N5) comprising derived and/or modified sequence from LASV(Mad39;Clade IV)__ANH09723__SP-IgE_NP(2-569) (opt5)
aggagagucccgcagucggcguccagcggcucugcuuguucgugugugugucguugcaggccuuauucaagcuuaccauggacuggaccuggauccuguuccucguggccgcugccacaagaguccacagcagcgccuccaaggagaucaaaucuuuccuguggacccagagccucagacgggaacuguccggcuacugcucuaacauuaagcugcaaguggucaaagacgcucaggcccugcuccacgggcuggauuuuagcgagguuuccaaugugcagcgccuuaugagaaagcagcggcgcgacgauaacgaccugaaaagacuccgggaucugaaucaagcggugaacaaucuggucgaacucaagucuacacagcaaaagagcgugcugcgcguuggaacgcuuaccuccgacgaucugcucacacuggcugccgaccuugagaaacuuaagagcaaagugaccagaacagaacggccccucaccgccggcgucuauauggggaaccugucuucccagcagcuggaucagcgcagagcucuccugaauaugaucggaaugagcggcgggaaccagggagcccggacaggccgcgacggcgugguuagagugugggaugucaagaaugcugagcuucugaacaaucaguucgggaccaugccuucucucacgcuggccugucuuaccaaacaaggacagguggaccugaacgaugugguccaggcgcucacagaccugggccugauuuacaccgccaaguauccgaauacauccgaccucgaucggcugacccaaagccaucccauccuuaacaugauugacacgaauaagucuucccugaacaucagcggguacaacuuuucccucggagcugccguuaaagcuggcgccugcaugcuggaugggggaaauaugcuugagacaaucaaggugucuccucagaccauggacggcauucugaaaagcauccucaaggugaaaaagucccugggcauguucauuagcgauacacccggggaacgcaacccuuaugagaauauccuguacaaaauuugucucucuggagacggcuggcccuauaucgcguccagaaccagcauuaccgggcgggccugggaaaacacagucguggaucuggagucuggaggcaagccucagaaggcugggagcaauaacuccaauaaaucucuucagagcgccggauuugcugccggccugacguacucccaacucaugacccugaaggacgccaugcugcagcuugauccgaacgcuaaaacauggauggacaucgagggcagacccgaagauccuguugagaucgcgcucuaccagcccauuagcgggugcuauauccacuucuuucgcgaaccuaccgaccugaagcaguucaaacaagacgccaaguacucucauggaauugaugugacagaccuguuugcugcccagcccggccucaccuccgccgucaucgaggcucugccgcggaauauggugauuacgugucaggggagcgaugacaucagaaaacuuuucgaaucucagggacgcaaggauaucaagcugauugacaucgcccucuccaaaacagauagccggaaguaugagaacgcgguuugggaccaauacaaagaucugugccacaugcauaccggcguggucguggagaagaagaaaaagggcgggaaagaagagauuaccccucacugugcucugauggacugcaucauguuugaugccgccgucuccggaggccuuaauacacucgugcugagagcuguucugccccgcgacaugguguuccggaccucuacaccuaaggucgugcucugaggacuagucccuguucccagagcccacuuuuuuuucuuuuuuugaaauaaaauagccugucuuucagaucucaaaggcucuuuucagagccaccaaaaaaaaaaaaaaaaaaaaaaaaaaaaaaaaaaaaaaaaaaaaaaaaaaaaaaaaaaaaaaaaagaauu

SEQ ID NO: 20926 - RNA, 2002 nt, Artificial Sequence
  mRNA product Design a-1 (hSL-A64-N5) comprising derived and/or modified sequence from LASV(Z0947-SLE-2011;Clade IV)__AIT17841__SP-IgE_NP(2-569) (opt5)
aggagagucccgcagucggcguccagcggcucugcuuguucgugugugugucguugcaggccuuauucaagcuuaccauggacuggaccuggauccuguuccucguggccgcugccacaagaguccacagcagcgccuccaaggagaucaaaucuuuccuguggacccagagccucagacgggaacuguccggcuacugcucuaacauuaagcugcaaguggucaaagacgcucaggcccugcuccacgggcuggauuuuagcgagguuuccaaugugcagcgccuuaugagaaaggaacggcgcgacgauaacgaccugaaaagacuccgggaucugaaucaggcggugaacaaucuggucgagcucaagucuacacaacaaaagagcauccugcgcgugggaacgcuuaccuccgacgaucugcucauucuggcugccgaccuugaaaaacuuaagagcaaaguuacaagaaccgagcggccccucucugccggcguguauauggggaaccuguccagccagcagcuggaucagcgcagagcucuccugaauaugaucggaaugucuggcuccaaccagggggcccggacaggacgcgacggcgucgugagaguuugggaugugaagaaugcugagcuucugaacaaucaguucggcaccaugccuagccucacacuggccugucuuaccaaacaggggcaagucgaccugaacgaugcggugcaggcccucacggaccugggacugauuuacaccgcuaaguauccgaauacaucugaccucgaucggcugacccagucccaucccauccuuaacaugaucgacacaaagaaaagcucccugaauauuucuggcuacaacuuuagccucggggccgcugugaaggccggagcgugcaugcuggauggcgggaacaugcuugaaaccaucaaagucuccccucaaacgauggacggcauucucaagagcauccugaaaguuaagaaagcccugggaauguucauuucugaugcucccggcgagcgcaauccuuaugaaaacauccuguacaagauuugucucuccggggacggauggcccuauaucgccagcagaacaucuaucaccggccgggcuugggagaauacagugguggaucuggagagcgacgggaagccucagaaagccggauccaacggcucuaauaagagccuucaguccgccggguuuaccgcuggacugaccuacagccagcucaugacacugaaagaugcgaugcugcaacuugacccgaacgccaagacguggauggauauugaaggcagacccgaggacccugucgaaaucgcucucuaccagcccucuuccggcugcuauauucacuucuuucgcgagccuaccgaccugaaacaguucaagcaggaugccaaguacagccaugggaucgacgugacagaucuguuugccgcucaacccggacucaccucugccguuauugacgcgcugccgcggaauauggugaucacaugucagggcuccgaugacaucagaaaacuuuucgaaagccaggggcgcaaggauauuaaacugaucgacauugcucucuccaagaccgauucucggaaauaugagaacgccgucugggaccaguacaaggaucugugccacaugcauacgggaaucgugguugagaagaaaaagagaggcgggaaagaagagauuacaccucacugugcccugauggacugcaucauguuugaugcugccgugagcggcggacuuaauaccuccguccuccgcgcugugcugccccgggacauggucuucagaaccucuacaccucgcgugguucugugaggacuagucccuguucccagagcccacuuuuuuuucuuuuuuugaaauaaaauagccugucuuucagaucucaaaggcucuuuucagagccaccaaaaaaaaaaaaaaaaaaaaaaaaaaaaaaaaaaaaaaaaaaaaaaaaaaaaaaaaaaaaaaaaagaauu

SEQ ID NO: 20927 - RNA, 2033 nt, Artificial Sequence
  mRNA product Design a-1 (hSL-A100) comprising derived and/or modified sequence from LASV(Josiah;Clade IV)__NP_694869__SP-IgE_NP(2-569) (opt1)
aggagagucccgcagucggcguccagcggcucugcuuguucgugugugugucguugcaggccuuauucaagcuuaccauggacuggaccuggauccuguuccucguggccgccgcgacccgcguccacagcagcgccuccaaggagaucaagagcuuccuguggacccagucccuccgccgggagcugagcggcuacugcuccaacaucaagcuccagguggucaaggacgcccaggcgcugcugcacgggcuggacuucagcgagguguccaacgugcagcgccucaugcggaaggagcgccgggacgacaacgaccugaagcgccugcgggaccucaaccaggccgucaacaaccugguggagcucaagagcacccagcagaaguccauccugcgcgugggcacccugaccagcgacgaccugcucauccuggccgccgaccuggagaagcucaaguccaaggucauccggaccgagcgcccccugagcgccgggguguacaugggcaaccuguccagccagcagcucgaccagcggcgcgcgcugcugaacaugaucgggauguccggcggcaaccagggggcccgggccggccgcgacggggugguccgggugugggacgugaagaacgccgagcuccugaacaaccaguucggcaccaugccgagccugacgcucgcgugccugaccaagcaggggcaggucgaccugaacgacgccgugcaggcccucaccgaccugggccugaucuacaccgccaaguaccccaacacguccgaccucgaccgccugacccagagccaccccauccugaacaugaucgacaccaagaaguccagccucaacaucagcggcuacaacuucucccugggggccgcggugaaggccggcgccugcaugcuggacgggggcaacaugcucgagaccaucaaggucagcccccagacgauggacggcauccugaaguccauccugaaggugaagaaggcccucgggauguucaucagcgacaccccgggcgagcggaaccccuacgagaacauccuguacaagaucugccuguccggggacggcuggcccuacaucgccagccgcaccuccaucaccgggcgggcgugggagaacacgguggucgaccucgagagcgacggcaagccccagaaggccgacuccaacaacagcuccaagagccugcaguccgccggcuucaccgccgggcugaccuacagccagcucaugacccugaaggacgccaugcugcagcuggacccgaacgcgaagacguggauggacaucgagggccgccccgaggaccccguggagaucgcccucuaccagcccuccagcgggugcuacauccacuucuuccgggagccgaccgaccugaagcaguucaagcaggacgccaaguacucccacggcaucgacgugaccgaccuguucgccacccagcccgggcucacgagcgccgucaucgacgcgcugccccgcaacauggugaucacgugccagggcuccgacgacauccgcaagcugcucgagagccagggccggaaggacaucaagcugaucgacaucgcccugagcaagaccgacucccgcaaguacgagaacgccgugugggaccaguacaaggaccucugccacaugcacaccggggucguggucgagaagaagaagcggggcgggaaggaggagaucaccccgcacugcgcccugauggacugcaucauguucgacgcggccgugagcggcgggcugaacaccuccgugcuccgcgccguccugccccgggacaugguguuccgcaccagcacgccccgggugguccugugaggacuagucccuguucccagagcccacuuuuuuuucuuuuuuugaaauaaaauagccugucuuucagaucucaaaggcucuuuucagagccaccaaaaaaaaaaaaaaaaaaaaaaaaaaaaaaaaaaaaaaaaaaaaaaaaaaaaaaaaaaaaaaaaaaaaaaaaaaaaaaaaaaaaaaaaaaaaaaaaaaaaa

SEQ ID NO: 20928 - RNA, 2033 nt, Artificial Sequence
  mRNA product Design a-1 (hSL-A100) comprising derived and/or modified sequence from LASV(LP;Clade I)__AAF86702__SP-IgE_NP(2-569) (opt1)
aggagagucccgcagucggcguccagcggcucugcuuguucgugugugugucguugcaggccuuauucaagcuuaccauggacuggaccuggauccuguuccucguggccgccgcgacccgcguccacagcagcaacuccaaggagaucaagagcuuccuguggacccagucccuccgccgggagcugagcggcuacugcuccaacaucaagcuccagguggucaaggacgcccaggcccugcugcacgggcuggacuucagcgagguguccaacgugcagcgccucaugcggaagcagaagcgcgacgacgcggaccugaagcggcugcgcgaccucaaccaggccgucaacaaccugguggagcucaagagcacccagcagaagaacgugcugcgggucggcacgcuguccagcgacgaccugaucacccucgccgccgaccuggagaagcugaaguccaaggugauccgcaccgagcggccccucagcuccgggguguacaugggcaaccugagcucccagcagcuggaccagcgccgggcccuccugagcaugaucgggauguccggcggcccgcaggggaaccgcaccggcggggacggcgucgugcgggugugggacgucaagaacgcggagcugcucaacaaccaguucgggacgaugcccagccugacccuggccugccucaccaagcagggccagguggaccugaacgacgccgugcaggcccugaccgaccucggccugaucuacacggcgaaguaccccaacuccagcgaccuggacaugcucacccagagccaccccauccuggggauggucgacaccaagaaguccagccugaacaucuccggcuacaacuucagccucggggccgccgugaaggccggcgccugcaugcuggacggcgggaacaugcuggagaccaucaagguguccccgcagacgauggacggcauccucaagagcauccugaaggucaagcgcucccuggggauguucaucagcgacacccccggcgagcggaaccccuacgagaacauccucuacaagaucugccuguccggggagggcuggcccuacaucgcgagccgcaccuccaucaccggccgggccugggagaacacgcugguggaccucgagagcgacaacaagccgcccaagcugaacuccgccgggagcaacaagucccugcaggccgccggccucaacgcggggcugaccuacagccagcugaugacccugaaggacugcaugcuccagcuggaccccuccagcaagaccuggaucgacaucgagggccgccccgaggacccgguggagaucgcccuguuccagcccuccagcgggugcuacauccacuucuuccgggagcccacggaccucaagcaguucaagcaggacgccaaguacagccacggcaucgacgucaccgaccuguucuccacccagcccggccugaccagcgccgugaucgaggcccucccgcgcaacauggugcugacgugccagggguccgacgacaucaagaagcugcucgagagccagggccggcgcgacaucaagcugaucgacaucucccugagcaaggcggacucccgcaaguucgagaacgccgucugggaccaguacaaggaccucugccacaugcacaccgggguggucguggagaagaagaagcggggcgggaaggaggagaucacgccccacugcgcccugcuggacugcaucauguucgacgccgccaccaccggcagccucaacaucaccacccugcgcgcggugcugccccgggacauggucuuccgcaccuccacgcccaagguggugcucugaggacuagucccuguucccagagcccacuuuuuuuucuuuuuuugaaauaaaauagccugucuuucagaucucaaaggcucuuuucagagccaccaaaaaaaaaaaaaaaaaaaaaaaaaaaaaaaaaaaaaaaaaaaaaaaaaaaaaaaaaaaaaaaaaaaaaaaaaaaaaaaaaaaaaaaaaaaaaaaaaaaaa

SEQ ID NO: 20929 - RNA, 2033 nt, Artificial Sequence
  mRNA product Design a-1 (hSL-A100) comprising derived and/or modified sequence from LASV(803213;Clade II)__AAF86704__SP-IgE_NP(2-569) (opt1)
aggagagucccgcagucggcguccagcggcucugcuuguucgugugugugucguugcaggccuuauucaagcuuaccauggacuggaccuggauccuguuccucguggccgccgcgacccgcguccacagcagcgccuccaaggaggugaaguccuuccuguggacccagagccuccgccgggagcugagcggcuacugcuccaacaucaagcugcaggucgugaaggacgcccaggcgcuccugcacgggcuggacuucagcgaggugaacaacguccagcgccucaugcggaagcagaagcgcgacgacggcgaccugaagcggcugcgcgaccucaaccaggccgugaacaaccugguggagcugaaguccacccagcagaaguccauccuccgggucgggacgcugaccagcgacgaccugcucacccuggccgccgaccuggagaagcucaagagcaaggugauccgcaccgagcggccccuguccagcggcguguacauggggaaccuguccacgcagcagcucgagcagcgccgggcccugcugaacaugaucggcauggucggcggggcgcagggcacccagccggggcgcgacggcguggugcgggucugggacgugaagaaccccgaccuccugaacaaccaguucgggaccaugcccagccugacccucgccugccugacgaagcagggccagguggaccugaacgacgccguccucgcccugaccgaccugggccucaucuacaccgcgaaguaccccaacuccagcgaccuggaccgccugucccagagccacccgauccucaacaugguggacaccaagaaguccagccugaacaucagcggguacaacuucucccugggcgccgccgugaaggccggggccugcaugcucgacggcggcaacaugcuggagacgaucaaggucacgccccagaccauggacgggauccucaagagcauccugaaggugaagcggucccugggcauguucgugagcgacacccccggggagcgcaaccccuacgagaacauccuguacaagaucugccucuccggcgacggguggccguacaucgcgagccggaccuccaucgucggccgcgccugggagaacaccaccguggaccuggagagcgacggcaagccccagaagguggggaccgccggcuccaacaagagccugcaguccgccggguuccccacgggccucaccuacagccagcugaugacccugaaggacuccaugaugcagcuggaccccagcgccaagaccuggaucgacaucgaggggcggccggaggaccccgucgagaucgcgcucuaccagcccauguccggcugcuacauccacuucuuccgcgagcccacggaccugaagcaguucaagcaggacgccaaguacagccacggcaucgacguggccgaccuguucccggcccagcccgggcucaccuccgccgucaucgaggcgcugccccggaacauggugcugaccugccagggcagcgacgacaucaagaagcuccuggacucccaggggcgccgcgacaucaagcugaucgacaucagccucagcaagguggacucccggaaguucgagaacgccgucugggaccagugcaaggaccugugccacaugcacaccggcgugguggucgagaagaagaagcgcgggggcaaggaggagaucacgccccacugcgcccugauggacugcaucauguucgacgccgccgugagcggcgggcucaacaucccggugcugcgggcgguccugccccgcgacaugguguuccggaccuccagccccaaggugguccucugaggacuagucccuguucccagagcccacuuuuuuuucuuuuuuugaaauaaaauagccugucuuucagaucucaaaggcucuuuucagagccaccaaaaaaaaaaaaaaaaaaaaaaaaaaaaaaaaaaaaaaaaaaaaaaaaaaaaaaaaaaaaaaaaaaaaaaaaaaaaaaaaaaaaaaaaaaaaaaaaaaaaa

SEQ ID NO: 20930 - RNA, 2036 nt, Artificial Sequence
  mRNA product Design a-1 (hSL-A100) comprising derived and/or modified sequence from LASV(GA391;Clade III)__CAA36646__SP-IgE_NP(2-570) (opt1)
aggagagucccgcagucggcguccagcggcucugcuuguucgugugugugucguugcaggccuuauucaagcuuaccauggacuggaccuggauccuguuccucguggccgccgcgacccgcguccacagcagcgccuccaaggaggugcgcagcuuccuguggacccagucccuccggcgcgagcugagcggcuacugcuccaacaucaagcugcaggucgugaaggacgcccaggcgcuccugcacgggcuggacuucagcgagguguccaacguccagcggcucaugcgcaagcagaagcgggacgacggcgaccugaagcgccugcgggaccucaaccaggccgugaacaaccugguggagcucaagagcacccagcagaaguccguccugcgcguggggacccugagcuccgacgaccugcucauccuggccgccgaccuggagaagcucaagagcaaggugacccggaccgagcgcccccuguccagcggcgucuacauggggaaccuguccagccagcagcucgaccagcggcgcgcccugcugaacaugaucggcaugaccggcguguccgggggcgggaagggcgcgagcgacgggaucgugcgggucugggacgugaagaacgccgagcuccugaacaaccaguucggcacgaugccgucccugacccucgccugccugaccaagcagggccagguggaccugaacgacgccguccaggcgcucaccgaccuggggcugaucuacacggccaaguaccccaacagcagcgaccucgaccgccugucccagagccaccccauccugaacaugaucgacaccaagaaguccagccucaacaucuccggcuacaacuucagccugggggccgccgugaaggccggcgcgugcaugcuggacggcgggaacaugcucgagaccaucaaggugagcccccagaccauggacggcauccucaaguccauccugaaggucaagaagucccuggggauguucgugagcgacacgccgggcgagcggaaccccuacgagaacauccuguacaagaucugccuguccggggacggcuggcccuacaucgccagccgcaccuccaucgugggccgggccugggagaacaccgucguggaccucgagcaggacaacaagccccagaagaucgggaacggcgggagcaacaagucccugcagagcgccggcuucgccgcggggcugaccuacucccagcucaugacgcugaaggacuucaagugcuucaaccugaucccgaacgccaagaccuggauggacaucgagggccgccccgaggaccccguggagaucgcccuguaccagcccagcuccggcugcuacguccacuucuuccgggagccgaccgaccucaagcaguucaagcaggacgccaaguacagccacgggaucgacgugaccgaccuguucgccgcgcagcccggccugacgagcgccgucaucgaggcccucccccgcaacauggugaucacgugccagggguccgaggacauccggaagcugcuggagagccagggccgccgcgacaucaagcucaucgacaucacccuguccaaggccgacagccggaaguucgagaacgccgugugggaccaguucaaggaccugugccacaugcacaccggggucgugguggagaagaagaagcgcggcggcaaggaggagaucacgccccacugcgcgcucauggacugcaucauguucgacgccgccgucuccgggggccuggacgccaaggugcugcgggugguccucccgcgcgacaugguguuccggaccagcacccccaaggugguccugugaggacuagucccuguucccagagcccacuuuuuuuucuuuuuuugaaauaaaauagccugucuuucagaucucaaaggcucuuuucagagccaccaaaaaaaaaaaaaaaaaaaaaaaaaaaaaaaaaaaaaaaaaaaaaaaaaaaaaaaaaaaaaaaaaaaaaaaaaaaaaaaaaaaaaaaaaaaaaaaaaaaaa

SEQ ID NO: 20931 - RNA, 2033 nt, Artificial Sequence
  mRNA product Design a-1 (hSL-A100) comprising derived and/or modified sequence from LASV(AV;Clade V)__CCA30315__SP-IgE_NP(2-569) (opt1)
aggagagucccgcagucggcguccagcggcucugcuuguucgugugugugucguugcaggccuuauucaagcuuaccauggacuggaccuggauccuguuccucguggccgccgcgacccgcguccacagcagcgccuccaaggaggugaaguccuuccuguggacccagagccuccgccgggagcugagcggcuacugcuccaacaucaagcugcaggucgugaaggacgcccaggcgcuccugcacgggcuggacuucagcgagguguccaacguccagcgccucaugcggaagcagcgccgggacgacagcgaccugaagcgccugcgggaccucaaccaggccgugaacaaccugguggagcugaaguccacccagcagaaguccguccuccgcgugggcacgcugagcagcgacgaccugcucacccuggccgccgaccuggagaagcucaaguccaaggugacccggaccgagcgcccccugagcuccggggucuacaugggcaaccugagcucccagcagcucgaccagcggcgcgcccugcugaaccucaucgggaugacgaacggcagccagggcucccaggcggggcgggacggcguggugcgcgucugggacgugaagaacgccgagcugcugaacaaccaguucgggaccaugccgagccucacccuggccugccugaccaagcagggccagguggaccucaacgacgucgugcaggcccugacggaccuggggcucaucuacaccgcgaaguaccccaacaccagcgaccuggaccggcugacccagucccaccccauccucaacaugaucgacacgaagaaguccagccugaacaucagcggcuacaacuucucccugggcgccgccgugaaggccggggccugcaugcucgacggcgggaacaugcuggagaccaucaaggucagcccccaguccauggacggcauccucaagagcauccugaaggugaagcgcgcgcugggcauguucguguccgacaccccgggggagcggaaccccuacgagaacauccuguacaagaucugccucagcggcgacggguggcccuacaucgccucccgcaccagcaucgucggccgggccugggagaacacggugguggaccuggagaccgacgggaagccccagaagaucggcuccggcaacagcaacaagucccugcagagcgccggguucuccgccggccucaccuacagccagcugaugacccugaaggacgcgaugcugcagcucgacccgaacgccaagacguggauggacaucgaggggcgccccgaggaccccgucgagguggcccuguaccagcccaucuccggcugcuacauccacuucuuccgggagccgaccgaccugaagcaguucaagcaggacgccaaguacagccacgggaucgacaucgccgaccucuucgcggcccagcccggccugaccagcgccgucaucgaggcccugccccgcaacauggugaucacgugccagggcuccgaggacaucaagaagcuccuggagagccaggggcgcaaggacaucaagcugaucgacaucgcccucuccaagaucgacagccggaaguucgagaacgcggugugggaccaguacaaggaccugugccacaugcacaccggcgucgugguggagaagaagaagcgcgggggcaaggaggagaucaccccgcacugcgcccugauggacugcaucauguucgacgccgccgucuccgggggccucaacacccuggugcugcgggcggugcucccccgcgacauggucuuccggaccagcacgccccgcguggugcugugaggacuagucccuguucccagagcccacuuuuuuuucuuuuuuugaaauaaaauagccugucuuucagaucucaaaggcucuuuucagagccaccaaaaaaaaaaaaaaaaaaaaaaaaaaaaaaaaaaaaaaaaaaaaaaaaaaaaaaaaaaaaaaaaaaaaaaaaaaaaaaaaaaaaaaaaaaaaaaaaaaaaa

SEQ ID NO: 20932 - RNA, 2033 nt, Artificial Sequence
  mRNA product Design a-1 (hSL-A100) comprising derived and/or modified sequence from LASV(Togo/2016/7082;Clade VI)__AMR44578__SP-IgE_NP(2-569) (opt1)
aggagagucccgcagucggcguccagcggcucugcuuguucgugugugugucguugcaggccuuauucaagcuuaccauggacuggaccuggauccuguuccucguggccgccgcgacccgcguccacagcagcaacuccaaggaggugaaguccuuccuguggacccagagccuccgccgggagcugagcggcuacugcuccaacaucaagcugcaggucgugaaggacgcccaggcccuccugcacgggcuggacuucagcgagguguccaacguccagcgccucaugcggaagcagaagcgcgacgacggcgaccugaagcggcugcgcgaccucaaccaggcggugaacaaccugguggagcucaagagcguccagcagaaguccauccugcggguggggacccugaccagcgacgaccugcucacccuggccgccgaccuggagaagcucaaguccaaggugacccgcaccgagcggccccugagcuccggcgucuacauggggaaccugagcucccagcagcucgaccagcgccgggcccugcugagcaugaucggcauguccggcgggaaccagaacagccagccgaagggcgacgggguggugcgcgucugggacgugaagaacgccgaccuccugaacaaccaguucggcacgaugcccucccugacccucgcgugccugaccaagcagggccagguggaccugaacgacgccguccaggcccucaccgaccuggggcugaucuacacggccaaguaccccaacagcagcgaccucgaccggcugucccagagccaccccauccugaacaugaucgacaccaagaaguccagccucaacaucuccggcuacaacuucagccugggggcggccaucaagaccggcgccugcaugcuggacgggggcaacaugcucgagaccaucaaggugacgccgcagaccauggacggcauccugaaguccauccugaaggugaagcgcagccucgggauguucaucuccgacacccccggcgagcggaaccccuacgagaacauccuguacaagaucugccugagcggggacggcuggcccuacaucgccucccgcaccgccaucaucgggcgggcgugggagaacacggucguggaccucgagagcgacuccaagccgcagaagaucggcagcaacggcuccaacaagagccugcaguccgccggguucgcccccggccugaccuacagccagcucaugacccugaaggacuccaugcugcagcuggaccccaacgccaagaccuggaucgacaucgaggggcgccccgaggacccgguggaggucgcccucuuccagcccaucagcggcugcuacauccacuucuuccgggagcccacggaccugaagcaguucaagcaggacgcgaaguacagccacgggaucgacgugaccgaccuguucgccgcccagcccggccucaccuccgccgugaucgaggcccugccgcgcaacaugguccugaccugccagggcagcgacgacaucaagaagcuccuggacucccaggggcggcgcgacaucaagcugaucgacgugagccucaacaagaucgacucccgcaaguucgagaacgcggucugggaccaguacaaggaccugugccacaugcacacgggcgugguggucgagaagaagaagaagggcgggaaggaggagaucacgccccacugcgcccugcucgacugcaucauguucgacgccgccgugagcgggggccugaacgccaccgugcugcgggcgguccucccccgcgacaugguguuccggaccuccagccccaaggugguccugugaggacuagucccuguucccagagcccacuuuuuuuucuuuuuuugaaauaaaauagccugucuuucagaucucaaaggcucuuuucagagccaccaaaaaaaaaaaaaaaaaaaaaaaaaaaaaaaaaaaaaaaaaaaaaaaaaaaaaaaaaaaaaaaaaaaaaaaaaaaaaaaaaaaaaaaaaaaaaaaaaaaaa

SEQ ID NO: 20933 - RNA, 2033 nt, Artificial Sequence
  mRNA product Design a-1 (hSL-A100) comprising derived and/or modified sequence from LASV(KAK-428;Clade n.d. (VII))__ANH09741__SP-IgE_NP(2-569) (opt1)
aggagagucccgcagucggcguccagcggcucugcuuguucgugugugugucguugcaggccuuauucaagcuuaccauggacuggaccuggauccuguuccucguggccgccgcgacccgcguccacagcagcaacuccaaggaggugaaguccuuccuguggacccagagccuccgccgggagcugagcggcuacugcaccaacaucaagcugcaggucgugaaggacgcccaggcccuccugcacgggcuggacuucuccgaggugagcaacguccagcgccucaugcggaagcagaagcgcgacgacaacgaccugaagcggcugcgcgaccucaaccaggcggugaacaaccugguggagcugaaguccguccagcagaaguccgugcucaaggugggcacgcugaacagcgacgaccugcucacccuggccgccgaccuggagaagcucaagagcaaggucgugcggaccgagcgcccccuguccagcgggguguacaugggcaaccuguccagccagcagcucgaccagcggcgcgcccugcugaacaugaucgggauggccggcggcucccaggggaaccagccgagccgggacggcgucgugcgcgugugggacgucaagaacgcggaccuccugaacaaccaguucgggaccaugcccucccugacgcucgccugccugaccaagcagggccagguggaccugaacgacgugguccucgcccugaccgaccuggggcucaucuacaccgccaaguaccccaacagcuccgaccuggaccggcugagccagaaccaccccgugcucaacaugaucgacgugaacaagagcucccugaacaucagcggcuacaacuucucccugggcgcggccgucaaggccggggccugcaugcucgacggcgggaacaugcuggagacgaucaagaucagcccgcagaccguggacggcauccugaaguccauccucaaggugaagcgcgcccugggcauguucgucagcgacacccccggggagcggaaccccuacgagaacauccuguacaaggugugccucuccggcaacggguggcccuacaucgcgagccgcaccuccaucgucggccgggccugggagaacacggugguggaccuggagagcaacaagaaccagccgaaggucgggaacaacggcuccaacaagaugcugcagagcuccggcuucgccaccgggcucaccuacagccagcugaugacccugcgcgacuccaugcugcagcucgaccccacggccaagaccuggaucgacaucgagggccggcccgaggaccccguggagcuggcccuguuccagccgagcuccgggugcuacauccacuucuuccgcgagcccaccgaccucaagcaguucaagcaggacgcgaaguacagccacggcaucgacgugaacgaccuguucuccgcccagcccgggcugaccagcgccguccucgaggcccugccccggaacauggugcugacgugccagggcagcgacgacauccgcaagcuccuggacucccaggaccgcaaggacaucaagcugaucgacaucagccucuccaaggccgacgcgcggaaguucgagaacgacgugugggaccaguucaaggaccugugccacaugcacaccggcaucgucguggagaagaagaagaagggcgggaagcaggagaugaccccgcacugcgcccugcucgacugcaucauguucgacgccgccgugagcgggggccugaacguccccacccugcgcgccgugcuccccacggacaugguguuccggaccaucaccaccaaggucgugcugugaggacuagucccuguucccagagcccacuuuuuuuucuuuuuuugaaauaaaauagccugucuuucagaucucaaaggcucuuuucagagccaccaaaaaaaaaaaaaaaaaaaaaaaaaaaaaaaaaaaaaaaaaaaaaaaaaaaaaaaaaaaaaaaaaaaaaaaaaaaaaaaaaaaaaaaaaaaaaaaaaaaaa

SEQ ID NO: 20934 - RNA, 2033 nt, Artificial Sequence; identical to SEQ ID NO: 20928
  mRNA product Design a-1 (hSL-A100) comprising derived and/or modified sequence from LASV(Pinneo-NIG-1969;Clade I)__AIT17837__SP-IgE_NP(2-569) (opt1)

SEQ ID NO: 20935 - RNA, 2033 nt, Artificial Sequence
  mRNA product Design a-1 (hSL-A100) comprising derived and/or modified sequence from LASV(ISTH0009-NIG-2011;Clade II)__AIT17405__SP-IgE_NP(2-569) (opt1)
aggagagucccgcagucggcguccagcggcucugcuuguucgugugugugucguugcaggccuuauucaagcuuaccauggacuggaccuggauccuguuccucguggccgccgcgacccgcguccacagcagcguguccaaggaggucaagagcuuccuguggacccagucccuccgccgggagcugagcggcuacugcuccaacaucaagcuccagguggugaaggacgcccaggcccugcugcacgggcuggacuucagcgaggucuccaacgugcagcgccucaugcggaagcagaagcgcgacgacagcgaccugaagcggcugcgcgaccucaaccaggcggugaacaaccuggucgagcugaaguccacccagcagaaguccauccuccgggugggcacccugaccagcgacgaccugcucacccuggccgccgaccuggagaagcucaagagcaaggugauccgcaccgagcggccccuguccagcggggucuacaugggcaaccuguccacgcagcagcucgagcagcgccgggcccugcugaacaugaucgggauggugggcggcgcccaggggacccagccgggccgcgacggggugguccgggugugggacgugaagaaccccgaccuccugaacaaccaguucggcaccaugcccagccugacccucgcgugccugacgaagcaggggcaggucgaccugaacgacgccgugcucgcccugaccgaccugggccucaucuacaccgccaaguaccccaacuccagcgaccuggaccgccugucccagagccacccgauccucaacaugguggacaucaagaaguccagccugaacaucagcggcuacaacuucucccugggggcggccgucaaggccggcgccugcaugcucgacgggggcaacaugcuggagaccaucaaggugacgccccagaccauggacggcauccucaagagcauccugaaggugaagcggucccuggggauguucgucagcgacacccccggcgagcgcaaccccuacgagaacauccuguacaagaucugccucuccggggacggcuggccguacaucgccagccggaccuccaucguggggcgcgcgugggagaacacgaccguggaccuggagagcgacggcaagccccagaaggucggcuccgccgggagcaacaagucccugcagagcgccggcuuccccaccgggcucaccuacucccagcugaugacgcugaaggacagcaugaugcagcuggaccccuccgccaagaccuggaucgacaucgagggccggccggaggaccccguggagaucgcccucuaccagcccaugagcgggugcuacauccacuucuuccgcgagcccaccgaccugaagcaguucaagcaggacgcgaaguacucccacggcaucgacgucgccgaccuguucccggcccagcccggccucaccagcgccgugaucgaggcccugccccggaacauggugcugacgugccaggggagcgacgacaucaagcgccuccuggacucccagggccgccgggacaucaagcugaucgacaucgcgcucagcaaggccgacucccgccgguucgagaacgccgucugggaccagugcaaggaccugugccacaugcacaccggggugguggucgagaagaagaagcgcggcgggaaggaggagaucacgccccacugcgcccugauggacugcaucauguacgacgccgcggugagcggcggccucaacaucccggugcugcgggccguccugccccgcgacaugguguuccggaccuccagccccaaggugguccucugaggacuagucccuguucccagagcccacuuuuuuuucuuuuuuugaaauaaaauagccugucuuucagaucucaaaggcucuuuucagagccaccaaaaaaaaaaaaaaaaaaaaaaaaaaaaaaaaaaaaaaaaaaaaaaaaaaaaaaaaaaaaaaaaaaaaaaaaaaaaaaaaaaaaaaaaaaaaaaaaaaaaa

SEQ ID NO: 20936 - RNA, 2033 nt, Artificial Sequence
  mRNA product Design a-1 (hSL-A100) comprising derived and/or modified sequence from LASV(ISTH2010-NIG-2012;Clade II)__AIT17483__SP-IgE_NP(2-569) (opt1)
aggagagucccgcagucggcguccagcggcucugcuuguucgugugugugucguugcaggccuuauucaagcuuaccauggacuggaccuggauccuguuccucguggccgccgcgacccgcguccacagcagcgccuccaaggaggugaaguccuuccuguggacccagagccuccgccgggagcugagcggcuacugcuccaacaucaagcugcaggucgugaaggacgcccaggcgcuccugcacgggcuggacuucagcgagguguccaacguccagcgccucaugcggaagcagaagcgcgacgacagcgaccugaagcggcugcgcgaccucaaccaggccgugaacaaccugguggagcugaaguccacccagcagaaguccauccuccgggucggcacgcugaccagcgacgaccugcucacccuggccgccgaccuggagaagcucaagagcaaggugauccgcaccgagcggccccuguccagcgggguguacaugggcaaccuguccacgcagcagcucgagcagcgccgggcccugcugaaccucaucgggauggucggcggcgcgcaggggacccagccgggccgcgacgggguggugcgggucugggacgugaagaaccccgaccugcugaacaaccaguucggcaccaugcccagccucacccuggccugccugacgaagcagggccagguggaccucaacgacgccguccuggcccugaccgaccucgggcugaucuacaccgcgaaguaccccaacuccagcgaccuggaccgccucucccagagccacccgauccugaacaugguggacaccaagaaguccagccugaacaucagcggcuucaacuucucccucggggccgccgugaaggccggcgccugcaugcuggacgggggcaacaugcuggagacgaucaaggucacgccccagaccauggacggcauccucaagagcauccugaaggugaagaagucccuggggauguucgugagcgacacccccggcgagcggaaccccuacgagaacauccucuacaagaucugccuguccggggacggcuggccguacaucgcgagccgcaccuccaucgucgggcgggccugggagaacaccaccguggaccuggagagcgacggcaagccccacaaggugggcaccgccggguccaacaagagccuccaguccgccggcuuccccacggggcugaccuacagccagcugaugacccugaaggacuccaugaugcagcucgaccccagcgccaagaccuggaucgacaucgagggccgcccggaggaccccgucgagaucgcgcuguaccagcccauguccgggugcuacauccacuucuuccgggagcccacggaccugaagcaguucaagcaggacgccaaguacagccacggcaucgacguggccgaccucuucccggcccagcccggccugaccuccgccgucaucgaggcgcugccccgcaacauggugcugaccugccaggggagcgacgacaucaagcggcuccuggacagccagggccgccgcgacaucaagcucaucgacaucgcccuguccaaggccgacagccggcgcuucgagaacgccgugugggaccagugcaaggaccugugccacaugcacaccggggucgugguggagaagaagaagcggggcgggaaggaggagaucacgccccacugcgcccucauggacugcaucauguacgacgcggccgucuccggcggccugaacaucccggugcugcgcgccgugcucccccgggacauggucuuccgcaccagcucccccaagguggugcugugaggacuagucccuguucccagagcccacuuuuuuuucuuuuuuugaaauaaaauagccugucuuucagaucucaaaggcucuuuucagagccaccaaaaaaaaaaaaaaaaaaaaaaaaaaaaaaaaaaaaaaaaaaaaaaaaaaaaaaaaaaaaaaaaaaaaaaaaaaaaaaaaaaaaaaaaaaaaaaaaaaaaa

SEQ ID NO: 20937 - RNA, 2033 nt, Artificial Sequence
  mRNA product Design a-1 (hSL-A100) comprising derived and/or modified sequence from LASV(Lassa virus/H.sapiens-wt/NGA/2015/ISTH_0543;Clade II)__AVO03640__SP-IgE_NP(2-569) (opt1)
aggagagucccgcagucggcguccagcggcucugcuuguucgugugugugucguugcaggccuuauucaagcuuaccauggacuggaccuggauccuguuccucguggccgccgcgacccgcguccacagcagcgccuccaaggaggugaaguccuuccuguggacccagagccuccgccgggagcugagcggcuacugcuccaacaucaagcugcaggucgugaaggacgcccaggcgcuccugcacgggcuggacuucagcgagguguccaacguccagcgccucaugcggaagcagaagcgcgacgacagcgaccugaagcggcugcgcgaccucaaccaggccgugaacaaccugguggagcugaaguccacccagcagaaguccauccuccgggucggcacgcugaccagcgacgaccugcucacccuggccgccgaccuggagaagcucaagagcaaggugauccgcaccgagcggccccuguccagcgggguguacaugggcaaccuguccacgcagcagcucgagcagcgccgggcccugcugaacaugaucgggauggucggcggcgcgcaggggacccagccgggccgcgacgggguggugcgggucugggacgugaagaaccccgaccuccugaacaaccaguucggcaccaugcccagccugacccucgccugccugacgaagcagggccagguggaccugaacgacgccguccucgcccugaccgaccuggggcucaucuacaccgcgaaguaccccaacuccagcgaccuggaccgccugucccagagccacccgauccucaacaugguggacaccaagaaguccagccugaacaucagcggcuacaacuucucccugggggccgccgugaaggccggcgccugcaugcucgacgggggcaacaugcuggagacgaucaaggucacgccccagaccauggacggcauccucaagagcauccugaaggugaagaagucccuggggauguucgugagcgacacccccggcgagcggaaccccuacgagaacauccuguacaagaucugccucuccggggacggcuggccguacaucgcgagccgcaccuccaucgucgggcgggccugggagaacaccaccguggaccuggagagcgacggcaagccccagaaggugggcuccgccgggagcaacaagucccugcagagcgccggcuuccccaccgggcucacguacucccagcugaugacccugaaggacagcaugaugcagcuggaccccuccgccaagaccuggaucgacaucgagggccgcccggaggaccccgucgagaucgcgcucuaccagcccaugagcgggugcuacauccacuucuuccgggagcccaccgaccugaagcaguucaagcaggacgccaaguacucccacggcaucgacguggccgaccuguucccggcccagcccggccucacgagcgccgucaucgaggcgcugccccgcaacauggugcugaccugccaggggagcgacgacaucaagcggcuccuggacucccagggccgcaaggacaucaagcugaucgacaucgcccucagcaaggccgacucccgccgguucgagaacgccgugugggaccagugcaaggaccugugccacaugcacaccggggucgugguggagaagaagaagcgcggcgggaaggaggagaucacgccccacugcgcccugauggacugcaucauguacgacgcggccgucagcggcggccucaacaucccggugcugcgggccgugcugccccgcgacauggucuuccggaccuccagccccaagguggugcucugaggacuagucccuguucccagagcccacuuuuuuuucuuuuuuugaaauaaaauagccugucuuucagaucucaaaggcucuuuucagagccaccaaaaaaaaaaaaaaaaaaaaaaaaaaaaaaaaaaaaaaaaaaaaaaaaaaaaaaaaaaaaaaaaaaaaaaaaaaaaaaaaaaaaaaaaaaaaaaaaaaaaa

SEQ ID NO: 20938 - RNA, 2033 nt, Artificial Sequence
  mRNA product Design a-1 (hSL-A100) comprising derived and/or modified sequence from LASV(Lassa virus/H.sapiens-wt/NGA/2016/ISTH_0009;Clade II)__AVO03572__SP-IgE_NP(2-569) (opt1)
aggagagucccgcagucggcguccagcggcucugcuuguucgugugugugucguugcaggccuuauucaagcuuaccauggacuggaccuggauccuguuccucguggccgccgcgacccgcguccacagcagcgccuccaaggaggugaaguccuuccuguggacccagagccuccgccgggagcugagcggcuacugcuccaacaucaagcugcaggucgugaaggacgcccaggcgcuccugcacgggcuggacuucagcgagguguccaacguccagcgccucaugcggaagcagaagcgcgacgacagcgaccugaagcggcugcgcgaccucaaccaggccgugaacaaccugguggagcugaaguccacccagcagaaguccauccuccgggucggcacgcugaccagcgacgaccugcucacccuggccgccgaccuggagaagcucaagagcaaggugauccgcaccgagcggccccuguccagcgggguguacaugggcaaccuguccacgcagcagcucgagcagcgccgggcccugcugaacaugaucgggauggucggcggcgcgcaggggacccagccgggccgcgacgggguggugcgggucugggacgugaagaaccccgaccuccugaacaaccaguucggcaccaugcccagccugacccucgccugccugacgaagcagggccagguggaccugaacgacgccguccucgcccugaccgaccuggggcucaucuacaccgcgaaguaccccaacuccagcgaccuggaccgccugucccagagccacccgauccucaacaugguggacaccaagaaguccagccugaacaucagcggcuacaacuucucccugggggccgccgugaaggccggcgccugcaugcucgacgggggcaacaugcuggagacgaucaaggucacgccccagaccauggacggcauccucaagagcauccugaaggugaagaagucccuggggauguucgugagcgacacccccggcgagcggaaccccuacgagaacauccuguacaagaucugccucuccggggacggcuggccguacaucgcgagccgcaccuccaucgucgggcgggccugggagaacaccaccguggaccuggagagcgacggcaagccccagaaggugggcuccgccgggagcaacaagucccugcagagcgccggcuuccccaccgggcucacguacucccagcugaugacccugaaggacagcaugaugcagcuggaccccuccgccaagaccuggaucgacaucgagggccgcccggaggaccccgucgagaucgcgcucuaccagcccaugagcgggugcuacauccacuucuuccgggagcccaccgaccugaagcaguucaagcaggacgccaaguacucccacggcaucgacguggccgaccuguucccggcccagcccggccucacgagcgccgucaucgaggcgcugccccgcaacauggugcugaccugccaggggagcgacgacaucaagcggcuccuggacucccagggccgccgcgacaucaagcugaucgacaucgcccucagcaaggccgacucccggcgcuucgagaacgccgugugggaccagugcaaggaccugugccacaugcacaccggggucgugguggagaagaagaagcggggcgggaaggaggagaucacgccccacugcgcccugauggacugcaucauguacgacgcggccgucagcggcggccucaacaucccggugcugcgcgccgugcugccccgggacauggucuuccgcaccuccagccccaagguggugcucugaggacuagucccuguucccagagcccacuuuuuuuucuuuuuuugaaauaaaauagccugucuuucagaucucaaaggcucuuuucagagccaccaaaaaaaaaaaaaaaaaaaaaaaaaaaaaaaaaaaaaaaaaaaaaaaaaaaaaaaaaaaaaaaaaaaaaaaaaaaaaaaaaaaaaaaaaaaaaaaaaaaaa

SEQ ID NO: 20939 - RNA, 2033 nt, Artificial Sequence
  mRNA product Design a-1 (hSL-A100) comprising derived and/or modified sequence from LASV(Lassa virus/H.sapiens-wt/NGA/2016/ISTH_0017;Clade II)__AVO03568__SP-IgE_NP(2-569) (opt1)
aggagagucccgcagucggcguccagcggcucugcuuguucgugugugugucguugcaggccuuauucaagcuuaccauggacuggaccuggauccuguuccucguggccgccgcgacccgcguccacagcagcgccuccaaggaggugaaguccuuccuguggacccagagccuccgccgggagcugagcggcuacugcuccagcaucaagcugcaggucgugaaggacgcccaggcgcuccugcacgggcuggacuucuccgaggugagcaacguccagcgccucaugcggaagcagaagcgcgacgacuccgaccugaagcggcugcgcgaccucaaccaggccgugaacaaccugguggagcucaagagcacccagcagaaguccauccugcgggucggcacgcugaccagcgacgaccugcucacccuggccgccgaccuggagaagcucaaguccaaggugauccgcaccgagcggccccugagcuccgggguguacaugggcaaccugagcacgcagcagcucgagcagcgccgggcccugcugaacaugaucgggauggcgggcggcgcccaggggacccagccgggccgcgacggggucgugcgggugugggacgucaagaaccccgaccuccugaacaaccaguucggcaccaugcccucccugacccucgccugccugacgaagcagggccagguggaccugaacgacgccgugcucgcgcugaccgaccuggggcucaucuacaccgccaaguaccccaacagcuccgaccuggaccgccugagccagagccacccgauccucaacauggucgacaccaagaaguccagccugaacaucuccggcuacaacuucagccugggggccgccgugaaggccggcgcgugcaugcucgacgggggcaacaugcuggagacgaucaaggugacgccccagaccauggacggcauccugaaguccauccucaaggucaagcggagccuggggauguucguguccgacgcccccggcgagcgcaaccccuacgagaacauccuguacaagaucugccucagcggggacggcuggccguacaucgccucccggaccagcaucguggggcgcgccugggagaacaccaccgucgaccuggaguccgacggcaagccccagaaggugggcgccaccgggagcaacaagucccugcagagcgcgggcuuccccaccgggcucacguacucccagcugaugacccugaaggacagcaugaugcagcuggaccccuccgccaagaccuggaucgacaucgagggccggccggaggaccccguggaggucgcccucuaccagcccgugagcgggugcuacauccacuucuuccgcgagcccaccgaccugaagcaguucaagcaggacgccaaguacucccacggcaucgacgucgccgaccuguucccggcgcagcccggccucacgagcgccgugaucgaggcccugccccggaacauggugcugaccugccaggggagcgacgacaucaagaagcuccuggacucccagggccgcaaggacaucaagcugaucgacaucgcccucagcaaggccgacucccgccgguucgagaacgcggucugggaccagugcaaggaccugugccacaugcacaccggggugguggucgagaagaagaagcgcggcgggaaggaggagaucacgccccacugcgcccugauggacugcaucauguacgacgccgccgugagcggcggccucaacaucccggugcugcgggcgguccugccccgcgacaugguguuccggaccuccagccccaaggugguccucugaggacuagucccuguucccagagcccacuuuuuuuucuuuuuuugaaauaaaauagccugucuuucagaucucaaaggcucuuuucagagccaccaaaaaaaaaaaaaaaaaaaaaaaaaaaaaaaaaaaaaaaaaaaaaaaaaaaaaaaaaaaaaaaaaaaaaaaaaaaaaaaaaaaaaaaaaaaaaaaaaaaaa

SEQ ID NO: 20940 - RNA, 2033 nt, Artificial Sequence
  mRNA product Design a-1 (hSL-A100) comprising derived and/or modified sequence from LASV(Lassa virus/H.sapiens-wt/NGA/2018/ISTH_0959;Clade II)__AVV65100__SP-IgE_NP(2-569) (opt1)
aggagagucccgcagucggcguccagcggcucugcuuguucgugugugugucguugcaggccuuauucaagcuuaccauggacuggaccuggauccuguuccucguggccgccgcgacccgcguccacagcagcgccuccaaggaggugaaguccuuccuguggacccagagccuccgccgggagcugagcggcuacugcuccaacaucaagcugcaggucgugaaggacgcccaggcgcuccugcacgggcuggacuucagcgagguguccaacguccagcgccucaugcggaagcagaagcgcgacgacagcgaccugaagcggcugcgcgaccucaaccaggccgugaacaaccugguggagcugaaguccacccagcagaaguccauccuccgggucggcacccugaccagcgacgaccugcucacccuggccgccgaccuggagaagcucaagagcaaggugauccgcaccgagcggccccuguccagcgggguguacaugggcaaccuguccacgcagcagcucgagcagcgccgggcccugcugaaccucaucgggauggucggcggcgcgcaggggacccagccgggccgcgacgggguggugcgggucugggacgugaagaaccccgaccugcugaacaaccaguucggcaccaugcccagccucacccuggccugccugacgaagcagggccagguggaccucaacgacgucgugcuggcccugaccgaccucgggcugaucuacaccgccaaguaccccaacuccagcgaccuggaccgccucucccagagccacccgauccugaacaugguggacaccaagaaguccagccugaacaucagcggcuucaacuucucccucggggcggccgucaaggccggcgccugcaugcuggacgggggcaacaugcuggagacgaucaaggugacgccccagaccauggacggcauccucaagagcauccugaaggugaagaagucccuggggauguucgucagcgacacccccggcgagcggaaccccuacgagaacauccucuacaagaucugccuguccggggacggcuggccguacaucgccagccgcaccuccaucguggggcgggcgugggagaacaccaccguggaccuggagagcgacggcaagccccacaaggucggcaccgccggguccaacaagagccuccaguccgccggcuuccccacggggcugaccuacagccagcugaugacccugaaggacuccaugaugcagcucgaccccagcgccaagaccuggaucgacaucgagggccgcccggaggaccccguggagaucgcccuguaccagcccauguccgggugcuacauccacuucuuccgggagcccacggaccugaagcaguucaagcaggacgcgaaguacagccacggcaucgacgucgccgaccucuucccggcccagcccggccugaccuccgccgugaucgaggcccugccccgcaacauggugcugaccugccaggggagcgacgacaucaagcggcuccuggacagccagggccgcaaggacaucaagcucaucgacaucgcgcuguccaagaccgacagccgccgguucgagaacgccgucugggaccagugcaaggaccugugccacaugcacacgggggugguggucgagaagaagaagcgcggcgggaaggaggagaucacgccccacugcgcccucauggacugcaucauguacgacgccgccguguccggcggccugaacaucccggugcugcgggcgguccucccccgcgacaugguguuccggaccagcucccccaaggugguccugugaggacuagucccuguucccagagcccacuuuuuuuucuuuuuuugaaauaaaauagccugucuuucagaucucaaaggcucuuuucagagccaccaaaaaaaaaaaaaaaaaaaaaaaaaaaaaaaaaaaaaaaaaaaaaaaaaaaaaaaaaaaaaaaaaaaaaaaaaaaaaaaaaaaaaaaaaaaaaaaaaaaaa

SEQ ID NO: 20941 - RNA, 2033 nt, Artificial Sequence
  mRNA product Design a-1 (hSL-A100) comprising derived and/or modified sequence from LASV(LASV003-NIG-2008;Clade II)__AIT17581__SP-IgE_NP(2-569) (opt1)
aggagagucccgcagucggcguccagcggcucugcuuguucgugugugugucguugcaggccuuauucaagcuuaccauggacuggaccuggauccuguuccucguggccgccgcgacccgcguccacagcagcgccuccaaggaggugaaguccuuccuguggacccagagccuccgccgggagcugagcggcuacugcuccagcaucaagcugcaggucgugaaggacgcccaggcgcuccugcacgggcuggacuucuccgaggugagcaacguccagcgccucaugcggaagcagaagcgcgacgacuccgaccugaagcggcugcgcgaccucaaccaggccgugaacaaccugguggagcucaagagcacccagcagaaguccguccugcgggugggcacccugaccagcgacgaccugcucacccuggccgccgaccuggagaagcucaaguccaaggugauccgcaccgagcggccccugagcuccggggucuacaugggcaaccugagcgcccagcagcucgagcagcgccggacgcugcugaacaugaucgggauggugggcggcgcgcaggggacccagccgggccgcgacggggugguccgggugugggacgugaagaaccccgaccuccugaacaaccaguucggcaccaugcccucccugacccucgccugccugacgaagcaggggcaggucgaccugaacgacguggugcucgcccugaccgaccugggccucaucuacaccgccaaguaccccaacagcuccgaccuggaccgccugagccagagccacccgauccucuccauggucgacaccaagaaguccagccugaacaucagcggcuacaacuucucccugggggcggccgugaaggccggcgccugcaugcucgacgggggcaacaugcuggagacgaucaaggugacgccccagaccauggacggcauccucaagagcauccugaaggucaagaagucccuggggauguucgugagcgacacccccggcgagcggaaccccuacgagaacauccuguacaagaucugccucuccggggacggcuggccguacaucgccagccgcaccuccaucguggggcgggcgugggagaacaccaccgucgaccuggagagcgacggcaagccccagaaggugggcaccgccggguccaacaagagccugcaguccgccggcuuccccacggggcucaccuacagccagcugaugacccugaaggacuccaugaugcagcuggaccccagcgccaagaccuggaucgacaucgagggccgcccggaggaccccgucgagaucgcccucuaccagcccauguccgggugcuacauccacuucuuccgggagcccacggaccugaagcaguucaagcaggacgcgaaguacagccacggcaucgacgugaccgaccuguucccggcccagcccggccucaccagcgccgugaucgaggcccugccccgcaacaugguccugaccugccagggguccgacgacaucaagcggcuccuggacagccagggccgccgcgacaucaagcugaucgacaucgcccucuccaaggcggacagccggcgcuucgagaacgccgugugggaccagugcaaggaccugugccacaugcacacggggguggucguggagaagaagaagcggggcgggaaggaggagaucacgccccacugcgcccugauggacugcaucauguacgacgccgccguguccggcggccucaacaucccgguccugcgcgcggugcugccccgggacaugguguuccgcaccagcucccccaaggucgugcucugaggacuagucccuguucccagagcccacuuuuuuuucuuuuuuugaaauaaaauagccugucuuucagaucucaaaggcucuuuucagagccaccaaaaaaaaaaaaaaaaaaaaaaaaaaaaaaaaaaaaaaaaaaaaaaaaaaaaaaaaaaaaaaaaaaaaaaaaaaaaaaaaaaaaaaaaaaaaaaaaaaaaa

SEQ ID NO: 20942 - RNA, 2033 nt, Artificial Sequence
  mRNA product Design a-1 (hSL-A100) comprising derived and/or modified sequence from LASV(LASV035-NIG-2009;Clade II)__AIT17589__SP-IgE_NP(2-569) (opt1)
aggagagucccgcagucggcguccagcggcucugcuuguucgugugugugucguugcaggccuuauucaagcuuaccauggacuggaccuggauccuguuccucguggccgccgcgacccgcguccacagcagcgccuccaaggaggugaaguccuuccuguggacccagagccuccgccgggagcugagcggcuacugcuccagcaucaagcugcaggucgugaaggacgcccaggcgcuccugcacgggcuggacuucuccgaggugagcaacguccagcgccucaugcggaagcagaagcgcgacgacuccgaccugaagcggcugcgcgaccucaaccaggccgugaacaaccugguggagcucaagagcacccagcagaaguccauccugcgggucggcacgcugaccagcgacgaccugcucacccuggccgccgaccuggagaagcucaaguccaaggugauccgcaccgagcggccccugagcuccgggguguacaugggcaaccugagcgcccagcagcucgagcagcgccgggcgcugcugaacaugaucgggauggucggcggcgcccaggggacgcagccgggccgcgacgggguggugcgggucugggacgugaagaaccccgaccuccugaacaaccaguucggcaccaugcccucccugacccucgccugccugaccaagcagggccagguggaccugaacgacgccguccucgcgcugacggaccuggggcucaucuacaccgccaaguaccccaacagcuccgaccuggaccgccugagccagagccacccgauccucaacaugguggacaccaagaaguccagccugaacaucuccggcuacaacuucagccugggggccgccgugaaggccggcgcgugcaugcucgacgggggcaacaugcuggagaccaucaaggucacgccccagaccauggacggcauccugaaguccauccucaaggugaagcggagccuggggauguucguguccgacacccccggcgagcgcaaccccuacgagaacauccuguacaagaucugccucagcggggacggcuggccguacaucgccucccggaccagcaucgucgggcgcgccugggagaacacgaccguggaccuggaguccgacggcaagccccagaaggugggcaccaccgggagcaacaagucccugcagagcgccggcuuccccacggggcucaccuacucccagcugaugacccugaaggacagcaugaugcagcuggaccccuccgccaagaccuggaucgacaucgagggccggccggaggaccccgucgagaucgcgcucuaccagcccaugagcgggugcuacauccacuucuuccgcgagcccacggaccugaagcaguucaagcaggacgccaaguacucccacggcaucgacguggccgaccuguucccggcccagcccggccucaccagcgccgucaucgaggcgcugccccggaacauggugcugaccugccaggggagcgacgacaucaagaagcuccuggacucccagggccgccgcgacaucaagcugaucgacaucgcccucagcaaggccgacucccggaaguucgagaacgccgugugggaccagugcaaggaccugugccacaugcacaccggggucgugguggagaagaagaagcgcggcgggaaggaggagaucacgccccacugcgcccugauggacugcaucauguacgacgcggccgucagcggcggccucaacaucccggugcugcgggccgugcugccccgcgacauggucuuccggaccuccagccccaagguggugcucugaggacuagucccuguucccagagcccacuuuuuuuucuuuuuuugaaauaaaauagccugucuuucagaucucaaaggcucuuuucagagccaccaaaaaaaaaaaaaaaaaaaaaaaaaaaaaaaaaaaaaaaaaaaaaaaaaaaaaaaaaaaaaaaaaaaaaaaaaaaaaaaaaaaaaaaaaaaaaaaaaaaaa

SEQ ID NO: 20943 - RNA, 2033 nt, Artificial Sequence
  mRNA product Design a-1 (hSL-A100) comprising derived and/or modified sequence from LASV(LASV1000-NIG-2009;Clade II)__AIT17783__SP-IgE_NP(2-569) (opt1)
aggagagucccgcagucggcguccagcggcucugcuuguucgugugugugucguugcaggccuuauucaagcuuaccauggacuggaccuggauccuguuccucguggccgccgcgacccgcguccacagcagcgccuccaaggaggugaaguccuuccuguggacccagagccuccgccgggagcugagcggcuacugcuccaacaucaagcugcaggucgugaaggacgcccaggcgcuccugcacgggcuggacuucagcgagguguccaacguccagcgccucaugcggaagcagaagcgcgacgacagcgaccugaagcggcugcgcgaccucaaccaggccgugaacaaccugguggagcugaaguccacccagcagaaguccauccuccgggucggcacgcugaccagcgacgaccugcucacccuggccgccgaccuggagaagcucaagagcaaggugauccgcaccgagcggccccuguccagcgggguguacaugggcaaccuguccacgcagcagcucgagcagcgccgggcccugcugaacaugaucgggauggucggcggcgcgcaggggacccagccgggccgcgacgggguggugcgggucugggacgugaagaaccccgaccuccugaacaaccaguucggcaccaugcccagccugacccucgccugccugacgaagcagggccagguggaccugaacgacgucgugcucgcccugaccgaccuggggcucaucuacaccgccaaguaccccaacuccagcgaccuggaccgccugucccagagccacccgauccucaacaugguggacaccaagaaguccagccugaacaucagcggcuacaacuucucccugggggcggccgucaaggccggcgccugcaugcucgacgggggcaacaugcuggagacgaucaaggugacgccccagaccauggacggcauccucaagagcauccugaaggugaagaagucccuggggauguucgucagcgacacccccggcgagcggaaccccuacgagaacauccuguacaagaucugccucuccggggacggcuggccguacaucgccagccgcaccuccaucguggggcgggcgugggagaacaccaccguggaccuggagagcgacggcaagccccagaaggucggcaccgccggguccaacaagagccugcaguccgccggcuuccccacggggcucaccuacagccagcugaugacccugaaggacuccaugaugcagcuggaccccagcgccaagaccuggaucgacaucgagggccgcccggaggaccccguggagaucgcccucuaccagcccgucuccgggugcuacauccacuucuuccgggagcccacggaccugaagcaguucaagcaggacgcgaaguacagccacggcaucgacguggccgaccuguucccggcccagcccggccucaccuccgccgugaucgaggcccugccccgcaacaugguccugaccugccaggggagcgacgacaucaagcggcuccuggacagccagggccgccgcgacaucaagcugaucgacaucgcgcucuccaaggccgacagccggcgcuucgagaacgccgugugggaccagugcaaggaccugugccacaugcacaccgggguggucguggagaagaagaagcggggcgggaaggaggagaucacgccccacugcgcccugauggacugcaucauguacgacgccgcgguguccggcggccucaacaucccgguccugcgcgccgugcugccccgggacaugguguuccgcaccagcucccccaaggucgugcucugaggacuagucccuguucccagagcccacuuuuuuuucuuuuuuugaaauaaaauagccugucuuucagaucucaaaggcucuuuucagagccaccaaaaaaaaaaaaaaaaaaaaaaaaaaaaaaaaaaaaaaaaaaaaaaaaaaaaaaaaaaaaaaaaaaaaaaaaaaaaaaaaaaaaaaaaaaaaaaaaaaaaa

SEQ ID NO: 20944 - RNA, 2033 nt, Artificial Sequence
  mRNA product Design a-1 (hSL-A100) comprising derived and/or modified sequence from LASV(LASV221-NIG-2010;Clade II)__AIT17625__SP-IgE_NP(2-569) (opt1)
aggagagucccgcagucggcguccagcggcucugcuuguucgugugugugucguugcaggccuuauucaagcuuaccauggacuggaccuggauccuguuccucguggccgccgcgacccgcguccacagcagcgccuccaaggaggugaaguccuuccuguggacccagagccuccgccgggagcugagcggcuacugcuccagcaucaagcugcaggucgugaaggacgcccaggcgcuccugcacgggcuggacuucuccgaggugagcaacguccagcgccucaugcggaagcagcgccgggacgacuccgaccugaagcgccugcgggaccucaaccaggccgugaacaaccugguggagcucaagagcacccagcagaaguccauccugcgcgucggcacgcugaccagcgacgaccugcucacccuggccgccgaccuggagaagcucaaguccaaggugauccggaccgagcgcccccugagcuccgggguguacaugggcaaccugagcacgcagcagcucgagcagcggcgcgcccugcugaacaugaucgggauggucggcggcgcgcaggggacccagccgggccgggacgggguggugcgcgucugggacgugaagaaccccgaccuccugaacaaccaguucggcaccaugcccucccugacccucgccugccugacgaagcagggccagguggaccugaacgacgccguccucgcccugaccgaccuggggcucaucuacaccgcgaaguaccccaacagcuccgaccuggaccggcugagccagagccacccgauccucaacaugguggacaccaagaaguccagccugaacaucuccggcuacaacuucagccugggggccgccgugaaggccggcgccugcaugcucgacgggggcaacaugcuggagacgaucaaggucacgccccagaccguggacggcauccugaaguccauccucaaggugaagcgcagccuggggauguucgucuccgacacccccggcgagcggaaccccuacgagaacauccuguacaagaucugccucagcggggacggcuggccguacaucgcgucccgcaccagcaucguggggcgggccugggagaacaccaccguggaccuggaguccgacggcaagccccagaaggucggcaccgccgggagcaacaagucccugcagagcgccggcuuccccacggggcucaccuacucccagcugaugacccugaaggacagcaugaugcagcuggaccccuccgccaagaccuggaucgacaucgagggccgcccggaggaccccguggagaucgcgcucuaccagcccaugagcgggugcuacauccacuucuuccgggagcccacggaccugaagcaguucaagcaggacgccaaguacucccacggcaucgacgucgccgaccuguucccggcccagcccggccucaccagcgccgugaucgaggcgcugccccgcaacauggugcugaccugccaggggagcgacgacaucaagcgccuccuggacucccagggccggcgcgacaucaagcugaucgacaucgcccucagcaaggccgacucccggaaguucgagaacgccgucugggaccagugcaaggaccugugccacaugcacaccggggugguggucgagaagaagaagcgcggcgggaaggaggagaucacgccccacugcgcccugauggacugcaucauguacgacgcggccgugagcggcggccucaacaucccggugcugcgggccguccugccccgcgacaugguguuccggaccuccagccccaaggugguccucugaggacuagucccuguucccagagcccacuuuuuuuucuuuuuuugaaauaaaauagccugucuuucagaucucaaaggcucuuuucagagccaccaaaaaaaaaaaaaaaaaaaaaaaaaaaaaaaaaaaaaaaaaaaaaaaaaaaaaaaaaaaaaaaaaaaaaaaaaaaaaaaaaaaaaaaaaaaaaaaaaaaaa

SEQ ID NO: 20945 - RNA, 2033 nt, Artificial Sequence
  mRNA product Design a-1 (hSL-A100) comprising derived and/or modified sequence from LASV(LASV237-NIG-2010;Clade II)__AIT17639__SP-IgE_NP(2-569) (opt1)
aggagagucccgcagucggcguccagcggcucugcuuguucgugugugugucguugcaggccuuauucaagcuuaccauggacuggaccuggauccuguuccucguggccgccgcgacccgcguccacagcagcgccuccaaggaggugaaguccuuccuguggacccagagccuccgccgggagcugagcggcuacugcuccaacaucaagcugcaggucgugaaggacgcccaggcgcuccugcacgggcuggacuucagcgagguguccaacguccagcgccucaugcggaagcagaagcgcgacgacagcgaccugaagcggcugcgcgaccucaaccaggccgugaacaaccugguggagcugaaguccacccagcagaaguccauccuccgggucggcacccugaccagcgacgaccugcucacccuggccgccgaccuggagaagcucaagagcaaggugauccgcaccgagcggccccuguccagcgggguguacaugggcaaccuguccacgcagcagcucgagcagcgccgggcccugcugaacaugaucgggauggucggcggcgcgcaggggacccagccgggccgcgacgggguggugcgggucugggacgugaagaaccccgaccuccugaacaaccaguucggcaccaugcccagccugacccucgccugccugacgaagcagggccagguggaccugaacgacgccguccucgcccugaccgaccuggggcucaucuacaccgcgaaguaccccaacuccagcgaccuggaccgccugucccagagccacccgauccucaacaugguggacaucaagaaguccagccugaacaucagcggcuacaacuucucccugggggccgccgugaaggccggcgccugcaugcucgacgggggcaacaugcuggagaccaucaaggucacgccccagaccauggacggcauccucaagagcauccugaaggugaagcggucccuggggauguucgugagcgacacccccggcgagcgcaaccccuacgagaacauccuguacaagaucugccucuccggggacggcuggccguacaucgcgagccggaccuccaucgucgggcgcgccugggagaacacgaccguggaccuggagagcgacggcaagccccagaaggugggcuccgccgggagcaacaagucccugcagagcgccggcuuccccaccgggcucaccuacucccagcugaugacgcugaaggacagcaugaugcagcuggaccccuccgccaagaccuggaucgacaucgagggccggccggaggaccccgucgagaucgcgcucuaccagcccaugagcgggugcuacauccacuucuuccgcgagcccaccgaccugaagcaguucaagcaggacgccaaguacucccacggcaucgacguggccgaccuguucccggcccagcccggccucaccagcgccgucaucgaggcgcugccccggaacauggugcugacgugccaggggagcgacgacaucaagcgccuccuggacucccagggccgccgggacaucaagcugaucgacaucgcccucagcaaggccgacucccgccgguucgagaacgccgugugggaccagugcaaggaccugugccacaugcacaccggggucgugguggagaagaagaagcgcggcgggaaggaggagaucacgccccacugcgcccugauggacugcaucauguacgacgcggccgucagcggcggccucaacaucccggugcugcgggccgugcugccccgcgacauggucuuccggaccuccagccccaagguggugcucugaggacuagucccuguucccagagcccacuuuuuuuucuuuuuuugaaauaaaauagccugucuuucagaucucaaaggcucuuuucagagccaccaaaaaaaaaaaaaaaaaaaaaaaaaaaaaaaaaaaaaaaaaaaaaaaaaaaaaaaaaaaaaaaaaaaaaaaaaaaaaaaaaaaaaaaaaaaaaaaaaaaaa

SEQ ID NO: 20946 - RNA, 2033 nt, Artificial Sequence
  mRNA product Design a-1 (hSL-A100) comprising derived and/or modified sequence from LASV(LASV253-NIG-2011;Clade II)__AIT17671__SP-IgE_NP(2-569) (opt1)
aggagagucccgcagucggcguccagcggcucugcuuguucgugugugugucguugcaggccuuauucaagcuuaccauggacuggaccuggauccuguuccucguggccgccgcgacccgcguccacagcagcgccuccaaggaggugaaguccuuccuguggacccagagccuccgccgggagcugagcggcuacugcuccagcaucaagcugcaggucgugaaggacgcccaggcgcuccugcacgggcuggacuucuccgaggugagcaacguccagcgccucaugcggaagcagaagcgcgacgacuccgaccugaagcggcugcgcgaccucaaccaggccgugaacaaccugguggagcucaagagcacccagcagaaguccguccugcgggugggcacccugaccagcgacgaccugcucacccuggccgccgaccuggagaagcucaaguccaaggugauccgcaccgagcggccccugagcuccggggucuacaugggcaaccugagcacgcagcagcucgagcagcgccgggcccugcugaacaugaucgggauggugggcggcgcgcaggggacccagccgggccgcgacggggugguccgggugugggacgugaagaaccccgaccuccugaacaaccaguucggcaccaugcccucccugacccucgccugccugacgaagcaggggcaggucgaccugaacgacguggugcucgcccugaccgaccugggccucaucuacaccgccaaguaccccaacagcuccgaccuggaccgccugagccagagccacccgauccucaacauggucgacaccaagaaguccagccugaacaucuccggcuacaacuucagccugggggcggccgugaaggccggcgccugcaugcucgacgggggcaacaugcuggagacgaucaaggugacgccccagaccauggacggcauccugaaguccauccucaaggucaagaagucccuggggauguucgugagcgacacccccggcgagcggaaccccuacgagaacauccuguacaagaucugccucagcggggacggcuggccguacaucgccucccgcaccagcaucguggggcgggcgugggagaacaccaccgucgaccuggaguccgacggcaagccccagaaggugggcaccgccgggagcaacaagucccugcagagcgccggcuuccccacggggcucaccuacucccagcugaugacccugaaggacagcaugaugcagcuggaccccuccgccaagaccuggaucgacaucgagggccgcccggaggaccccgucgagaucgcccucuaccagcccaugagcgggugcuacauccacuucuuccgggagcccacggaccugaagcaguucaagcaggacgcgaaguacucccacggcaucgacgugaccgaccuguucccggcccagcccggccucaccagcgccgugaucgaggcccugccccgcaacaugguccugaccugccaggggagcgacgacaucaagcggcuccuggacucccagggccgccgcgacaucaagcugaucgacaucgcccucagcaaggcggacucccggcgcuucgagaacgccgugugggaccagugcaaggaccugugccacaugcacacggggguggucguggagaagaagaagcggggcgggaaggaggagaucacgccccacugcgcccugauggacugcaucauguacgacgccgccgugagcggcggccucaacaucccgguccugcgcgcggugcugccccgggacaugguguuccgcaccuccagccccaaggucgugcucugaggacuagucccuguucccagagcccacuuuuuuuucuuuuuuugaaauaaaauagccugucuuucagaucucaaaggcucuuuucagagccaccaaaaaaaaaaaaaaaaaaaaaaaaaaaaaaaaaaaaaaaaaaaaaaaaaaaaaaaaaaaaaaaaaaaaaaaaaaaaaaaaaaaaaaaaaaaaaaaaaaaaa

SEQ ID NO: 20947 - RNA, 2033 nt, Artificial Sequence
  mRNA product Design a-1 (hSL-A100) comprising derived and/or modified sequence from LASV(LASV254-NIG-2011;Clade II)__AIT17675__SP-IgE_NP(2-569) (opt1)
aggagagucccgcagucggcguccagcggcucugcuuguucgugugugugucguugcaggccuuauucaagcuuaccauggacuggaccuggauccuguuccucguggccgccgcgacccgcguccacagcagcgccuccaaggaggugaaguccuuccuguggacccagagccuccgccgggagcugagcggcuacugcuccagcaucaagcugcaggucgugaaggacgcccaggcgcuccugcacgggcuggacuucuccgaggugagcaacguccagcgccucaugcggaagcagaagcgcgacgacuccgaccugaagcggcugcgcgaccucaaccaggccgugaacaaccugguggagcucaagagcacccagcagaaguccguccugcgggugggcacgcugaccagcgacgaccugcucacccuggccgccgaccuggagaagcucaaguccaaggugauccgcaccgagcggccccugagcuccggggucuacaugggcaaccugagcacgcagcagcucgagcagcgccgggcccugcugaacaugaucgggauggugggcggcgcgcaggggacccagccgggccgcgacggggugguccgggugugggacgugaagaaccccgaccuccugaacaaccaguucggcaccaugcccucccugacccucgccugccugacgaagcaggggcaggucgaccugaacgacgccgugcucgcccugaccgaccugggccucaucuacaccgcgaaguaccccaacagcuccgaccuggaccgccugagccagagccacccgauccucaacaugguggacaccaagaaguccagccugaacaucuccggcuacaacuucagccugggggccgccgucaaggccggcgccugcaugcucgacgggggcaacaugcuggagacgaucaaggugacgccccagaccauggacggcauccugaaguccauccucaaggugaagaagucccuggggauguucgucagcgacacccccggcgagcggaaccccuacgagaacauccuguacaagaucugccucagcggggacggcuggccguacaucgcgucccgcaccagcaucguggggcgggccugggagaacaccaucguggaccuggaguccgacggcaagccccagaaggucggcaccgccgggagcaacaagucccugcagagcgccggcuuccccaccgggcucacguacucccagcugaugacccugaaggacagcaugaugcagcuggaccccuccgccaagaccuggaucgacaucgagggccgcccggaggaccccguggagaucgcgcucuaccagcccaugagcgggugcuacauccacuucuuccgggagcccaccgaccugaagcaguucaagcaggacgccaaguacucccacggcaucgacgucgccgaccuguucccggcccagcccggccucacgagcgccgugaucgaggcgcugccccgcaacauggugcugaccugccaggggagcgacgacaucaagcggcuccuggacucccagggccgccgcgacaucaagcugaucgacaucgcccucagcaaggccgacucccggcgcuucgagaacgccgucugggaccagugcaaggaccugugccacaugcacaccggggugguggucgagaagaagaagcggggcgggaaggaggagaucacgccccacugcgcccugauggacugcaucauguacgacgcggccgugagcggcggccucaacaucccggugcugcgcgccguccugccccgggacaugguguuccgcaccuccagccccaaggugguccucugaggacuagucccuguucccagagcccacuuuuuuuucuuuuuuugaaauaaaauagccugucuuucagaucucaaaggcucuuuucagagccaccaaaaaaaaaaaaaaaaaaaaaaaaaaaaaaaaaaaaaaaaaaaaaaaaaaaaaaaaaaaaaaaaaaaaaaaaaaaaaaaaaaaaaaaaaaaaaaaaaaaaa

SEQ ID NO: 20948 - RNA, 2033 nt, Artificial Sequence
  mRNA product Design a-1 (hSL-A100) comprising derived and/or modified sequence from LASV(Nig08-04;Clade II)__ADU56611__SP-IgE_NP(2-569) (opt1)
aggagagucccgcagucggcguccagcggcucugcuuguucgugugugugucguugcaggccuuauucaagcuuaccauggacuggaccuggauccuguuccucguggccgccgcgacccgcguccacagcagcgccuccaaggaggugaaguccuuccuguggacccagagccuccgccgggagcugagcggcuacugcuccaacaucaagcugcaggucgugaaggacgcccaggcgcuccugcacgggcuggacuucagcgagguguccaacguccagcgccucaugcggaagcagaagcgcgacgacggcgaccugaagcggcugcgcgaccucaaccaggccgugaacaaccugguggagcucaagagcacccagcagaaguccguccugcggguggggacccugaccagcgacgaccugcucacccuggccgccgaccuggagaagcucaaguccaaggugauccgcaccgagcggccccugagcuccggcgucuacauggggaaccugagcacgcagcagcucgagcagcgcaaggcccugcuguccaugaucggcauggugggcggggcgcagggcacccagccggggcgggacggcgugguccgcgugugggacgugaagaaccccgaccuccugaacaaccaguucgggaccaugcccagccugacccucgccugccugacgaagcagggccaggucgaccugaacgacgccgugcucgcccugaccgaccugggccucaucuacaccgcgaaguaccccaacuccagcgaccuggaccggcugucccagagccacccgauccucaacaugguggacaccaagaaguccagccugaacaucagcggguacaacuucucccugggcgccgccgucaaggccggggccugcaugcucgacggcggcaacaugcuggagacgaucaaggugacgccccagaccauggacgggauccucaagagcauccugaaggugaagcgcucccugggcauguucgucagcgacacccccggggagcggaaccccuacgagaacauccuguacaagaucugccucuccggcgacggguggccguacaucgcgagccgcaccuccaucgugggccgggccugggagaacaccaccguggaccuggagagcgacggcaagccccagaaggucgggaccgccggcuccaacaagagccugcaguccgccggguuccccacgggccucaccuacagccagcugaugacccugaaggacuccaugaugcagcuggaccccagcgccaagaccuggaucgacaucgaggggcgcccggaggaccccguggagaucgcgcucuaccagcccauguccggcugcuacauccacuucuuccgggagcccacggaccugaagcaguucaagcaggacgccaaguacagccacggcaucgacgucaccgaccuguucuccgcccagccggggcucaccagcgccgugaucgaggcccugccccgcaacauggugcugaccugccagggcagcgacgacaucaagaagcuccuggacucccaggggcggcgcgacaucaagcugaucgacaucagccucaacaaggcggacucccgccgguucgagaacgccgucugggaccagugcaaggaccugugccacaugcacacgggcgugguggucgagaagaagaagcgcgggggcaaggaggagaucacgccccacugcgcccugauggacugcaucauguucgacgccgccgugagcggcgggcucaacauccccauccugcgggcggugcugccgcgcgacauggucuuccggaccuccagccccaagguggugcucugaggacuagucccuguucccagagcccacuuuuuuuucuuuuuuugaaauaaaauagccugucuuucagaucucaaaggcucuuuucagagccaccaaaaaaaaaaaaaaaaaaaaaaaaaaaaaaaaaaaaaaaaaaaaaaaaaaaaaaaaaaaaaaaaaaaaaaaaaaaaaaaaaaaaaaaaaaaaaaaaaaaaa

SEQ ID NO: 20949 - RNA, 2036 nt, Artificial Sequence
  mRNA product Design a-1 (hSL-A100) comprising derived and/or modified sequence from LASV(GA391;Clade III)__AAA46284__SP-IgE_NP(2-570) (opt1)
aggagagucccgcagucggcguccagcggcucugcuuguucgugugugugucguugcaggccuuauucaagcuuaccauggacuggaccuggauccuguuccucguggccgccgcgacccgcguccacagcagcgccuccaaggaggugcgcagcugccuguggacccagucccuccggcgcgagcugagcggcuacugcuccaacaucaagcugcaggucgugaaggacgcccaggcgcuccugcacgggcuggacuucagcgagguguccaacguccagcggcucaugcgcaagcagaagcgggacgacggcgaccugaagcgccugcgggaccucaaccaggccgugaacaaccugguggagcugaaguccacccagcagaaguccguccuccgcguggggacgcugagcuccgacgaccugcucauccuggccgccgaccuggagaagcucaagagcaaggugacccggaccgagcgcccccuguccagcggcgucuacauggggaaccuguccagccagcagcucgaccagcggcgcgcccugcugaacaugaucggcaugaccggcguguccgggggcgggaagggcgcgagcaacgggaucgugcgggucugggacgugaagaacgccgagcuccugaacaaccaguucggcacgaugccgucccugacccucgccugccugaccaagcagggccagguggaccugaacgacgccguccaggcgcucaccgaccuggggcugaucuacacggccaaguaccccaacagcagcgaccucgaccgccugucccagagccaccccauccugaacaugaucgacaccaagaaguccagccucaacaucuccggcuacaacuucagccugggggccgccgugaaggccggcgcgugcaugcuggacggcgggaacaugcucgagaccaucaaggugagcccccagaccauggacggcauccucaagagcauccugaaggucaagaagucccuggggauguucgugagcgacacgccgggcgagcggaaccccuacgagaacauccuguacaagaucugccuguccggggacggcuggagcuacaucgccucccgcaccagcaucgugggccgggccugggagaacaccgucguggaccucgagcaggacaacaagccccagaagaucgggaacggcggguccaacaagagccugcaguccgccggcuucgccgcggggcugaucuacagccagcucaugacccugaaggacuucaagugcuucaaccugauccccaacgccaagacguggauggacaucgagggccgcccggaggaccccguggagaucgcccuguaccagcccuccagcggcugcuacguccacuucuuccgggagcccaccgaccucaagcaguucaagcaggacgccaaguacagccacgggcgcgacgugaccgaccuguucgccgcgcagccgggccugaccuccgccgucaucgaggcccucccccggaacauggugaucacgugccaggggagcgaggacauccgcaagcugcuggagucccagggccgccgggacaucaagcucaucgacaucacccugagcaaggccgacucccgcaaguucgagaacgccgugugggaccaguucaaggaccugugccacaugcacaccggggucgugguggagaagaagaagcggggcggcaaggaggagaucacgccccacugcgcgcucauggacugcaucauguucgacgccgccgucagcgggggccuggacgccaaggugcugcgcgugguccucccccgggacaugguguuccgcaccuccaccccgaaggugguccugugaggacuagucccuguucccagagcccacuuuuuuuucuuuuuuugaaauaaaauagccugucuuucagaucucaaaggcucuuuucagagccaccaaaaaaaaaaaaaaaaaaaaaaaaaaaaaaaaaaaaaaaaaaaaaaaaaaaaaaaaaaaaaaaaaaaaaaaaaaaaaaaaaaaaaaaaaaaaaaaaaaaaa

SEQ ID NO: 20950 - RNA, 2033 nt, Artificial Sequence
  mRNA product Design a-1 (hSL-A100) comprising derived and/or modified sequence from LASV(Nig08-A19;Clade III)__ADU56619__SP-IgE_NP(2-569) (opt1)
aggagagucccgcagucggcguccagcggcucugcuuguucgugugugugucguugcaggccuuauucaagcuuaccauggacuggaccuggauccuguuccucguggccgccgcgacccgcguccacagcagcgccuccaaggaggugaaguccuuccuguggacccagucccuccgccgggagcugagcggcuacugcuccaacaucaagcugcaggucgugaaggacgcccaggcgcuccugcacgggcuggacuucagcgagguguccaacguccagcgccucaugcggaagcagaagcgcgacgacggcgaccugaagcggcugcgcgaccucaaccaggccgugaacaaccugguggagcucaagagcacccagcagaaguccguccugcggguggggacccugagcuccgacgaccugcucgugcuggccgccgaccuggagaagcucaagagcaaggucgugcgcaccgagcggccccuguccagcggcaucuacauggggaaccuguccagccagcagcucgaccagcgcaaggcccugcugaacaugaucggcaugaccggcgggaacggcgggcggaacaccacguccgacggcaucgugcgcgucugggacgugaagaacgcggagcuccugaacaaccaguucgggaccaugccgagccugacccucgccugccugaccaagcagggccagguggaccugaacgacgccguccaggcccucacggaccugggccugaucuacaccgcgaaguaccccaacuccagcgaccucgaccggcuggcccagagccaccccauccugaacaugaucgacaccaagaaguccagccucaacaucuccggguacaacuucagccugggcgccgccgugaaggccggggcgugcaugcuggacggcggcaacaugcucgagaccaucaaggugagcccccagacgauggacgggauccucaagagcauccugaaggucaagcgcucccugggcauguucaucagcgacaccccgggggagcggaaccccuacgagaacauccuguacaagaucugccuguccggcgacggguggcccuacaucgccagccgcaccuccaucgugggccgggccugggagaacaccguggucgaccucgagagcgacaacaagccccagaagacgggcaacgggggcuccaacaagagccugcaguccgccggguucgccgcgggccugaccuacagccagcucaugacccugaaggacuccaugcugcagcuggacccgaacgccaagaccuggauggacaucgaggggcgccccgaggaccccguggagaucgcccucuaccagcccagcuccggcugcuacauccacuucuuccgggagccgacggaccugaagcaguucaagcaggacgccaaguacagccacggcaucgacgugaccgaccuguucgccgcgcagcccgggcucaccagcgccgucaucgaggcccugccccgcaacauggugaucacgugccagggcuccgaggacauccggaagcugcucgagagccaggggcgccgcgacaucaagcugaucgacaucucccugagcaaggucgacucccggaaguucgagaacgccgugugggaccaguucaaggaccucugccacaugcacaccggcaucguggucgagaagaagaagcgcgggggcaaggaggagaucacgccccacugcgcccugauggacugcaucauguucgacgcggccgugagcggcgggguggacgccaagguccugcgggccgugcucccgcgcgacaugguguuccggaccuccacccccaaggucgugcugugaggacuagucccuguucccagagcccacuuuuuuuucuuuuuuugaaauaaaauagccugucuuucagaucucaaaggcucuuuucagagccaccaaaaaaaaaaaaaaaaaaaaaaaaaaaaaaaaaaaaaaaaaaaaaaaaaaaaaaaaaaaaaaaaaaaaaaaaaaaaaaaaaaaaaaaaaaaaaaaaaaaaa

SEQ ID NO: 20951 - RNA, 2033 nt, Artificial Sequence
  mRNA product Design a-1 (hSL-A100) comprising derived and/or modified sequence from LASV(G1180-SLE-2010;Clade IV)__AIT17169__SP-IgE_NP(2-569) (opt1)
aggagagucccgcagucggcguccagcggcucugcuuguucgugugugugucguugcaggccuuauucaagcuuaccauggacuggaccuggauccuguuccucguggccgccgcgacccgcguccacagcagcgccuccaaggagaucaagagcuuccuguggacccagucccuccgccgggagcugagcggcuacugcuccaacaucaagcuccagguggucaaggacgcccaggcgcugcugcacgggcuggacuucagcgagguguccaacgugcagcgccucaugcggaaggagcgccgggacgacaacgaccugaagcgccugcgggaccucaaccaggccgucaacaaccugguggagcucaagagcacccagcagaaguccauccugcgcgugggcacccugaccagcgacgaccugcucauccuggccgccgaccuggagaagcucaaguccaaggucauccggaccgagcgcccccugagcgccgggguguacaugggcaaccuguccagccagcagcucgaccagcggcgcgcgcugcuguccaugaucgggaugagcuccggcaaccagcgggcccaggccggccgcgacggggugguccgggugugggacgugaagaacgucgagcuccugaacaaccaguucggcaccaugccgagccugacgcucgccugccugaccaagcagggccagguggaccugaacgacgcggugcaggcccucaccgaccuggggcugaucuacaccgccaaguaccccaacacguccgaccucgaccgccugacccagagccaccccauccugaacaugaucgacaccaagaaguccagccucaacaucagcggguacaacuucucccugggcgccgccgucaaggcgggcgccugcaugcuggacgggggcaacaugcucgagaccaucaaggugagcccccagacgauggacgggauccugaaguccauccugaaggugaagaaggcccucggcauguucaucagcgacaccccgggcgagcggaaccccuacgagaacauccuguacaagaucugccuguccggggacggcuggcccuacaucgccagccgcaccuccaucaccgggcgggccugggagaacacggucguggaccucgagagcgacggcaagccccagaaggcgggguccaacaacagcaacaagucccugcagagcgugggcuucaccgccggccugaccuacucccagcucaugacccugaaggacgccaugcugcagcuggacccgaacgccaagacguggauggacaucgaggggcgccccgaggaccccgucgagaucgcccucuaccagcccagcuccggcugcuacauccacuucuuccgggagccgaccgaccugaagcaguucaagcaggacgcgaaguacagccacgggaucgacgugaccgaccuguucgccgcccagcccggccucaccuccgccgugaucgacgcccugccccgcaacauggucaucacgugccaggggagcgacgacauccgcaagcugcucgagagccagggccggaaggacaucaagcugaucgacaucgcgcuguccaagaccgacagccgcaaguacgagaacgccgugugggaccaguacaaggaccucugccacaugcacaccggcgucgugguggagaagaagaagcgcgggggcaaggaggagaucacgccccacugcgcccugauggacugcaucauguucgacgccgcggucuccgggggccugaacaccagcgugcuccgggccgugcugccgcgggacauggucuuccgcaccuccacgccccggguggugcugugaggacuagucccuguucccagagcccacuuuuuuuucuuuuuuugaaauaaaauagccugucuuucagaucucaaaggcucuuuucagagccaccaaaaaaaaaaaaaaaaaaaaaaaaaaaaaaaaaaaaaaaaaaaaaaaaaaaaaaaaaaaaaaaaaaaaaaaaaaaaaaaaaaaaaaaaaaaaaaaaaaaaa

SEQ ID NO: 20952 - RNA, 2033 nt, Artificial Sequence
  mRNA product Design a-1 (hSL-A100) comprising derived and/or modified sequence from LASV(G1442-SLE-2011;Clade IV)__AIT17181__SP-IgE_NP(2-569) (opt1)
aggagagucccgcagucggcguccagcggcucugcuuguucgugugugugucguugcaggccuuauucaagcuuaccauggacuggaccuggauccuguuccucguggccgccgcgacccgcguccacagcagcgccuccaaggaggugaaguccuuccuguggacccagagccuccgccgggagcugagcggcuacugcuccaacaucaagcugcaggucgugaaggacgcccaggcgcuccugcacgggcuggacuucagcgagguguccaacguccagcgccucaugcggaagcagcgccgggacgacaacgaccugaagcgccugcgggaccucaaccaggccgugaacaaccugguggagcucaagagcacccagcagaaguccguccugcgcgugggcacccugaccagcgacgaccugcucgugcuggccgccgaccuggagaagcucaaguccaaggucauccggaccgagcgcccccugagcgccgggguguacaugggcaaccuguccagccagcagcucgaccagcggcgcgcgcugcugaacaugaucgggauguccggcggcauccaggggacccggacgggccgcgacggggugguccgggugugggacgugaagaacgccgaccuccugaacaaccaguucggcaccaugccgagccugacccucgccugccugaccaagcaggggcaggucgaccugaacgacguggugcaggcccucacggaccugggccugaucuacaccgcgaaguaccccaacgccuccgaccucgaccgccugacccagagccaccccauccugaacaugaucgacaccaagaaguccagccucaacaucagcggcuacaacuucucccugggggccgccgucaaggccggcgcgugcaugcuggacgggggcaacaugcucgagacgaucaaggugagcccccagaccauggacggcauccugaaguccauccugaaggugaagaagacccucgggauguucaucagcgacaccccgggcgagcggaaccccuacgagaacauccuguacaagaucugccuguccggggacggcuggcccuacaucgccagccgcacguccaucaccgggcgggccugggagaacaccgucguggaccucgagagcgacggcaagccccagaaggccggcuccaacaacagcaacaagucccugcagagcgccggguucgcggccggccugaccuacucccagcucaugacgcugaaggacgccaugcugcagcuggacccgaacgccaagaccuggauggacaucgaggggcgccccgaggaccccguggagaucgcccucuaccagcccagcuccggcugcuacauccacuucuuccgggagccgaccgaccugaagcaguucaagcaggacgcgaaguacagccacgggaucgacgucaccgaccuguucgccgcccagcccggccucacguccgccgugaucgaggcccugccccgcaacauggucaucacgugccagggcagcgacgacaucaagaagcugcucgagucccaggggcgcaaggacaucaagcugaucgacaucgcgcugagcaagaccgacagccggaaguacgagaacgccgugugggaccaguacaaggaccucugccacaugcacaccggcguggucguggagaagaagaagcgcgggggcaaggaggagaucaccccgcacugcgcccugauggacugcaucauguucgacgccgcgguguccgggggccugaacacccucguccugcgggccgugcugccccgcgacaugguguuccggaccagcacgccccgcgucgugcucugaggacuagucccuguucccagagcccacuuuuuuuucuuuuuuugaaauaaaauagccugucuuucagaucucaaaggcucuuuucagagccaccaaaaaaaaaaaaaaaaaaaaaaaaaaaaaaaaaaaaaaaaaaaaaaaaaaaaaaaaaaaaaaaaaaaaaaaaaaaaaaaaaaaaaaaaaaaaaaaaaaaaa

SEQ ID NO: 20953 - RNA, 2033 nt, Artificial Sequence
  mRNA product Design a-1 (hSL-A100) comprising derived and/or modified sequence from LASV(G3010-SLE-2013;Clade IV)__AIT17345__SP-IgE_NP(2-569) (opt1)
aggagagucccgcagucggcguccagcggcucugcuuguucgugugugugucguugcaggccuuauucaagcuuaccauggacuggaccuggauccuguuccucguggccgccgcgacccgcguccacagcagcgccuccaaggagaucaagagcuuccuguggacccagucccuccgccgggagcugagcggcuacugcuccaacaucaagcuccagguggucaaggacgcccaggcgcugcugcacgggcuggacuucagcgagguguccaacgugcagcgccucaugcggaaggagcgccgggacgacaacgaccugaagcgccugcgggaccucaaccaggccgucaacaaccugguggagcucaagagcacccagcagaaguccauccugcgcgugggcacccugaccagcgacgaccugcucauccuggccgccgaccuggagaagcucaaguccaaggucacccggaccgagcgcccccugagcgccgggguguacaugggcaaccuguccagccagcagcucgaccagcggcgcgcgcugcuguccaugaucgggaugagcuccggcgugcagggcgcccgggccgggcgcgacggcgucgugcgggugugggacgucaagaacgccgagcuccugaacaaccaguucgggacgaugccgagccugacccucgcgugccugaccaagcagggccagguggaccugaacgacgugguccaggcccucaccgaccuggggcugaucuacacggccaaguaccccaacaccuccgaccucgaccgccugacccagagccaccccauccugaacaugaucgacaccaagaaguccagccucaacaucagcggcuacaacuucucccugggcgccgccgugaaggcgggggccugcaugcuggacggcgggaacaugcucgagacgaucaaggugagcccccagaccauggacggcauccugaaguccauccugaaggucaagaaggcccucggcauguucaucagcgagaccccgggggagcggaaccccuacgagaacauccuguacaagaucugccuguccggcgacggguggcccuacaucgccagccgcaccuccaucacgggccgggccugggagaacaccgugguggaccucgagagcgacgggaagccccagaaggcgggcuccaacaacagcaacaagucccugcagagcgccggcuucaccgccgggcugaccuacucccagcucaugacgcugaaggacgccaugcugcagcuggacccgaacgccaagaccuggauggacaucgagggccgccccgaggaccccgucgagguggcgcucuaccagcccagcuccgggugcuacauccacuucuuccgggagccgaccgaccugaagcaguucaagcaggacgccaaguacagccacggcaucgacgugaccgaccuguucgccgcccagcccgggcucacguccgccgucaucgacgcgcugccccgcaacauggugaucacgugccagggcagcgacgacaucaagaagcugcucgagagccagggccgcaaggacaucaagcugaucgacaucgcccuguccaagaccgacagccggaaguacgagaacgccgucugggaccaguacaaggaccucugccacaugcacaccggggugguggucgagaagaagaagcgcggcgggaaggaggagaucaccccgcacugcgcccugauggacugcaucauguucgacgcggccguguccggcgggcugaacaccagcgugcuccgggccguccugccccgcgacaugguguuccggaccuccacgccccgcgugguccugugaggacuagucccuguucccagagcccacuuuuuuuucuuuuuuugaaauaaaauagccugucuuucagaucucaaaggcucuuuucagagccaccaaaaaaaaaaaaaaaaaaaaaaaaaaaaaaaaaaaaaaaaaaaaaaaaaaaaaaaaaaaaaaaaaaaaaaaaaaaaaaaaaaaaaaaaaaaaaaaaaaaaa

SEQ ID NO: 20954 - RNA, 2033 nt, Artificial Sequence
  mRNA product Design a-1 (hSL-A100) comprising derived and/or modified sequence from LASV(G502-SLE-2009;Clade IV)__AIT17127__SP-IgE_NP(2-569) (opt1)
aggagagucccgcagucggcguccagcggcucugcuuguucgugugugugucguugcaggccuuauucaagcuuaccauggacuggaccuggauccuguuccucguggccgccgcgacccgcguccacagcagcgccuccaaggagaucaagagcuuccuguggacccagucccuccgccgggagcugagcggcuacugcuccaacaucaagcuccagguggucaaggacgcccaggcgcugcugcacgggcuggacuucagcgagguguccaacgugcagcgccucaugcggaaggagcgccgggacgacaacgaccugaagcgccugcgggaccucaaccaggccgucaacaaccugguggagcucaagagcacccagcagaaguccauccugcgcgugggcacccugaccagcgacgaccugcucauccuggccgccgaccuggagaagcucaaguccaaggucauccggaccgagcgcccccugagcgccgggguguacaugggcaaccuguccagccagcagcucgaccagcggcgcgcgcugcuguccaugaucgggaugagcggcggcaaccagggggugcgggccggcaaggacggggucgugcgcgugugggacgucaagaacgccgagcuccugaacaaccaguucggcaccaugccgucccugacgcucgccugccugaccaagcagggccagguggaccugaacgacgcggugcaggcccucaccgaccuggggcugaucuacaccgccaaguaccccaacacgagcgaccucgaccggcugacccagucccaccccauccugaacaugaucgacaccaagaaguccagccucaacaucuccggcuacaacuucagccugggggccgccgucaaggcgggcgccugcaugcuggacgggggcaacaugcucgagaccaucaaggugagcccccagacgauggacggcauccucaagagcauccugaaggugaagaaggcccuggggauguucaucuccgacaccccgggcgagcgcaaccccuacgagaacauccuguacaagaucugccugagcggggacggcuggcccuacaucgccucccggaccagcaucaccgggcgcgccugggagaacacggucguggaccucgaguccgacggcaagccccagaaggcgggcagcaacaacuccaacaagagccugcaguccgccggguucaccgccggccugaccuacagccagcucaugacccugaaggacgccaugcugcagcuggacccgaacacgaagaccuggauggacaucgaggggcggcccgaggaccccguggagaucgcccucuaccagcccuccagcggcugcuacauccacuucuuccgcgagccgaccgaccugaagcaguucaagcaggacgcgaaguacucccacgggaucgacgucaccgaccuguucgccgcccagcccggccucacgagcgccgugaucgacgcccugccccggaacauggugaucacgugccagggcuccgacgacauccgcaagcugcucgagagccaggggcgcaaggacaucaagcugaucgacaucgcgcugaacaagaccgacagccggaaguacgagaacgccgucugggaccaguacaaggaccucugccacaugcacaccggcguggucguggagaagaagaagcgcgggggcaaggaggagaucaccccgcacugcgcccugauggacugcaucauguucgacgccgcgguguccgggggccugaacaccagcguccuccgggccgugcugccccgcgacaugguguuccggaccuccacgccccgcgucgugcugugaggacuagucccuguucccagagcccacuuuuuuuucuuuuuuugaaauaaaauagccugucuuucagaucucaaaggcucuuuucagagccaccaaaaaaaaaaaaaaaaaaaaaaaaaaaaaaaaaaaaaaaaaaaaaaaaaaaaaaaaaaaaaaaaaaaaaaaaaaaaaaaaaaaaaaaaaaaaaaaaaaaaa

SEQ ID NO: 20955 - RNA, 2033 nt, Artificial Sequence
  mRNA product Design a-1 (hSL-A100) comprising derived and/or modified sequence from LASV(G733-SLE-2010;Clade IV)__AIT17155__SP-IgE_NP(2-569) (opt1)
aggagagucccgcagucggcguccagcggcucugcuuguucgugugugugucguugcaggccuuauucaagcuuaccauggacuggaccuggauccuguuccucguggccgccgcgacccgcguccacagcagcgccuccaaggagaucaagagcuuccuguggacccagucccuccgccgggagcugagcggcuacugcuccaacaucaagcuccagguggucaaggacgcccaggcgcugcugcacgggcuggacuucagcgagguguccaacgugcagcgccucaugcggaaggagcgccgggacgacaacgaccugaagcgccugcgggaccucaaccaggccgucaacaaccugguggagcucaagagcacccagcagaaguccgugcugcgcgucggcacccugaccagcgacgagcugcucgugcuggccgccgaccuggagaagcucaaguccaaggugauccggaccgagcgcccccugagcgccggggucuacaugggcaaccuguccagccagcagcucgaccagcggcgcgcgcugcuguccaugaucgggaugagcggcggcaaccagggggcccggaccggccgcgacgggguggugcgggucugggacgugaagaacgccgagcuccugaacaaccaguucggcaccaugccgucccugacccucgccugccugaccaagcagggccagguggaccugaacgacgcgguccaggcccucaccgaccuggggcugaucuacacggccaaguaccccaacaccagcgaccucgaccgccugacccagucccaccccauccugaacaugaucgacaccaagaaguccagccucaacaucuccggcuacaacuucagccugggggccgccgugaaggcgggcgccugcaugcuggacgggggcaacaugcucgagacgaucaaggugagcccccagaccauggacggcauccucaagagcauccugaaggucaagaaggcccuggggauguucaucuccgacaccccgggcgagcggaaccccuacgagaacauccuguacaagaucugccugagcggggacggcuggcccuacaucgccucccgcaccagcaucacggggcgggccugggagaacaccgugguggaccucgaguccgacggcaagccccagaaggcgggcagcaacaacuccaacaagagccugcaguccgccggguucaccgccggccugaccuacagccagcucaugacgcugaaggacgccaugcugcagcuggacccgaacgccaagaccuggauggacaucgaggggcgccccgaggaccccgucgagaucgcgcucuaccagcccuccagcggcugcuacauccacuucuuccgggagccgaccgaccugaagcaguucaagcaggacgccaaguacucccacgggaucgacgugaccgaccuguucgccgcccagcccggccucacgagcgccgugaucgacgcgcugccccgcaacauggucaucacgugccagggcuccgacgacauccgcaagcugcucgagagccaggggcggaaggacaucaagcugaucgacaucgcccugagcaagaucgacucccgcaaguacgagaacgccgugugggaccaguacaaggaccucugccacaugcacaccggcgucgugguggagaagaagaagcgcgggggcaaggaggagaucacgccccacugcgcccugauggacugcaucauguucgacgcggccgucagcgggggccugaacucccucgugcugcgggccgugcugccgcgggacauggucuuccgcaccagcacgccccggguggugcucugaggacuagucccuguucccagagcccacuuuuuuuucuuuuuuugaaauaaaauagccugucuuucagaucucaaaggcucuuuucagagccaccaaaaaaaaaaaaaaaaaaaaaaaaaaaaaaaaaaaaaaaaaaaaaaaaaaaaaaaaaaaaaaaaaaaaaaaaaaaaaaaaaaaaaaaaaaaaaaaaaaaaa

SEQ ID NO: 20956 - RNA, 2033 nt, Artificial Sequence
  mRNA product Design a-1 (hSL-A100) comprising derived and/or modified sequence from MOPV/LASV reassortant(IGS-1;Clade IV)__AFY05578__SP-IgE_NP(2-569) (opt1)
aggagagucccgcagucggcguccagcggcucugcuuguucgugugugugucguugcaggccuuauucaagcuuaccauggacuggaccuggauccuguuccucguggccgccgcgacccgcguccacagcagcgccuccaaggagaucaagagcuuccuguggacccagucccuccgccgggagcugagcggcuacugcuccaacaucaagcuccagguggucaaggacgcccaggcgcugcugcacgggcuggacuucagcgagguguccaacgugcagcgccucaugcggaaggagcgccgggacgacaacgaccugaagcgccugcgggaccucaaccaggccgucaacaaccugguggagcucaagagcacccagcagaaguccauccugcgcgugggcacccugaccagcgacgaccugcucauccuggccgccgaccuggagaagcuccgguccaaggucauccgcaccgagcggccccugagcgccgggguguacaugggcaaccuguccagccagcagcucgaccagcgccgggcgcugcugaacaugaucgggauguccggcggcaaccagggggcccgcgccggccgggacggggugguccgcgugugggacgugaagaacgccgagcuccugagcaaccaguucggcaccaugccgucccugacgcucgcgugccugaccaagcaggggcaggucgaccugaacgacgccgugcaggcccucaccgaccugggccugaucuacaccgccaaguaccccaacacgagcgaccucgaccggcugacccagucccaccccauccugaacaugaucgacaccaagaaguccagccucaacaucuccggcuacaacuucagccugggggccgcggugaaggccggcgccugcaugcuggacgggggcaacaugcucgagaccaucaaggucagcccccagacgauggacggcauccucaagagcauccugaaggugaagaaggcccuggggauguucaucuccgacaccccgggcgagcgcaaccccuacgagaacauccuguacaagaucugccugagcggggacggcuggcccuacaucgccucccggaccagcaucaccgggcgcgcgugggagaacacgguggucgaccucgaguccgacggcaagccccagaaggccgacagcaacaacuccagcaagucccugcagagcgccggcuucaccgccgggcugaccuacucccagcucaugacccugaaggacgccaugcugcagcuggacccgaacgcgaagacguggauggacaucgagggccggcccgaggaccccguggagaucgcccucuaccagcccagcuccgggugcuacauccacuucuuccgcgagccgaccgaccugaagcaguucaagcaggacgccaaguacagccacggcaucgacgugaccgaccuguucgccacccagcccgggcucacguccgccgucaucgacgcgcugccccgcaacauggugaucacgugccagggcagcgacgacauccggaagcugcucgagagccagggccgcaaggacaucaagcugaucgacaucgaccuguccaagaccgacagccggaaguacgagaacgccgugugggaccaguacaaggaccucugccacaugcacaccggggucguggucgagaagaagaagcgcggcgggaaggaggagaucaccccgcacugcgcccugauggacugcaucauguucgacgccgcgguguccggcgggcugaacaccagcgugcuccgggccguccugccccgcgacaugguguuccggaccuccacgccccgcgugguccugugaggacuagucccuguucccagagcccacuuuuuuuucuuuuuuugaaauaaaauagccugucuuucagaucucaaaggcucuuuucagagccaccaaaaaaaaaaaaaaaaaaaaaaaaaaaaaaaaaaaaaaaaaaaaaaaaaaaaaaaaaaaaaaaaaaaaaaaaaaaaaaaaaaaaaaaaaaaaaaaaaaaaa

SEQ ID NO: 20957 - RNA, 2033 nt, Artificial Sequence
  mRNA product Design a-1 (hSL-A100) comprising derived and/or modified sequence from LASV(LM765-SLE-2012;Clade IV)__AIT17815__SP-IgE_NP(2-569) (opt1)
aggagagucccgcagucggcguccagcggcucugcuuguucgugugugugucguugcaggccuuauucaagcuuaccauggacuggaccuggauccuguuccucguggccgccgcgacccgcguccacagcagcgccuccaaggagaucaagagcuuccuguggacccagucccuccgccgggagcugagcggcuacugcuccaacaucaagcuccagguggucaaggacgcccaggcgcugcugcacgggcuggacuucagcgagguguccaacgugcagcgccucaugcggaaggagcgccgggacgacaacgaccugaagcgccugcgggaccucaaccaggccgucaacaaccugguggagcucaagagcacccagcagaaguccauccugcgcgugggcacccugaccagcgacgaccugcucauccuggccgccgaccuggagaagcucaaguccaaggucacccggaccgagcgcccccugagcgccgggguguacaugggcaaccuguccagccagcagcucgaccagcggcgcgcgcugcuggacaugaucgggauguccggcagcaaccagggcgcccgggccgggcgcgacggcgugguccgggugugggacgugaagaacgccgagcuccugaacaaccaguucgggacgaugccgucccugacccucgcgugccugaccaagcagggccaggucgaccugaacgacgccgugcaggcccucaccgaccuggggcugaucuacacggccaaguaccccaacaccagcgaccucgaccgccugacccagucccaccccauccugaacaugaucgacaccaagaaguccagccucaacaucuccggcuacaacuucagccugggcgccgcggugaaggccggggccugcaugcuggacggcgggaacaugcucgagacgaucaaggucagcccccagaccauggacggcauccucaagagcauccugaaggugaagaaggcccugggcauguucaucuccgacgccccgggggagcggaaccccuacgagaacauccuguacaagaucugccugagcggcgacggguggcccuacaucgcgucccgcaccagcaucaccggccgggccugggagaacacgguggucgaccucgaguccgacgggaagccccagaaggccggcagcaacggcuccaacaagagccugcaguccgccggguucaccgccggccugaccuacagccagcucaugacccugaaggacgcgaugcugcagcuggacccgaacgccaagacguggauggacaucgaggggcgccccgaggaccccguggagaucgcccucuaccagcccuccagcggcugcuacauccacuucuuccgggagccgaccgaccugaagcaguucaagcaggacgccaaguacucccacgggaucgacgugaccgaccuguucgccgcgcagcccggccucaccagcgccgucaucgacgcccugccccgcaacauggugaucacgugccagggcuccgacgacauccgcaagcuguucgagagccaggggcggaaggacaucaagcucaucgacaucgcccugagcaagaccgacucccgcaaguacgagaacgcggugugggaccaguacaaggaccugugccacaugcacaccggcaucgucguggagaagaagaagcgcgggggcaaggaggagaucacgccccacugcgcccucauggacugcaucauguucgacgccgccgucagcgggggccugaacaccuccgugcugcgggccgugcucccgcgggacauggucuuccgcaccagcacgccccggguggugcugugaggacuagucccuguucccagagcccacuuuuuuuucuuuuuuugaaauaaaauagccugucuuucagaucucaaaggcucuuuucagagccaccaaaaaaaaaaaaaaaaaaaaaaaaaaaaaaaaaaaaaaaaaaaaaaaaaaaaaaaaaaaaaaaaaaaaaaaaaaaaaaaaaaaaaaaaaaaaaaaaaaaaa

SEQ ID NO: 20958 - RNA, 2033 nt, Artificial Sequence
  mRNA product Design a-1 (hSL-A100) comprising derived and/or modified sequence from LASV(LM776-SLE-2012;Clade IV)__AIT17825__SP-IgE_NP(2-569) (opt1)
aggagagucccgcagucggcguccagcggcucugcuuguucgugugugugucguugcaggccuuauucaagcuuaccauggacuggaccuggauccuguuccucguggccgccgcgacccgcguccacagcagcgccuccaaggagaucaagagcuuccuguggacccagucccuccgccgggagcugagcuccuacugcagcaacaucaagcuccagguggucaaggacgcccaggcgcugcugcacggccuggacuucuccgaggugagcaacgugcagcgccucaugcggaaggagcgccgggacgacaacgaccugaagcgccugcgggaccucaaccaggccgucaacaaccugguggagcugaaguccacccagcagaaguccauccuccgcguggggacccugaccuccgacgaccugcucauccuggccgccgaccuggagaagcucaagagcaaggucacccggaccgagcgcccccuguccgccggcguguacauggggaaccugagcucccagcagcucgaccagcggcgcgcgcugcugagcaugaucggcauguccgggagcaaccagggcgcccgggccggccgcgacggggugguccgggugugggacgugaagaacgccgagcuccugaacaaccaguucggcacgaugccgucccugacccucgcgugccugaccaagcaggggcaggucgaccugaacgacgccgugcaggcccucaccgaccugggccugaucuacacggccaaguaccccaacaccagcgaccucgaccgccugacccagagccaccccauccugaacaugaucgacaccaagaaguccagccucaacaucuccggguacaacuucagccugggcgccgcggugaaggccggcgccugcaugcuggacgggggcaacaugcucgagacgaucaaggucagcccccagaccauggacgggauccucaagagcauccugaaggugaagaaggcccugggcauguucaucuccgacaccccgggcgagcggaaccccuacgagaacauccuguacaagaucugccugagcggggacggcuggcccuacaucgccucccgcaccagcaucacggggcgggcgugggagaacaccguggucgaccucgaguccgacggcaagccccagaaggccgggagcaacaacuccaacaagagccugcaguccgccggcuucaccgccggccugaccuacagccagcucaugacgcugaaggacgccaugcugcagcuggacccgaacgcgaagaccuggauggacaucgaggggcgccccgaggaccccguggagguggcccucuaccagcccuccagcggcugcuacauccacuucuuccgggagccgaccgaccugaagcaguucaagcaggacgccaaguacucccacgggaucgacgucaccgaccuguucgccgcccagcccggccucacgagcgcggugaucgacgcccugccccgcaacauggugaucacgugccaggggagcgacgacauccgcaagcugcucgagucccagggccggaaggacaucaagcugaucgacaucgcccugagcaagaccgacucccgcaaguacgagaacgccgucugggaccaguacaaggaccucugccacaugcacaccggcguggucguggagaagaagaagcgcgggggcaaggaggagaucaccccgcacugcgcgcugauggacugcaucauguucgacgccgccgugagcgggggccugaacaccuccguccuccgggccgugcugccccgggacaugguguuccgcaccagcacgccccgggucgugcugugaggacuagucccuguucccagagcccacuuuuuuuucuuuuuuugaaauaaaauagccugucuuucagaucucaaaggcucuuuucagagccaccaaaaaaaaaaaaaaaaaaaaaaaaaaaaaaaaaaaaaaaaaaaaaaaaaaaaaaaaaaaaaaaaaaaaaaaaaaaaaaaaaaaaaaaaaaaaaaaaaaaaa

SEQ ID NO: 20959 - RNA, 2033 nt, Artificial Sequence
  mRNA product Design a-1 (hSL-A100) comprising derived and/or modified sequence from LASV(Mad39;Clade IV)__ANH09723__SP-IgE_NP(2-569) (opt1)
aggagagucccgcagucggcguccagcggcucugcuuguucgugugugugucguugcaggccuuauucaagcuuaccauggacuggaccuggauccuguuccucguggccgccgcgacccgcguccacagcagcgccuccaaggagaucaagagcuuccuguggacccagucccuccgccgggagcugagcggcuacugcuccaacaucaagcuccagguggucaaggacgcccaggcgcugcugcacgggcuggacuucagcgagguguccaacgugcagcgccucaugcggaagcagcgccgggacgacaacgaccugaagcgccugcgggaccucaaccaggccgucaacaaccugguggagcugaaguccacccagcagaaguccgugcuccgcgucggcacgcugaccagcgacgaccugcucacccuggccgccgaccuggagaagcucaaguccaaggugacccggacggagcgcccccugaccgccgggguguacaugggcaaccugagcucccagcagcucgaccagcggcgcgcgcugcugaacaugaucgggaugagcggcggcaaccagggggcccggaccggccgcgacggggucgugcgggugugggacgucaagaacgccgagcuccugaacaaccaguucggcaccaugccgucccugacgcucgccugccugaccaagcagggccagguggaccugaacgacgugguccaggcgcucaccgaccuggggcugaucuacaccgccaaguaccccaacacgagcgaccucgaccgccugacccagucccaccccauccugaacaugaucgacaccaacaagagcucccucaacaucagcggcuacaacuucagccugggggccgccgugaaggccggcgcgugcaugcuggacgggggcaacaugcucgagaccaucaaggugagcccccagacgauggacggcauccucaagagcauccugaaggucaagaagucccuggggauguucaucagcgacaccccgggcgagcggaaccccuacgagaacauccuguacaagaucugccuguccggggacggcuggcccuacaucgccagccgcaccuccaucaccgggcgggccugggagaacacggugguggaccucgagagcggcggcaagccccagaaggccggguccaacaacagcaacaagucccugcagagcgccggcuucgcggccgggcugaccuacucccagcucaugacccugaaggacgccaugcugcagcuggacccgaacgccaagaccuggauggacaucgagggccgccccgaggaccccgucgagaucgcccucuaccagcccaucagcgggugcuacauccacuucuuccgggagccgacggaccugaagcaguucaagcaggacgcgaaguacucccacggcaucgacgugaccgaccuguucgccgcccagcccggccucaccagcgccgugaucgaggcccugccccgcaacauggucaucacgugccagggguccgacgacauccgcaagcuguucgagagccagggccggaaggacaucaagcucaucgacaucgcgcuguccaagaccgacagccgcaaguacgagaacgccgugugggaccaguacaaggaccugugccacaugcacaccggggucgugguggagaagaagaagaagggcgggaaggaggagaucacgccccacugcgcccucauggacugcaucauguucgacgccgcggucagcggcggccugaacacccuggugcuccgggccgugcugccgcgcgacauggucuuccggaccuccacccccaagguggugcugugaggacuagucccuguucccagagcccacuuuuuuuucuuuuuuugaaauaaaauagccugucuuucagaucucaaaggcucuuuucagagccaccaaaaaaaaaaaaaaaaaaaaaaaaaaaaaaaaaaaaaaaaaaaaaaaaaaaaaaaaaaaaaaaaaaaaaaaaaaaaaaaaaaaaaaaaaaaaaaaaaaaaa

SEQ ID NO: 20960 - RNA, 2033 nt, Artificial Sequence
  mRNA product Design a-1 (hSL-A100) comprising derived and/or modified sequence from LASV(Z0947-SLE-2011;Clade IV)__AIT17841__SP-IgE_NP(2-569) (opt1)
aggagagucccgcagucggcguccagcggcucugcuuguucgugugugugucguugcaggccuuauucaagcuuaccauggacuggaccuggauccuguuccucguggccgccgcgacccgcguccacagcagcgccuccaaggagaucaagagcuuccuguggacccagucccuccgccgggagcugagcggcuacugcuccaacaucaagcuccagguggucaaggacgcccaggcgcugcugcacgggcuggacuucagcgagguguccaacgugcagcgccucaugcggaaggagcgccgggacgacaacgaccugaagcgccugcgggaccucaaccaggccgucaacaaccugguggagcucaagagcacccagcagaaguccauccugcgcgugggcacccugaccagcgacgaccugcucauccuggccgccgaccuggagaagcucaaguccaaggucacccggaccgagcgcccccugagcgccgggguguacaugggcaaccuguccagccagcagcucgaccagcggcgcgcgcugcugaacaugaucgggauguccggcagcaaccagggcgcccggacggggcgcgacggcgugguccgggugugggacgugaagaacgccgagcuccugaacaaccaguucgggaccaugccgucccugacccucgccugccugaccaagcagggccaggucgaccugaacgacgcggugcaggcccucacggaccuggggcugaucuacaccgccaaguaccccaacaccagcgaccucgaccgccugacccagucccaccccauccugaacaugaucgacacgaagaaguccagccucaacaucuccggcuacaacuucagccugggcgccgccgugaaggcgggggccugcaugcuggacggcgggaacaugcucgagaccaucaaggucagcccccagaccauggacggcauccucaagagcauccugaaggugaagaaggcccugggcauguucaucuccgacgccccgggggagcggaaccccuacgagaacauccuguacaagaucugccugagcggcgacggguggcccuacaucgccucccgcaccagcaucacgggccgggcgugggagaacaccguggucgaccucgaguccgacgggaagccccagaaggccggcagcaacggcuccaacaagagccugcaguccgccggguucaccgccggccugaccuacagccagcucaugacgcugaaggacgccaugcugcagcuggacccgaacgcgaagaccuggauggacaucgaggggcgccccgaggaccccguggagaucgcccucuaccagcccuccagcggcugcuacauccacuucuuccgggagccgaccgaccugaagcaguucaagcaggacgccaaguacucccacgggaucgacgugaccgaccuguucgccgcccagcccggccucacgagcgcggucaucgacgcccugccccgcaacauggugaucacgugccagggcuccgacgacauccgcaagcuguucgagagccaggggcggaaggacaucaagcucaucgacaucgcccugagcaagaccgacucccgcaaguacgagaacgccgugugggaccaguacaaggaccugugccacaugcacaccggcaucgucguggagaagaagaagcgcgggggcaaggaggagaucaccccgcacugcgcgcucauggacugcaucauguucgacgccgccgucagcgggggccugaacaccuccgugcugcgggccgugcucccccgggacauggucuuccgcaccagcacgccccggguggugcugugaggacuagucccuguucccagagcccacuuuuuuuucuuuuuuugaaauaaaauagccugucuuucagaucucaaaggcucuuuucagagccaccaaaaaaaaaaaaaaaaaaaaaaaaaaaaaaaaaaaaaaaaaaaaaaaaaaaaaaaaaaaaaaaaaaaaaaaaaaaaaaaaaaaaaaaaaaaaaaaaaaaaa

SEQ ID NO: 20961 - RNA, 2033 nt, Artificial Sequence
  mRNA product Design a-1 (hSL-A100) comprising derived and/or modified sequence from LASV(Josiah;Clade IV)__NP_694869__SP-IgE_NP(2-569) (opt4)
aggagagucccgcagucggcguccagcggcucugcuuguucgugugugugucguugcaggccuuauucaagcuuaccauggacuggaccuggauccuguuccugguggccgccgccaccagagugcacagcagcgccagcaaggagaucaagagcuuccuguggacccagagccugagaagagagcugagcggcuacugcagcaacaucaagcugcagguggugaaggacgcccaggcccugcugcacggccuggacuucagcgaggugagcaacgugcagagacugaugagaaaggagagaagagacgacaacgaccugaagagacugagagaccugaaccaggccgugaacaaccugguggagcugaagagcacccagcagaagagcauccugagagugggcacccugaccagcgacgaccugcugauccuggccgccgaccuggagaagcugaagagcaaggugaucagaaccgagagaccccugagcgccggcguguacaugggcaaccugagcagccagcagcuggaccagagaagagcccugcugaacaugaucggcaugagcggcggcaaccagggcgccagagccggcagagacggcguggugagagugugggacgugaagaacgccgagcugcugaacaaccaguucggcaccaugcccagccugacccuggccugccugaccaagcagggccagguggaccugaacgacgccgugcaggcccugaccgaccugggccugaucuacaccgccaaguaccccaacaccagcgaccuggacagacugacccagagccaccccauccugaacaugaucgacaccaagaagagcagccugaacaucagcggcuacaacuucagccugggcgccgccgugaaggccggcgccugcaugcuggacggcggcaacaugcuggagaccaucaaggugagcccccagaccauggacggcauccugaagagcauccugaaggugaagaaggcccugggcauguucaucagcgacacccccggcgagagaaaccccuacgagaacauccuguacaagaucugccugagcggcgacggcuggcccuacaucgccagcagaaccagcaucaccggcagagccugggagaacaccgugguggaccuggagagcgacggcaagccccagaaggccgacagcaacaacagcagcaagagccugcagagcgccggcuucaccgccggccugaccuacagccagcugaugacccugaaggacgccaugcugcagcuggaccccaacgccaagaccuggauggacaucgagggcagacccgaggaccccguggagaucgcccuguaccagcccagcagcggcugcuacauccacuucuucagagagcccaccgaccugaagcaguucaagcaggacgccaaguacagccacggcaucgacgugaccgaccuguucgccacccagcccggccugaccagcgccgugaucgacgcccugcccagaaacauggugaucaccugccagggcagcgacgacaucagaaagcugcuggagagccagggcagaaaggacaucaagcugaucgacaucgcccugagcaagaccgacagcagaaaguacgagaacgccgugugggaccaguacaaggaccugugccacaugcacaccggcguggugguggagaagaagaagagaggcggcaaggaggagaucaccccccacugcgcccugauggacugcaucauguucgacgccgccgugagcggcggccugaacaccagcgugcugagagccgugcugcccagagacaugguguucagaaccagcacccccagaguggugcugugaggacuagucccuguucccagagcccacuuuuuuuucuuuuuuugaaauaaaauagccugucuuucagaucucaaaggcucuuuucagagccaccaaaaaaaaaaaaaaaaaaaaaaaaaaaaaaaaaaaaaaaaaaaaaaaaaaaaaaaaaaaaaaaaaaaaaaaaaaaaaaaaaaaaaaaaaaaaaaaaaaaaa

SEQ ID NO: 20962 - RNA, 2033 nt, Artificial Sequence
  mRNA product Design a-1 (hSL-A100) comprising derived and/or modified sequence from LASV(LP;Clade I)__AAF86702__SP-IgE_NP(2-569) (opt4)
aggagagucccgcagucggcguccagcggcucugcuuguucgugugugugucguugcaggccuuauucaagcuuaccauggacuggaccuggauccuguuccugguggccgccgccaccagagugcacagcagcaacagcaaggagaucaagagcuuccuguggacccagagccugagaagagagcugagcggcuacugcagcaacaucaagcugcagguggugaaggacgcccaggcccugcugcacggccuggacuucagcgaggugagcaacgugcagagacugaugagaaagcagaagagagacgacgccgaccugaagagacugagagaccugaaccaggccgugaacaaccugguggagcugaagagcacccagcagaagaacgugcugagagugggcacccugagcagcgacgaccugaucacccuggccgccgaccuggagaagcugaagagcaaggugaucagaaccgagagaccccugagcagcggcguguacaugggcaaccugagcagccagcagcuggaccagagaagagcccugcugagcaugaucggcaugagcggcggcccccagggcaacagaaccggcggcgacggcguggugagagugugggacgugaagaacgccgagcugcugaacaaccaguucggcaccaugcccagccugacccuggccugccugaccaagcagggccagguggaccugaacgacgccgugcaggcccugaccgaccugggccugaucuacaccgccaaguaccccaacagcagcgaccuggacaugcugacccagagccaccccauccugggcaugguggacaccaagaagagcagccugaacaucagcggcuacaacuucagccugggcgccgccgugaaggccggcgccugcaugcuggacggcggcaacaugcuggagaccaucaaggugagcccccagaccauggacggcauccugaagagcauccugaaggugaagagaagccugggcauguucaucagcgacacccccggcgagagaaaccccuacgagaacauccuguacaagaucugccugagcggcgagggcuggcccuacaucgccagcagaaccagcaucaccggcagagccugggagaacacccugguggaccuggagagcgacaacaagccccccaagcugaacagcgccggcagcaacaagagccugcaggccgccggccugaacgccggccugaccuacagccagcugaugacccugaaggacugcaugcugcagcuggaccccagcagcaagaccuggaucgacaucgagggcagacccgaggaccccguggagaucgcccuguuccagcccagcagcggcugcuacauccacuucuucagagagcccaccgaccugaagcaguucaagcaggacgccaaguacagccacggcaucgacgugaccgaccuguucagcacccagcccggccugaccagcgccgugaucgaggcccugcccagaaacauggugcugaccugccagggcagcgacgacaucaagaagcugcuggagagccagggcagaagagacaucaagcugaucgacaucagccugagcaaggccgacagcagaaaguucgagaacgccgugugggaccaguacaaggaccugugccacaugcacaccggcguggugguggagaagaagaagagaggcggcaaggaggagaucaccccccacugcgcccugcuggacugcaucauguucgacgccgccaccaccggcagccugaacaucaccacccugagagccgugcugcccagagacaugguguucagaaccagcacccccaagguggugcugugaggacuagucccuguucccagagcccacuuuuuuuucuuuuuuugaaauaaaauagccugucuuucagaucucaaaggcucuuuucagagccaccaaaaaaaaaaaaaaaaaaaaaaaaaaaaaaaaaaaaaaaaaaaaaaaaaaaaaaaaaaaaaaaaaaaaaaaaaaaaaaaaaaaaaaaaaaaaaaaaaaaaa

SEQ ID NO: 20963 - RNA, 2033 nt, Artificial Sequence
  mRNA product Design a-1 (hSL-A100) comprising derived and/or modified sequence from LASV(803213;Clade II)__AAF86704__SP-IgE_NP(2-569) (opt4)
aggagagucccgcagucggcguccagcggcucugcuuguucgugugugugucguugcaggccuuauucaagcuuaccauggacuggaccuggauccuguuccugguggccgccgccaccagagugcacagcagcgccagcaaggaggugaagagcuuccuguggacccagagccugagaagagagcugagcggcuacugcagcaacaucaagcugcagguggugaaggacgcccaggcccugcugcacggccuggacuucagcgaggugaacaacgugcagagacugaugagaaagcagaagagagacgacggcgaccugaagagacugagagaccugaaccaggccgugaacaaccugguggagcugaagagcacccagcagaagagcauccugagagugggcacccugaccagcgacgaccugcugacccuggccgccgaccuggagaagcugaagagcaaggugaucagaaccgagagaccccugagcagcggcguguacaugggcaaccugagcacccagcagcuggagcagagaagagcccugcugaacaugaucggcauggugggcggcgcccagggcacccagcccggcagagacggcguggugagagugugggacgugaagaaccccgaccugcugaacaaccaguucggcaccaugcccagccugacccuggccugccugaccaagcagggccagguggaccugaacgacgccgugcuggcccugaccgaccugggccugaucuacaccgccaaguaccccaacagcagcgaccuggacagacugagccagagccaccccauccugaacaugguggacaccaagaagagcagccugaacaucagcggcuacaacuucagccugggcgccgccgugaaggccggcgccugcaugcuggacggcggcaacaugcuggagaccaucaaggugaccccccagaccauggacggcauccugaagagcauccugaaggugaagagaagccugggcauguucgugagcgacacccccggcgagagaaaccccuacgagaacauccuguacaagaucugccugagcggcgacggcuggcccuacaucgccagcagaaccagcaucgugggcagagccugggagaacaccaccguggaccuggagagcgacggcaagccccagaaggugggcaccgccggcagcaacaagagccugcagagcgccggcuuccccaccggccugaccuacagccagcugaugacccugaaggacagcaugaugcagcuggaccccagcgccaagaccuggaucgacaucgagggcagacccgaggaccccguggagaucgcccuguaccagcccaugagcggcugcuacauccacuucuucagagagcccaccgaccugaagcaguucaagcaggacgccaaguacagccacggcaucgacguggccgaccuguuccccgcccagcccggccugaccagcgccgugaucgaggcccugcccagaaacauggugcugaccugccagggcagcgacgacaucaagaagcugcuggacagccagggcagaagagacaucaagcugaucgacaucagccugagcaagguggacagcagaaaguucgagaacgccgugugggaccagugcaaggaccugugccacaugcacaccggcguggugguggagaagaagaagagaggcggcaaggaggagaucaccccccacugcgcccugauggacugcaucauguucgacgccgccgugagcggcggccugaacauccccgugcugagagccgugcugcccagagacaugguguucagaaccagcagccccaagguggugcugugaggacuagucccuguucccagagcccacuuuuuuuucuuuuuuugaaauaaaauagccugucuuucagaucucaaaggcucuuuucagagccaccaaaaaaaaaaaaaaaaaaaaaaaaaaaaaaaaaaaaaaaaaaaaaaaaaaaaaaaaaaaaaaaaaaaaaaaaaaaaaaaaaaaaaaaaaaaaaaaaaaaaa

SEQ ID NO: 20964 - RNA, 2036 nt, Artificial Sequence
  mRNA product Design a-1 (hSL-A100) comprising derived and/or modified sequence from LASV(GA391;Clade III)__CAA36646__SP-IgE_NP(2-570) (opt4)
aggagagucccgcagucggcguccagcggcucugcuuguucgugugugugucguugcaggccuuauucaagcuuaccauggacuggaccuggauccuguuccugguggccgccgccaccagagugcacagcagcgccagcaaggaggugagaagcuuccuguggacccagagccugagaagagagcugagcggcuacugcagcaacaucaagcugcagguggugaaggacgcccaggcccugcugcacggccuggacuucagcgaggugagcaacgugcagagacugaugagaaagcagaagagagacgacggcgaccugaagagacugagagaccugaaccaggccgugaacaaccugguggagcugaagagcacccagcagaagagcgugcugagagugggcacccugagcagcgacgaccugcugauccuggccgccgaccuggagaagcugaagagcaaggugaccagaaccgagagaccccugagcagcggcguguacaugggcaaccugagcagccagcagcuggaccagagaagagcccugcugaacaugaucggcaugaccggcgugagcggcggcggcaagggcgccagcgacggcaucgugagagugugggacgugaagaacgccgagcugcugaacaaccaguucggcaccaugcccagccugacccuggccugccugaccaagcagggccagguggaccugaacgacgccgugcaggcccugaccgaccugggccugaucuacaccgccaaguaccccaacagcagcgaccuggacagacugagccagagccaccccauccugaacaugaucgacaccaagaagagcagccugaacaucagcggcuacaacuucagccugggcgccgccgugaaggccggcgccugcaugcuggacggcggcaacaugcuggagaccaucaaggugagcccccagaccauggacggcauccugaagagcauccugaaggugaagaagagccugggcauguucgugagcgacacccccggcgagagaaaccccuacgagaacauccuguacaagaucugccugagcggcgacggcuggcccuacaucgccagcagaaccagcaucgugggcagagccugggagaacaccgugguggaccuggagcaggacaacaagccccagaagaucggcaacggcggcagcaacaagagccugcagagcgccggcuucgccgccggccugaccuacagccagcugaugacccugaaggacuucaagugcuucaaccugauccccaacgccaagaccuggauggacaucgagggcagacccgaggaccccguggagaucgcccuguaccagcccagcagcggcugcuacgugcacuucuucagagagcccaccgaccugaagcaguucaagcaggacgccaaguacagccacggcaucgacgugaccgaccuguucgccgcccagcccggccugaccagcgccgugaucgaggcccugcccagaaacauggugaucaccugccagggcagcgaggacaucagaaagcugcuggagagccagggcagaagagacaucaagcugaucgacaucacccugagcaaggccgacagcagaaaguucgagaacgccgugugggaccaguucaaggaccugugccacaugcacaccggcguggugguggagaagaagaagagaggcggcaaggaggagaucaccccccacugcgcccugauggacugcaucauguucgacgccgccgugagcggcggccuggacgccaaggugcugagaguggugcugcccagagacaugguguucagaaccagcacccccaagguggugcugugaggacuagucccuguucccagagcccacuuuuuuuucuuuuuuugaaauaaaauagccugucuuucagaucucaaaggcucuuuucagagccaccaaaaaaaaaaaaaaaaaaaaaaaaaaaaaaaaaaaaaaaaaaaaaaaaaaaaaaaaaaaaaaaaaaaaaaaaaaaaaaaaaaaaaaaaaaaaaaaaaaaaa

SEQ ID NO: 20965 - RNA, 2033 nt, Artificial Sequence
  mRNA product Design a-1 (hSL-A100) comprising derived and/or modified sequence from LASV(AV;Clade V)__CCA30315__SP-IgE_NP(2-569) (opt4)
aggagagucccgcagucggcguccagcggcucugcuuguucgugugugugucguugcaggccuuauucaagcuuaccauggacuggaccuggauccuguuccugguggccgccgccaccagagugcacagcagcgccagcaaggaggugaagagcuuccuguggacccagagccugagaagagagcugagcggcuacugcagcaacaucaagcugcagguggugaaggacgcccaggcccugcugcacggccuggacuucagcgaggugagcaacgugcagagacugaugagaaagcagagaagagacgacagcgaccugaagagacugagagaccugaaccaggccgugaacaaccugguggagcugaagagcacccagcagaagagcgugcugagagugggcacccugagcagcgacgaccugcugacccuggccgccgaccuggagaagcugaagagcaaggugaccagaaccgagagaccccugagcagcggcguguacaugggcaaccugagcagccagcagcuggaccagagaagagcccugcugaaccugaucggcaugaccaacggcagccagggcagccaggccggcagagacggcguggugagagugugggacgugaagaacgccgagcugcugaacaaccaguucggcaccaugcccagccugacccuggccugccugaccaagcagggccagguggaccugaacgacguggugcaggcccugaccgaccugggccugaucuacaccgccaaguaccccaacaccagcgaccuggacagacugacccagagccaccccauccugaacaugaucgacaccaagaagagcagccugaacaucagcggcuacaacuucagccugggcgccgccgugaaggccggcgccugcaugcuggacggcggcaacaugcuggagaccaucaaggugagcccccagagcauggacggcauccugaagagcauccugaaggugaagagagcccugggcauguucgugagcgacacccccggcgagagaaaccccuacgagaacauccuguacaagaucugccugagcggcgacggcuggcccuacaucgccagcagaaccagcaucgugggcagagccugggagaacaccgugguggaccuggagaccgacggcaagccccagaagaucggcagcggcaacagcaacaagagccugcagagcgccggcuucagcgccggccugaccuacagccagcugaugacccugaaggacgccaugcugcagcuggaccccaacgccaagaccuggauggacaucgagggcagacccgaggaccccguggagguggcccuguaccagcccaucagcggcugcuacauccacuucuucagagagcccaccgaccugaagcaguucaagcaggacgccaaguacagccacggcaucgacaucgccgaccuguucgccgcccagcccggccugaccagcgccgugaucgaggcccugcccagaaacauggugaucaccugccagggcagcgaggacaucaagaagcugcuggagagccagggcagaaaggacaucaagcugaucgacaucgcccugagcaagaucgacagcagaaaguucgagaacgccgugugggaccaguacaaggaccugugccacaugcacaccggcguggugguggagaagaagaagagaggcggcaaggaggagaucaccccccacugcgcccugauggacugcaucauguucgacgccgccgugagcggcggccugaacacccuggugcugagagccgugcugcccagagacaugguguucagaaccagcacccccagaguggugcugugaggacuagucccuguucccagagcccacuuuuuuuucuuuuuuugaaauaaaauagccugucuuucagaucucaaaggcucuuuucagagccaccaaaaaaaaaaaaaaaaaaaaaaaaaaaaaaaaaaaaaaaaaaaaaaaaaaaaaaaaaaaaaaaaaaaaaaaaaaaaaaaaaaaaaaaaaaaaaaaaaaaaa

SEQ ID NO: 20966 - RNA, 2033 nt, Artificial Sequence
  mRNA product Design a-1 (hSL-A100) comprising derived and/or modified sequence from LASV(Togo/2016/7082;Clade VI)__AMR44578__SP-IgE_NP(2-569) (opt4)
aggagagucccgcagucggcguccagcggcucugcuuguucgugugugugucguugcaggccuuauucaagcuuaccauggacuggaccuggauccuguuccugguggccgccgccaccagagugcacagcagcaacagcaaggaggugaagagcuuccuguggacccagagccugagaagagagcugagcggcuacugcagcaacaucaagcugcagguggugaaggacgcccaggcccugcugcacggccuggacuucagcgaggugagcaacgugcagagacugaugagaaagcagaagagagacgacggcgaccugaagagacugagagaccugaaccaggccgugaacaaccugguggagcugaagagcgugcagcagaagagcauccugagagugggcacccugaccagcgacgaccugcugacccuggccgccgaccuggagaagcugaagagcaaggugaccagaaccgagagaccccugagcagcggcguguacaugggcaaccugagcagccagcagcuggaccagagaagagcccugcugagcaugaucggcaugagcggcggcaaccagaacagccagcccaagggcgacggcguggugagagugugggacgugaagaacgccgaccugcugaacaaccaguucggcaccaugcccagccugacccuggccugccugaccaagcagggccagguggaccugaacgacgccgugcaggcccugaccgaccugggccugaucuacaccgccaaguaccccaacagcagcgaccuggacagacugagccagagccaccccauccugaacaugaucgacaccaagaagagcagccugaacaucagcggcuacaacuucagccugggcgccgccaucaagaccggcgccugcaugcuggacggcggcaacaugcuggagaccaucaaggugaccccccagaccauggacggcauccugaagagcauccugaaggugaagagaagccugggcauguucaucagcgacacccccggcgagagaaaccccuacgagaacauccuguacaagaucugccugagcggcgacggcuggcccuacaucgccagcagaaccgccaucaucggcagagccugggagaacaccgugguggaccuggagagcgacagcaagccccagaagaucggcagcaacggcagcaacaagagccugcagagcgccggcuucgcccccggccugaccuacagccagcugaugacccugaaggacagcaugcugcagcuggaccccaacgccaagaccuggaucgacaucgagggcagacccgaggaccccguggagguggcccuguuccagcccaucagcggcugcuacauccacuucuucagagagcccaccgaccugaagcaguucaagcaggacgccaaguacagccacggcaucgacgugaccgaccuguucgccgcccagcccggccugaccagcgccgugaucgaggcccugcccagaaacauggugcugaccugccagggcagcgacgacaucaagaagcugcuggacagccagggcagaagagacaucaagcugaucgacgugagccugaacaagaucgacagcagaaaguucgagaacgccgugugggaccaguacaaggaccugugccacaugcacaccggcguggugguggagaagaagaagaagggcggcaaggaggagaucaccccccacugcgcccugcuggacugcaucauguucgacgccgccgugagcggcggccugaacgccaccgugcugagagccgugcugcccagagacaugguguucagaaccagcagccccaagguggugcugugaggacuagucccuguucccagagcccacuuuuuuuucuuuuuuugaaauaaaauagccugucuuucagaucucaaaggcucuuuucagagccaccaaaaaaaaaaaaaaaaaaaaaaaaaaaaaaaaaaaaaaaaaaaaaaaaaaaaaaaaaaaaaaaaaaaaaaaaaaaaaaaaaaaaaaaaaaaaaaaaaaaaa

SEQ ID NO: 20967 - RNA, 2033 nt, Artificial Sequence
  mRNA product Design a-1 (hSL-A100) comprising derived and/or modified sequence from LASV(KAK-428;Clade n.d. (VII))__ANH09741__SP-IgE_NP(2-569) (opt4)
aggagagucccgcagucggcguccagcggcucugcuuguucgugugugugucguugcaggccuuauucaagcuuaccauggacuggaccuggauccuguuccugguggccgccgccaccagagugcacagcagcaacagcaaggaggugaagagcuuccuguggacccagagccugagaagagagcugagcggcuacugcaccaacaucaagcugcagguggugaaggacgcccaggcccugcugcacggccuggacuucagcgaggugagcaacgugcagagacugaugagaaagcagaagagagacgacaacgaccugaagagacugagagaccugaaccaggccgugaacaaccugguggagcugaagagcgugcagcagaagagcgugcugaaggugggcacccugaacagcgacgaccugcugacccuggccgccgaccuggagaagcugaagagcaagguggugagaaccgagagaccccugagcagcggcguguacaugggcaaccugagcagccagcagcuggaccagagaagagcccugcugaacaugaucggcauggccggcggcagccagggcaaccagcccagcagagacggcguggugagagugugggacgugaagaacgccgaccugcugaacaaccaguucggcaccaugcccagccugacccuggccugccugaccaagcagggccagguggaccugaacgacguggugcuggcccugaccgaccugggccugaucuacaccgccaaguaccccaacagcagcgaccuggacagacugagccagaaccaccccgugcugaacaugaucgacgugaacaagagcagccugaacaucagcggcuacaacuucagccugggcgccgccgugaaggccggcgccugcaugcuggacggcggcaacaugcuggagaccaucaagaucagcccccagaccguggacggcauccugaagagcauccugaaggugaagagagcccugggcauguucgugagcgacacccccggcgagagaaaccccuacgagaacauccuguacaaggugugccugagcggcaacggcuggcccuacaucgccagcagaaccagcaucgugggcagagccugggagaacaccgugguggaccuggagagcaacaagaaccagcccaaggugggcaacaacggcagcaacaagaugcugcagagcagcggcuucgccaccggccugaccuacagccagcugaugacccugagagacagcaugcugcagcuggaccccaccgccaagaccuggaucgacaucgagggcagacccgaggaccccguggagcuggcccuguuccagcccagcagcggcugcuacauccacuucuucagagagcccaccgaccugaagcaguucaagcaggacgccaaguacagccacggcaucgacgugaacgaccuguucagcgcccagcccggccugaccagcgccgugcuggaggcccugcccagaaacauggugcugaccugccagggcagcgacgacaucagaaagcugcuggacagccaggacagaaaggacaucaagcugaucgacaucagccugagcaaggccgacgccagaaaguucgagaacgacgugugggaccaguucaaggaccugugccacaugcacaccggcaucgugguggagaagaagaagaagggcggcaagcaggagaugaccccccacugcgcccugcuggacugcaucauguucgacgccgccgugagcggcggccugaacgugcccacccugagagccgugcugcccaccgacaugguguucagaaccaucaccaccaagguggugcugugaggacuagucccuguucccagagcccacuuuuuuuucuuuuuuugaaauaaaauagccugucuuucagaucucaaaggcucuuuucagagccaccaaaaaaaaaaaaaaaaaaaaaaaaaaaaaaaaaaaaaaaaaaaaaaaaaaaaaaaaaaaaaaaaaaaaaaaaaaaaaaaaaaaaaaaaaaaaaaaaaaaaa

SEQ ID NO: 20968 - RNA, 2033 nt, Artificial Sequence; identical to SEQ ID NO: 20962
  mRNA product Design a-1 (hSL-A100) comprising derived and/or modified sequence from LASV(Pinneo-NIG-1969;Clade I)__AIT17837__SP-IgE_NP(2-569) (opt4)

SEQ ID NO: 20969 - RNA, 2033 nt, Artificial Sequence
  mRNA product Design a-1 (hSL-A100) comprising derived and/or modified sequence from LASV(ISTH0009-NIG-2011;Clade II)__AIT17405__SP-IgE_NP(2-569) (opt4)
aggagagucccgcagucggcguccagcggcucugcuuguucgugugugugucguugcaggccuuauucaagcuuaccauggacuggaccuggauccuguuccugguggccgccgccaccagagugcacagcagcgugagcaaggaggugaagagcuuccuguggacccagagccugagaagagagcugagcggcuacugcagcaacaucaagcugcagguggugaaggacgcccaggcccugcugcacggccuggacuucagcgaggugagcaacgugcagagacugaugagaaagcagaagagagacgacagcgaccugaagagacugagagaccugaaccaggccgugaacaaccugguggagcugaagagcacccagcagaagagcauccugagagugggcacccugaccagcgacgaccugcugacccuggccgccgaccuggagaagcugaagagcaaggugaucagaaccgagagaccccugagcagcggcguguacaugggcaaccugagcacccagcagcuggagcagagaagagcccugcugaacaugaucggcauggugggcggcgcccagggcacccagcccggcagagacggcguggugagagugugggacgugaagaaccccgaccugcugaacaaccaguucggcaccaugcccagccugacccuggccugccugaccaagcagggccagguggaccugaacgacgccgugcuggcccugaccgaccugggccugaucuacaccgccaaguaccccaacagcagcgaccuggacagacugagccagagccaccccauccugaacaugguggacaucaagaagagcagccugaacaucagcggcuacaacuucagccugggcgccgccgugaaggccggcgccugcaugcuggacggcggcaacaugcuggagaccaucaaggugaccccccagaccauggacggcauccugaagagcauccugaaggugaagagaagccugggcauguucgugagcgacacccccggcgagagaaaccccuacgagaacauccuguacaagaucugccugagcggcgacggcuggcccuacaucgccagcagaaccagcaucgugggcagagccugggagaacaccaccguggaccuggagagcgacggcaagccccagaaggugggcagcgccggcagcaacaagagccugcagagcgccggcuuccccaccggccugaccuacagccagcugaugacccugaaggacagcaugaugcagcuggaccccagcgccaagaccuggaucgacaucgagggcagacccgaggaccccguggagaucgcccuguaccagcccaugagcggcugcuacauccacuucuucagagagcccaccgaccugaagcaguucaagcaggacgccaaguacagccacggcaucgacguggccgaccuguuccccgcccagcccggccugaccagcgccgugaucgaggcccugcccagaaacauggugcugaccugccagggcagcgacgacaucaagagacugcuggacagccagggcagaagagacaucaagcugaucgacaucgcccugagcaaggccgacagcagaagauucgagaacgccgugugggaccagugcaaggaccugugccacaugcacaccggcguggugguggagaagaagaagagaggcggcaaggaggagaucaccccccacugcgcccugauggacugcaucauguacgacgccgccgugagcggcggccugaacauccccgugcugagagccgugcugcccagagacaugguguucagaaccagcagccccaagguggugcugugaggacuagucccuguucccagagcccacuuuuuuuucuuuuuuugaaauaaaauagccugucuuucagaucucaaaggcucuuuucagagccaccaaaaaaaaaaaaaaaaaaaaaaaaaaaaaaaaaaaaaaaaaaaaaaaaaaaaaaaaaaaaaaaaaaaaaaaaaaaaaaaaaaaaaaaaaaaaaaaaaaaaa

SEQ ID NO: 20970 - RNA, 2033 nt, Artificial Sequence
  mRNA product Design a-1 (hSL-A100) comprising derived and/or modified sequence from LASV(ISTH2010-NIG-2012;Clade II)__AIT17483__SP-IgE_NP(2-569) (opt4)
aggagagucccgcagucggcguccagcggcucugcuuguucgugugugugucguugcaggccuuauucaagcuuaccauggacuggaccuggauccuguuccugguggccgccgccaccagagugcacagcagcgccagcaaggaggugaagagcuuccuguggacccagagccugagaagagagcugagcggcuacugcagcaacaucaagcugcagguggugaaggacgcccaggcccugcugcacggccuggacuucagcgaggugagcaacgugcagagacugaugagaaagcagaagagagacgacagcgaccugaagagacugagagaccugaaccaggccgugaacaaccugguggagcugaagagcacccagcagaagagcauccugagagugggcacccugaccagcgacgaccugcugacccuggccgccgaccuggagaagcugaagagcaaggugaucagaaccgagagaccccugagcagcggcguguacaugggcaaccugagcacccagcagcuggagcagagaagagcccugcugaaccugaucggcauggugggcggcgcccagggcacccagcccggcagagacggcguggugagagugugggacgugaagaaccccgaccugcugaacaaccaguucggcaccaugcccagccugacccuggccugccugaccaagcagggccagguggaccugaacgacgccgugcuggcccugaccgaccugggccugaucuacaccgccaaguaccccaacagcagcgaccuggacagacugagccagagccaccccauccugaacaugguggacaccaagaagagcagccugaacaucagcggcuucaacuucagccugggcgccgccgugaaggccggcgccugcaugcuggacggcggcaacaugcuggagaccaucaaggugaccccccagaccauggacggcauccugaagagcauccugaaggugaagaagagccugggcauguucgugagcgacacccccggcgagagaaaccccuacgagaacauccuguacaagaucugccugagcggcgacggcuggcccuacaucgccagcagaaccagcaucgugggcagagccugggagaacaccaccguggaccuggagagcgacggcaagccccacaaggugggcaccgccggcagcaacaagagccugcagagcgccggcuuccccaccggccugaccuacagccagcugaugacccugaaggacagcaugaugcagcuggaccccagcgccaagaccuggaucgacaucgagggcagacccgaggaccccguggagaucgcccuguaccagcccaugagcggcugcuacauccacuucuucagagagcccaccgaccugaagcaguucaagcaggacgccaaguacagccacggcaucgacguggccgaccuguuccccgcccagcccggccugaccagcgccgugaucgaggcccugcccagaaacauggugcugaccugccagggcagcgacgacaucaagagacugcuggacagccagggcagaagagacaucaagcugaucgacaucgcccugagcaaggccgacagcagaagauucgagaacgccgugugggaccagugcaaggaccugugccacaugcacaccggcguggugguggagaagaagaagagaggcggcaaggaggagaucaccccccacugcgcccugauggacugcaucauguacgacgccgccgugagcggcggccugaacauccccgugcugagagccgugcugcccagagacaugguguucagaaccagcagccccaagguggugcugugaggacuagucccuguucccagagcccacuuuuuuuucuuuuuuugaaauaaaauagccugucuuucagaucucaaaggcucuuuucagagccaccaaaaaaaaaaaaaaaaaaaaaaaaaaaaaaaaaaaaaaaaaaaaaaaaaaaaaaaaaaaaaaaaaaaaaaaaaaaaaaaaaaaaaaaaaaaaaaaaaaaaa

SEQ ID NO: 20971 - RNA, 2033 nt, Artificial Sequence
  mRNA product Design a-1 (hSL-A100) comprising derived and/or modified sequence from LASV(Lassa virus/H.sapiens-wt/NGA/2015/ISTH_0543;Clade II)__AVO03640__SP-IgE_NP(2-569) (opt4)
aggagagucccgcagucggcguccagcggcucugcuuguucgugugugugucguugcaggccuuauucaagcuuaccauggacuggaccuggauccuguuccugguggccgccgccaccagagugcacagcagcgccagcaaggaggugaagagcuuccuguggacccagagccugagaagagagcugagcggcuacugcagcaacaucaagcugcagguggugaaggacgcccaggcccugcugcacggccuggacuucagcgaggugagcaacgugcagagacugaugagaaagcagaagagagacgacagcgaccugaagagacugagagaccugaaccaggccgugaacaaccugguggagcugaagagcacccagcagaagagcauccugagagugggcacccugaccagcgacgaccugcugacccuggccgccgaccuggagaagcugaagagcaaggugaucagaaccgagagaccccugagcagcggcguguacaugggcaaccugagcacccagcagcuggagcagagaagagcccugcugaacaugaucggcauggugggcggcgcccagggcacccagcccggcagagacggcguggugagagugugggacgugaagaaccccgaccugcugaacaaccaguucggcaccaugcccagccugacccuggccugccugaccaagcagggccagguggaccugaacgacgccgugcuggcccugaccgaccugggccugaucuacaccgccaaguaccccaacagcagcgaccuggacagacugagccagagccaccccauccugaacaugguggacaccaagaagagcagccugaacaucagcggcuacaacuucagccugggcgccgccgugaaggccggcgccugcaugcuggacggcggcaacaugcuggagaccaucaaggugaccccccagaccauggacggcauccugaagagcauccugaaggugaagaagagccugggcauguucgugagcgacacccccggcgagagaaaccccuacgagaacauccuguacaagaucugccugagcggcgacggcuggcccuacaucgccagcagaaccagcaucgugggcagagccugggagaacaccaccguggaccuggagagcgacggcaagccccagaaggugggcagcgccggcagcaacaagagccugcagagcgccggcuuccccaccggccugaccuacagccagcugaugacccugaaggacagcaugaugcagcuggaccccagcgccaagaccuggaucgacaucgagggcagacccgaggaccccguggagaucgcccuguaccagcccaugagcggcugcuacauccacuucuucagagagcccaccgaccugaagcaguucaagcaggacgccaaguacagccacggcaucgacguggccgaccuguuccccgcccagcccggccugaccagcgccgugaucgaggcccugcccagaaacauggugcugaccugccagggcagcgacgacaucaagagacugcuggacagccagggcagaaaggacaucaagcugaucgacaucgcccugagcaaggccgacagcagaagauucgagaacgccgugugggaccagugcaaggaccugugccacaugcacaccggcguggugguggagaagaagaagagaggcggcaaggaggagaucaccccccacugcgcccugauggacugcaucauguacgacgccgccgugagcggcggccugaacauccccgugcugagagccgugcugcccagagacaugguguucagaaccagcagccccaagguggugcugugaggacuagucccuguucccagagcccacuuuuuuuucuuuuuuugaaauaaaauagccugucuuucagaucucaaaggcucuuuucagagccaccaaaaaaaaaaaaaaaaaaaaaaaaaaaaaaaaaaaaaaaaaaaaaaaaaaaaaaaaaaaaaaaaaaaaaaaaaaaaaaaaaaaaaaaaaaaaaaaaaaaaa

SEQ ID NO: 20972 - RNA, 2033 nt, Artificial Sequence
  mRNA product Design a-1 (hSL-A100) comprising derived and/or modified sequence from LASV(Lassa virus/H.sapiens-wt/NGA/2016/ISTH_0009;Clade II)__AVO03572__SP-IgE_NP(2-569) (opt4)
aggagagucccgcagucggcguccagcggcucugcuuguucgugugugugucguugcaggccuuauucaagcuuaccauggacuggaccuggauccuguuccugguggccgccgccaccagagugcacagcagcgccagcaaggaggugaagagcuuccuguggacccagagccugagaagagagcugagcggcuacugcagcaacaucaagcugcagguggugaaggacgcccaggcccugcugcacggccuggacuucagcgaggugagcaacgugcagagacugaugagaaagcagaagagagacgacagcgaccugaagagacugagagaccugaaccaggccgugaacaaccugguggagcugaagagcacccagcagaagagcauccugagagugggcacccugaccagcgacgaccugcugacccuggccgccgaccuggagaagcugaagagcaaggugaucagaaccgagagaccccugagcagcggcguguacaugggcaaccugagcacccagcagcuggagcagagaagagcccugcugaacaugaucggcauggugggcggcgcccagggcacccagcccggcagagacggcguggugagagugugggacgugaagaaccccgaccugcugaacaaccaguucggcaccaugcccagccugacccuggccugccugaccaagcagggccagguggaccugaacgacgccgugcuggcccugaccgaccugggccugaucuacaccgccaaguaccccaacagcagcgaccuggacagacugagccagagccaccccauccugaacaugguggacaccaagaagagcagccugaacaucagcggcuacaacuucagccugggcgccgccgugaaggccggcgccugcaugcuggacggcggcaacaugcuggagaccaucaaggugaccccccagaccauggacggcauccugaagagcauccugaaggugaagaagagccugggcauguucgugagcgacacccccggcgagagaaaccccuacgagaacauccuguacaagaucugccugagcggcgacggcuggcccuacaucgccagcagaaccagcaucgugggcagagccugggagaacaccaccguggaccuggagagcgacggcaagccccagaaggugggcagcgccggcagcaacaagagccugcagagcgccggcuuccccaccggccugaccuacagccagcugaugacccugaaggacagcaugaugcagcuggaccccagcgccaagaccuggaucgacaucgagggcagacccgaggaccccguggagaucgcccuguaccagcccaugagcggcugcuacauccacuucuucagagagcccaccgaccugaagcaguucaagcaggacgccaaguacagccacggcaucgacguggccgaccuguuccccgcccagcccggccugaccagcgccgugaucgaggcccugcccagaaacauggugcugaccugccagggcagcgacgacaucaagagacugcuggacagccagggcagaagagacaucaagcugaucgacaucgcccugagcaaggccgacagcagaagauucgagaacgccgugugggaccagugcaaggaccugugccacaugcacaccggcguggugguggagaagaagaagagaggcggcaaggaggagaucaccccccacugcgcccugauggacugcaucauguacgacgccgccgugagcggcggccugaacauccccgugcugagagccgugcugcccagagacaugguguucagaaccagcagccccaagguggugcugugaggacuagucccuguucccagagcccacuuuuuuuucuuuuuuugaaauaaaauagccugucuuucagaucucaaaggcucuuuucagagccaccaaaaaaaaaaaaaaaaaaaaaaaaaaaaaaaaaaaaaaaaaaaaaaaaaaaaaaaaaaaaaaaaaaaaaaaaaaaaaaaaaaaaaaaaaaaaaaaaaaaaa

SEQ ID NO: 20973 - RNA, 2033 nt, Artificial Sequence
  mRNA product Design a-1 (hSL-A100) comprising derived and/or modified sequence from LASV(Lassa virus/H.sapiens-wt/NGA/2016/ISTH_0017;Clade II)__AVO03568__SP-IgE_NP(2-569) (opt4)
aggagagucccgcagucggcguccagcggcucugcuuguucgugugugugucguugcaggccuuauucaagcuuaccauggacuggaccuggauccuguuccugguggccgccgccaccagagugcacagcagcgccagcaaggaggugaagagcuuccuguggacccagagccugagaagagagcugagcggcuacugcagcagcaucaagcugcagguggugaaggacgcccaggcccugcugcacggccuggacuucagcgaggugagcaacgugcagagacugaugagaaagcagaagagagacgacagcgaccugaagagacugagagaccugaaccaggccgugaacaaccugguggagcugaagagcacccagcagaagagcauccugagagugggcacccugaccagcgacgaccugcugacccuggccgccgaccuggagaagcugaagagcaaggugaucagaaccgagagaccccugagcagcggcguguacaugggcaaccugagcacccagcagcuggagcagagaagagcccugcugaacaugaucggcauggccggcggcgcccagggcacccagcccggcagagacggcguggugagagugugggacgugaagaaccccgaccugcugaacaaccaguucggcaccaugcccagccugacccuggccugccugaccaagcagggccagguggaccugaacgacgccgugcuggcccugaccgaccugggccugaucuacaccgccaaguaccccaacagcagcgaccuggacagacugagccagagccaccccauccugaacaugguggacaccaagaagagcagccugaacaucagcggcuacaacuucagccugggcgccgccgugaaggccggcgccugcaugcuggacggcggcaacaugcuggagaccaucaaggugaccccccagaccauggacggcauccugaagagcauccugaaggugaagagaagccugggcauguucgugagcgacgcccccggcgagagaaaccccuacgagaacauccuguacaagaucugccugagcggcgacggcuggcccuacaucgccagcagaaccagcaucgugggcagagccugggagaacaccaccguggaccuggagagcgacggcaagccccagaaggugggcgccaccggcagcaacaagagccugcagagcgccggcuuccccaccggccugaccuacagccagcugaugacccugaaggacagcaugaugcagcuggaccccagcgccaagaccuggaucgacaucgagggcagacccgaggaccccguggagguggcccuguaccagcccgugagcggcugcuacauccacuucuucagagagcccaccgaccugaagcaguucaagcaggacgccaaguacagccacggcaucgacguggccgaccuguuccccgcccagcccggccugaccagcgccgugaucgaggcccugcccagaaacauggugcugaccugccagggcagcgacgacaucaagaagcugcuggacagccagggcagaaaggacaucaagcugaucgacaucgcccugagcaaggccgacagcagaagauucgagaacgccgugugggaccagugcaaggaccugugccacaugcacaccggcguggugguggagaagaagaagagaggcggcaaggaggagaucaccccccacugcgcccugauggacugcaucauguacgacgccgccgugagcggcggccugaacauccccgugcugagagccgugcugcccagagacaugguguucagaaccagcagccccaagguggugcugugaggacuagucccuguucccagagcccacuuuuuuuucuuuuuuugaaauaaaauagccugucuuucagaucucaaaggcucuuuucagagccaccaaaaaaaaaaaaaaaaaaaaaaaaaaaaaaaaaaaaaaaaaaaaaaaaaaaaaaaaaaaaaaaaaaaaaaaaaaaaaaaaaaaaaaaaaaaaaaaaaaaaa

SEQ ID NO: 20974 - RNA, 2033 nt, Artificial Sequence
  mRNA product Design a-1 (hSL-A100) comprising derived and/or modified sequence from LASV(Lassa virus/H.sapiens-wt/NGA/2018/ISTH_0959;Clade II)__AVV65100__SP-IgE_NP(2-569) (opt4)
aggagagucccgcagucggcguccagcggcucugcuuguucgugugugugucguugcaggccuuauucaagcuuaccauggacuggaccuggauccuguuccugguggccgccgccaccagagugcacagcagcgccagcaaggaggugaagagcuuccuguggacccagagccugagaagagagcugagcggcuacugcagcaacaucaagcugcagguggugaaggacgcccaggcccugcugcacggccuggacuucagcgaggugagcaacgugcagagacugaugagaaagcagaagagagacgacagcgaccugaagagacugagagaccugaaccaggccgugaacaaccugguggagcugaagagcacccagcagaagagcauccugagagugggcacccugaccagcgacgaccugcugacccuggccgccgaccuggagaagcugaagagcaaggugaucagaaccgagagaccccugagcagcggcguguacaugggcaaccugagcacccagcagcuggagcagagaagagcccugcugaaccugaucggcauggugggcggcgcccagggcacccagcccggcagagacggcguggugagagugugggacgugaagaaccccgaccugcugaacaaccaguucggcaccaugcccagccugacccuggccugccugaccaagcagggccagguggaccugaacgacguggugcuggcccugaccgaccugggccugaucuacaccgccaaguaccccaacagcagcgaccuggacagacugagccagagccaccccauccugaacaugguggacaccaagaagagcagccugaacaucagcggcuucaacuucagccugggcgccgccgugaaggccggcgccugcaugcuggacggcggcaacaugcuggagaccaucaaggugaccccccagaccauggacggcauccugaagagcauccugaaggugaagaagagccugggcauguucgugagcgacacccccggcgagagaaaccccuacgagaacauccuguacaagaucugccugagcggcgacggcuggcccuacaucgccagcagaaccagcaucgugggcagagccugggagaacaccaccguggaccuggagagcgacggcaagccccacaaggugggcaccgccggcagcaacaagagccugcagagcgccggcuuccccaccggccugaccuacagccagcugaugacccugaaggacagcaugaugcagcuggaccccagcgccaagaccuggaucgacaucgagggcagacccgaggaccccguggagaucgcccuguaccagcccaugagcggcugcuacauccacuucuucagagagcccaccgaccugaagcaguucaagcaggacgccaaguacagccacggcaucgacguggccgaccuguuccccgcccagcccggccugaccagcgccgugaucgaggcccugcccagaaacauggugcugaccugccagggcagcgacgacaucaagagacugcuggacagccagggcagaaaggacaucaagcugaucgacaucgcccugagcaagaccgacagcagaagauucgagaacgccgugugggaccagugcaaggaccugugccacaugcacaccggcguggugguggagaagaagaagagaggcggcaaggaggagaucaccccccacugcgcccugauggacugcaucauguacgacgccgccgugagcggcggccugaacauccccgugcugagagccgugcugcccagagacaugguguucagaaccagcagccccaagguggugcugugaggacuagucccuguucccagagcccacuuuuuuuucuuuuuuugaaauaaaauagccugucuuucagaucucaaaggcucuuuucagagccaccaaaaaaaaaaaaaaaaaaaaaaaaaaaaaaaaaaaaaaaaaaaaaaaaaaaaaaaaaaaaaaaaaaaaaaaaaaaaaaaaaaaaaaaaaaaaaaaaaaaaa

SEQ ID NO: 20975 - RNA, 2033 nt, Artificial Sequence
  mRNA product Design a-1 (hSL-A100) comprising derived and/or modified sequence from LASV(LASV003-NIG-2008;Clade II)__AIT17581__SP-IgE_NP(2-569) (opt4)
aggagagucccgcagucggcguccagcggcucugcuuguucgugugugugucguugcaggccuuauucaagcuuaccauggacuggaccuggauccuguuccugguggccgccgccaccagagugcacagcagcgccagcaaggaggugaagagcuuccuguggacccagagccugagaagagagcugagcggcuacugcagcagcaucaagcugcagguggugaaggacgcccaggcccugcugcacggccuggacuucagcgaggugagcaacgugcagagacugaugagaaagcagaagagagacgacagcgaccugaagagacugagagaccugaaccaggccgugaacaaccugguggagcugaagagcacccagcagaagagcgugcugagagugggcacccugaccagcgacgaccugcugacccuggccgccgaccuggagaagcugaagagcaaggugaucagaaccgagagaccccugagcagcggcguguacaugggcaaccugagcgcccagcagcuggagcagagaagaacccugcugaacaugaucggcauggugggcggcgcccagggcacccagcccggcagagacggcguggugagagugugggacgugaagaaccccgaccugcugaacaaccaguucggcaccaugcccagccugacccuggccugccugaccaagcagggccagguggaccugaacgacguggugcuggcccugaccgaccugggccugaucuacaccgccaaguaccccaacagcagcgaccuggacagacugagccagagccaccccauccugagcaugguggacaccaagaagagcagccugaacaucagcggcuacaacuucagccugggcgccgccgugaaggccggcgccugcaugcuggacggcggcaacaugcuggagaccaucaaggugaccccccagaccauggacggcauccugaagagcauccugaaggugaagaagagccugggcauguucgugagcgacacccccggcgagagaaaccccuacgagaacauccuguacaagaucugccugagcggcgacggcuggcccuacaucgccagcagaaccagcaucgugggcagagccugggagaacaccaccguggaccuggagagcgacggcaagccccagaaggugggcaccgccggcagcaacaagagccugcagagcgccggcuuccccaccggccugaccuacagccagcugaugacccugaaggacagcaugaugcagcuggaccccagcgccaagaccuggaucgacaucgagggcagacccgaggaccccguggagaucgcccuguaccagcccaugagcggcugcuacauccacuucuucagagagcccaccgaccugaagcaguucaagcaggacgccaaguacagccacggcaucgacgugaccgaccuguuccccgcccagcccggccugaccagcgccgugaucgaggcccugcccagaaacauggugcugaccugccagggcagcgacgacaucaagagacugcuggacagccagggcagaagagacaucaagcugaucgacaucgcccugagcaaggccgacagcagaagauucgagaacgccgugugggaccagugcaaggaccugugccacaugcacaccggcguggugguggagaagaagaagagaggcggcaaggaggagaucaccccccacugcgcccugauggacugcaucauguacgacgccgccgugagcggcggccugaacauccccgugcugagagccgugcugcccagagacaugguguucagaaccagcagccccaagguggugcugugaggacuagucccuguucccagagcccacuuuuuuuucuuuuuuugaaauaaaauagccugucuuucagaucucaaaggcucuuuucagagccaccaaaaaaaaaaaaaaaaaaaaaaaaaaaaaaaaaaaaaaaaaaaaaaaaaaaaaaaaaaaaaaaaaaaaaaaaaaaaaaaaaaaaaaaaaaaaaaaaaaaaa

SEQ ID NO: 20976 - RNA, 2033 nt, Artificial Sequence
  mRNA product Design a-1 (hSL-A100) comprising derived and/or modified sequence from LASV(LASV035-NIG-2009;Clade II)__AIT17589__SP-IgE_NP(2-569) (opt4)
aggagagucccgcagucggcguccagcggcucugcuuguucgugugugugucguugcaggccuuauucaagcuuaccauggacuggaccuggauccuguuccugguggccgccgccaccagagugcacagcagcgccagcaaggaggugaagagcuuccuguggacccagagccugagaagagagcugagcggcuacugcagcagcaucaagcugcagguggugaaggacgcccaggcccugcugcacggccuggacuucagcgaggugagcaacgugcagagacugaugagaaagcagaagagagacgacagcgaccugaagagacugagagaccugaaccaggccgugaacaaccugguggagcugaagagcacccagcagaagagcauccugagagugggcacccugaccagcgacgaccugcugacccuggccgccgaccuggagaagcugaagagcaaggugaucagaaccgagagaccccugagcagcggcguguacaugggcaaccugagcgcccagcagcuggagcagagaagagcccugcugaacaugaucggcauggugggcggcgcccagggcacccagcccggcagagacggcguggugagagugugggacgugaagaaccccgaccugcugaacaaccaguucggcaccaugcccagccugacccuggccugccugaccaagcagggccagguggaccugaacgacgccgugcuggcccugaccgaccugggccugaucuacaccgccaaguaccccaacagcagcgaccuggacagacugagccagagccaccccauccugaacaugguggacaccaagaagagcagccugaacaucagcggcuacaacuucagccugggcgccgccgugaaggccggcgccugcaugcuggacggcggcaacaugcuggagaccaucaaggugaccccccagaccauggacggcauccugaagagcauccugaaggugaagagaagccugggcauguucgugagcgacacccccggcgagagaaaccccuacgagaacauccuguacaagaucugccugagcggcgacggcuggcccuacaucgccagcagaaccagcaucgugggcagagccugggagaacaccaccguggaccuggagagcgacggcaagccccagaaggugggcaccaccggcagcaacaagagccugcagagcgccggcuuccccaccggccugaccuacagccagcugaugacccugaaggacagcaugaugcagcuggaccccagcgccaagaccuggaucgacaucgagggcagacccgaggaccccguggagaucgcccuguaccagcccaugagcggcugcuacauccacuucuucagagagcccaccgaccugaagcaguucaagcaggacgccaaguacagccacggcaucgacguggccgaccuguuccccgcccagcccggccugaccagcgccgugaucgaggcccugcccagaaacauggugcugaccugccagggcagcgacgacaucaagaagcugcuggacagccagggcagaagagacaucaagcugaucgacaucgcccugagcaaggccgacagcagaaaguucgagaacgccgugugggaccagugcaaggaccugugccacaugcacaccggcguggugguggagaagaagaagagaggcggcaaggaggagaucaccccccacugcgcccugauggacugcaucauguacgacgccgccgugagcggcggccugaacauccccgugcugagagccgugcugcccagagacaugguguucagaaccagcagccccaagguggugcugugaggacuagucccuguucccagagcccacuuuuuuuucuuuuuuugaaauaaaauagccugucuuucagaucucaaaggcucuuuucagagccaccaaaaaaaaaaaaaaaaaaaaaaaaaaaaaaaaaaaaaaaaaaaaaaaaaaaaaaaaaaaaaaaaaaaaaaaaaaaaaaaaaaaaaaaaaaaaaaaaaaaaa

SEQ ID NO: 20977 - RNA, 2033 nt, Artificial Sequence
  mRNA product Design a-1 (hSL-A100) comprising derived and/or modified sequence from LASV(LASV1000-NIG-2009;Clade II)__AIT17783__SP-IgE_NP(2-569) (opt4)
aggagagucccgcagucggcguccagcggcucugcuuguucgugugugugucguugcaggccuuauucaagcuuaccauggacuggaccuggauccuguuccugguggccgccgccaccagagugcacagcagcgccagcaaggaggugaagagcuuccuguggacccagagccugagaagagagcugagcggcuacugcagcaacaucaagcugcagguggugaaggacgcccaggcccugcugcacggccuggacuucagcgaggugagcaacgugcagagacugaugagaaagcagaagagagacgacagcgaccugaagagacugagagaccugaaccaggccgugaacaaccugguggagcugaagagcacccagcagaagagcauccugagagugggcacccugaccagcgacgaccugcugacccuggccgccgaccuggagaagcugaagagcaaggugaucagaaccgagagaccccugagcagcggcguguacaugggcaaccugagcacccagcagcuggagcagagaagagcccugcugaacaugaucggcauggugggcggcgcccagggcacccagcccggcagagacggcguggugagagugugggacgugaagaaccccgaccugcugaacaaccaguucggcaccaugcccagccugacccuggccugccugaccaagcagggccagguggaccugaacgacguggugcuggcccugaccgaccugggccugaucuacaccgccaaguaccccaacagcagcgaccuggacagacugagccagagccaccccauccugaacaugguggacaccaagaagagcagccugaacaucagcggcuacaacuucagccugggcgccgccgugaaggccggcgccugcaugcuggacggcggcaacaugcuggagaccaucaaggugaccccccagaccauggacggcauccugaagagcauccugaaggugaagaagagccugggcauguucgugagcgacacccccggcgagagaaaccccuacgagaacauccuguacaagaucugccugagcggcgacggcuggcccuacaucgccagcagaaccagcaucgugggcagagccugggagaacaccaccguggaccuggagagcgacggcaagccccagaaggugggcaccgccggcagcaacaagagccugcagagcgccggcuuccccaccggccugaccuacagccagcugaugacccugaaggacagcaugaugcagcuggaccccagcgccaagaccuggaucgacaucgagggcagacccgaggaccccguggagaucgcccuguaccagcccgugagcggcugcuacauccacuucuucagagagcccaccgaccugaagcaguucaagcaggacgccaaguacagccacggcaucgacguggccgaccuguuccccgcccagcccggccugaccagcgccgugaucgaggcccugcccagaaacauggugcugaccugccagggcagcgacgacaucaagagacugcuggacagccagggcagaagagacaucaagcugaucgacaucgcccugagcaaggccgacagcagaagauucgagaacgccgugugggaccagugcaaggaccugugccacaugcacaccggcguggugguggagaagaagaagagaggcggcaaggaggagaucaccccccacugcgcccugauggacugcaucauguacgacgccgccgugagcggcggccugaacauccccgugcugagagccgugcugcccagagacaugguguucagaaccagcagccccaagguggugcugugaggacuagucccuguucccagagcccacuuuuuuuucuuuuuuugaaauaaaauagccugucuuucagaucucaaaggcucuuuucagagccaccaaaaaaaaaaaaaaaaaaaaaaaaaaaaaaaaaaaaaaaaaaaaaaaaaaaaaaaaaaaaaaaaaaaaaaaaaaaaaaaaaaaaaaaaaaaaaaaaaaaaa

SEQ ID NO: 20978 - RNA, 2033 nt, Artificial Sequence
  mRNA product Design a-1 (hSL-A100) comprising derived and/or modified sequence from LASV(LASV221-NIG-2010;Clade II)__AIT17625__SP-IgE_NP(2-569) (opt4)
aggagagucccgcagucggcguccagcggcucugcuuguucgugugugugucguugcaggccuuauucaagcuuaccauggacuggaccuggauccuguuccugguggccgccgccaccagagugcacagcagcgccagcaaggaggugaagagcuuccuguggacccagagccugagaagagagcugagcggcuacugcagcagcaucaagcugcagguggugaaggacgcccaggcccugcugcacggccuggacuucagcgaggugagcaacgugcagagacugaugagaaagcagagaagagacgacagcgaccugaagagacugagagaccugaaccaggccgugaacaaccugguggagcugaagagcacccagcagaagagcauccugagagugggcacccugaccagcgacgaccugcugacccuggccgccgaccuggagaagcugaagagcaaggugaucagaaccgagagaccccugagcagcggcguguacaugggcaaccugagcacccagcagcuggagcagagaagagcccugcugaacaugaucggcauggugggcggcgcccagggcacccagcccggcagagacggcguggugagagugugggacgugaagaaccccgaccugcugaacaaccaguucggcaccaugcccagccugacccuggccugccugaccaagcagggccagguggaccugaacgacgccgugcuggcccugaccgaccugggccugaucuacaccgccaaguaccccaacagcagcgaccuggacagacugagccagagccaccccauccugaacaugguggacaccaagaagagcagccugaacaucagcggcuacaacuucagccugggcgccgccgugaaggccggcgccugcaugcuggacggcggcaacaugcuggagaccaucaaggugaccccccagaccguggacggcauccugaagagcauccugaaggugaagagaagccugggcauguucgugagcgacacccccggcgagagaaaccccuacgagaacauccuguacaagaucugccugagcggcgacggcuggcccuacaucgccagcagaaccagcaucgugggcagagccugggagaacaccaccguggaccuggagagcgacggcaagccccagaaggugggcaccgccggcagcaacaagagccugcagagcgccggcuuccccaccggccugaccuacagccagcugaugacccugaaggacagcaugaugcagcuggaccccagcgccaagaccuggaucgacaucgagggcagacccgaggaccccguggagaucgcccuguaccagcccaugagcggcugcuacauccacuucuucagagagcccaccgaccugaagcaguucaagcaggacgccaaguacagccacggcaucgacguggccgaccuguuccccgcccagcccggccugaccagcgccgugaucgaggcccugcccagaaacauggugcugaccugccagggcagcgacgacaucaagagacugcuggacagccagggcagaagagacaucaagcugaucgacaucgcccugagcaaggccgacagcagaaaguucgagaacgccgugugggaccagugcaaggaccugugccacaugcacaccggcguggugguggagaagaagaagagaggcggcaaggaggagaucaccccccacugcgcccugauggacugcaucauguacgacgccgccgugagcggcggccugaacauccccgugcugagagccgugcugcccagagacaugguguucagaaccagcagccccaagguggugcugugaggacuagucccuguucccagagcccacuuuuuuuucuuuuuuugaaauaaaauagccugucuuucagaucucaaaggcucuuuucagagccaccaaaaaaaaaaaaaaaaaaaaaaaaaaaaaaaaaaaaaaaaaaaaaaaaaaaaaaaaaaaaaaaaaaaaaaaaaaaaaaaaaaaaaaaaaaaaaaaaaaaaa

SEQ ID NO: 20979 - RNA, 2033 nt, Artificial Sequence
  mRNA product Design a-1 (hSL-A100) comprising derived and/or modified sequence from LASV(LASV237-NIG-2010;Clade II)__AIT17639__SP-IgE_NP(2-569) (opt4)
aggagagucccgcagucggcguccagcggcucugcuuguucgugugugugucguugcaggccuuauucaagcuuaccauggacuggaccuggauccuguuccugguggccgccgccaccagagugcacagcagcgccagcaaggaggugaagagcuuccuguggacccagagccugagaagagagcugagcggcuacugcagcaacaucaagcugcagguggugaaggacgcccaggcccugcugcacggccuggacuucagcgaggugagcaacgugcagagacugaugagaaagcagaagagagacgacagcgaccugaagagacugagagaccugaaccaggccgugaacaaccugguggagcugaagagcacccagcagaagagcauccugagagugggcacccugaccagcgacgaccugcugacccuggccgccgaccuggagaagcugaagagcaaggugaucagaaccgagagaccccugagcagcggcguguacaugggcaaccugagcacccagcagcuggagcagagaagagcccugcugaacaugaucggcauggugggcggcgcccagggcacccagcccggcagagacggcguggugagagugugggacgugaagaaccccgaccugcugaacaaccaguucggcaccaugcccagccugacccuggccugccugaccaagcagggccagguggaccugaacgacgccgugcuggcccugaccgaccugggccugaucuacaccgccaaguaccccaacagcagcgaccuggacagacugagccagagccaccccauccugaacaugguggacaucaagaagagcagccugaacaucagcggcuacaacuucagccugggcgccgccgugaaggccggcgccugcaugcuggacggcggcaacaugcuggagaccaucaaggugaccccccagaccauggacggcauccugaagagcauccugaaggugaagagaagccugggcauguucgugagcgacacccccggcgagagaaaccccuacgagaacauccuguacaagaucugccugagcggcgacggcuggcccuacaucgccagcagaaccagcaucgugggcagagccugggagaacaccaccguggaccuggagagcgacggcaagccccagaaggugggcagcgccggcagcaacaagagccugcagagcgccggcuuccccaccggccugaccuacagccagcugaugacccugaaggacagcaugaugcagcuggaccccagcgccaagaccuggaucgacaucgagggcagacccgaggaccccguggagaucgcccuguaccagcccaugagcggcugcuacauccacuucuucagagagcccaccgaccugaagcaguucaagcaggacgccaaguacagccacggcaucgacguggccgaccuguuccccgcccagcccggccugaccagcgccgugaucgaggcccugcccagaaacauggugcugaccugccagggcagcgacgacaucaagagacugcuggacagccagggcagaagagacaucaagcugaucgacaucgcccugagcaaggccgacagcagaagauucgagaacgccgugugggaccagugcaaggaccugugccacaugcacaccggcguggugguggagaagaagaagagaggcggcaaggaggagaucaccccccacugcgcccugauggacugcaucauguacgacgccgccgugagcggcggccugaacauccccgugcugagagccgugcugcccagagacaugguguucagaaccagcagccccaagguggugcugugaggacuagucccuguucccagagcccacuuuuuuuucuuuuuuugaaauaaaauagccugucuuucagaucucaaaggcucuuuucagagccaccaaaaaaaaaaaaaaaaaaaaaaaaaaaaaaaaaaaaaaaaaaaaaaaaaaaaaaaaaaaaaaaaaaaaaaaaaaaaaaaaaaaaaaaaaaaaaaaaaaaaa

SEQ ID NO: 20980 - RNA, 2033 nt, Artificial Sequence
  mRNA product Design a-1 (hSL-A100) comprising derived and/or modified sequence from LASV(LASV253-NIG-2011;Clade II)__AIT17671__SP-IgE_NP(2-569) (opt4)
aggagagucccgcagucggcguccagcggcucugcuuguucgugugugugucguugcaggccuuauucaagcuuaccauggacuggaccuggauccuguuccugguggccgccgccaccagagugcacagcagcgccagcaaggaggugaagagcuuccuguggacccagagccugagaagagagcugagcggcuacugcagcagcaucaagcugcagguggugaaggacgcccaggcccugcugcacggccuggacuucagcgaggugagcaacgugcagagacugaugagaaagcagaagagagacgacagcgaccugaagagacugagagaccugaaccaggccgugaacaaccugguggagcugaagagcacccagcagaagagcgugcugagagugggcacccugaccagcgacgaccugcugacccuggccgccgaccuggagaagcugaagagcaaggugaucagaaccgagagaccccugagcagcggcguguacaugggcaaccugagcacccagcagcuggagcagagaagagcccugcugaacaugaucggcauggugggcggcgcccagggcacccagcccggcagagacggcguggugagagugugggacgugaagaaccccgaccugcugaacaaccaguucggcaccaugcccagccugacccuggccugccugaccaagcagggccagguggaccugaacgacguggugcuggcccugaccgaccugggccugaucuacaccgccaaguaccccaacagcagcgaccuggacagacugagccagagccaccccauccugaacaugguggacaccaagaagagcagccugaacaucagcggcuacaacuucagccugggcgccgccgugaaggccggcgccugcaugcuggacggcggcaacaugcuggagaccaucaaggugaccccccagaccauggacggcauccugaagagcauccugaaggugaagaagagccugggcauguucgugagcgacacccccggcgagagaaaccccuacgagaacauccuguacaagaucugccugagcggcgacggcuggcccuacaucgccagcagaaccagcaucgugggcagagccugggagaacaccaccguggaccuggagagcgacggcaagccccagaaggugggcaccgccggcagcaacaagagccugcagagcgccggcuuccccaccggccugaccuacagccagcugaugacccugaaggacagcaugaugcagcuggaccccagcgccaagaccuggaucgacaucgagggcagacccgaggaccccguggagaucgcccuguaccagcccaugagcggcugcuacauccacuucuucagagagcccaccgaccugaagcaguucaagcaggacgccaaguacagccacggcaucgacgugaccgaccuguuccccgcccagcccggccugaccagcgccgugaucgaggcccugcccagaaacauggugcugaccugccagggcagcgacgacaucaagagacugcuggacagccagggcagaagagacaucaagcugaucgacaucgcccugagcaaggccgacagcagaagauucgagaacgccgugugggaccagugcaaggaccugugccacaugcacaccggcguggugguggagaagaagaagagaggcggcaaggaggagaucaccccccacugcgcccugauggacugcaucauguacgacgccgccgugagcggcggccugaacauccccgugcugagagccgugcugcccagagacaugguguucagaaccagcagccccaagguggugcugugaggacuagucccuguucccagagcccacuuuuuuuucuuuuuuugaaauaaaauagccugucuuucagaucucaaaggcucuuuucagagccaccaaaaaaaaaaaaaaaaaaaaaaaaaaaaaaaaaaaaaaaaaaaaaaaaaaaaaaaaaaaaaaaaaaaaaaaaaaaaaaaaaaaaaaaaaaaaaaaaaaaaa

SEQ ID NO: 20981 - RNA, 2033 nt, Artificial Sequence
  mRNA product Design a-1 (hSL-A100) comprising derived and/or modified sequence from LASV(LASV254-NIG-2011;Clade II)__AIT17675__SP-IgE_NP(2-569) (opt4)
aggagagucccgcagucggcguccagcggcucugcuuguucgugugugugucguugcaggccuuauucaagcuuaccauggacuggaccuggauccuguuccugguggccgccgccaccagagugcacagcagcgccagcaaggaggugaagagcuuccuguggacccagagccugagaagagagcugagcggcuacugcagcagcaucaagcugcagguggugaaggacgcccaggcccugcugcacggccuggacuucagcgaggugagcaacgugcagagacugaugagaaagcagaagagagacgacagcgaccugaagagacugagagaccugaaccaggccgugaacaaccugguggagcugaagagcacccagcagaagagcgugcugagagugggcacccugaccagcgacgaccugcugacccuggccgccgaccuggagaagcugaagagcaaggugaucagaaccgagagaccccugagcagcggcguguacaugggcaaccugagcacccagcagcuggagcagagaagagcccugcugaacaugaucggcauggugggcggcgcccagggcacccagcccggcagagacggcguggugagagugugggacgugaagaaccccgaccugcugaacaaccaguucggcaccaugcccagccugacccuggccugccugaccaagcagggccagguggaccugaacgacgccgugcuggcccugaccgaccugggccugaucuacaccgccaaguaccccaacagcagcgaccuggacagacugagccagagccaccccauccugaacaugguggacaccaagaagagcagccugaacaucagcggcuacaacuucagccugggcgccgccgugaaggccggcgccugcaugcuggacggcggcaacaugcuggagaccaucaaggugaccccccagaccauggacggcauccugaagagcauccugaaggugaagaagagccugggcauguucgugagcgacacccccggcgagagaaaccccuacgagaacauccuguacaagaucugccugagcggcgacggcuggcccuacaucgccagcagaaccagcaucgugggcagagccugggagaacaccaucguggaccuggagagcgacggcaagccccagaaggugggcaccgccggcagcaacaagagccugcagagcgccggcuuccccaccggccugaccuacagccagcugaugacccugaaggacagcaugaugcagcuggaccccagcgccaagaccuggaucgacaucgagggcagacccgaggaccccguggagaucgcccuguaccagcccaugagcggcugcuacauccacuucuucagagagcccaccgaccugaagcaguucaagcaggacgccaaguacagccacggcaucgacguggccgaccuguuccccgcccagcccggccugaccagcgccgugaucgaggcccugcccagaaacauggugcugaccugccagggcagcgacgacaucaagagacugcuggacagccagggcagaagagacaucaagcugaucgacaucgcccugagcaaggccgacagcagaagauucgagaacgccgugugggaccagugcaaggaccugugccacaugcacaccggcguggugguggagaagaagaagagaggcggcaaggaggagaucaccccccacugcgcccugauggacugcaucauguacgacgccgccgugagcggcggccugaacauccccgugcugagagccgugcugcccagagacaugguguucagaaccagcagccccaagguggugcugugaggacuagucccuguucccagagcccacuuuuuuuucuuuuuuugaaauaaaauagccugucuuucagaucucaaaggcucuuuucagagccaccaaaaaaaaaaaaaaaaaaaaaaaaaaaaaaaaaaaaaaaaaaaaaaaaaaaaaaaaaaaaaaaaaaaaaaaaaaaaaaaaaaaaaaaaaaaaaaaaaaaaa

SEQ ID NO: 20982 - RNA, 2033 nt, Artificial Sequence
  mRNA product Design a-1 (hSL-A100) comprising derived and/or modified sequence from LASV(Nig08-04;Clade II)__ADU56611__SP-IgE_NP(2-569) (opt4)
aggagagucccgcagucggcguccagcggcucugcuuguucgugugugugucguugcaggccuuauucaagcuuaccauggacuggaccuggauccuguuccugguggccgccgccaccagagugcacagcagcgccagcaaggaggugaagagcuuccuguggacccagagccugagaagagagcugagcggcuacugcagcaacaucaagcugcagguggugaaggacgcccaggcccugcugcacggccuggacuucagcgaggugagcaacgugcagagacugaugagaaagcagaagagagacgacggcgaccugaagagacugagagaccugaaccaggccgugaacaaccugguggagcugaagagcacccagcagaagagcgugcugagagugggcacccugaccagcgacgaccugcugacccuggccgccgaccuggagaagcugaagagcaaggugaucagaaccgagagaccccugagcagcggcguguacaugggcaaccugagcacccagcagcuggagcagagaaaggcccugcugagcaugaucggcauggugggcggcgcccagggcacccagcccggcagagacggcguggugagagugugggacgugaagaaccccgaccugcugaacaaccaguucggcaccaugcccagccugacccuggccugccugaccaagcagggccagguggaccugaacgacgccgugcuggcccugaccgaccugggccugaucuacaccgccaaguaccccaacagcagcgaccuggacagacugagccagagccaccccauccugaacaugguggacaccaagaagagcagccugaacaucagcggcuacaacuucagccugggcgccgccgugaaggccggcgccugcaugcuggacggcggcaacaugcuggagaccaucaaggugaccccccagaccauggacggcauccugaagagcauccugaaggugaagagaagccugggcauguucgugagcgacacccccggcgagagaaaccccuacgagaacauccuguacaagaucugccugagcggcgacggcuggcccuacaucgccagcagaaccagcaucgugggcagagccugggagaacaccaccguggaccuggagagcgacggcaagccccagaaggugggcaccgccggcagcaacaagagccugcagagcgccggcuuccccaccggccugaccuacagccagcugaugacccugaaggacagcaugaugcagcuggaccccagcgccaagaccuggaucgacaucgagggcagacccgaggaccccguggagaucgcccuguaccagcccaugagcggcugcuacauccacuucuucagagagcccaccgaccugaagcaguucaagcaggacgccaaguacagccacggcaucgacgugaccgaccuguucagcgcccagcccggccugaccagcgccgugaucgaggcccugcccagaaacauggugcugaccugccagggcagcgacgacaucaagaagcugcuggacagccagggcagaagagacaucaagcugaucgacaucagccugaacaaggccgacagcagaagauucgagaacgccgugugggaccagugcaaggaccugugccacaugcacaccggcguggugguggagaagaagaagagaggcggcaaggaggagaucaccccccacugcgcccugauggacugcaucauguucgacgccgccgugagcggcggccugaacauccccauccugagagccgugcugcccagagacaugguguucagaaccagcagccccaagguggugcugugaggacuagucccuguucccagagcccacuuuuuuuucuuuuuuugaaauaaaauagccugucuuucagaucucaaaggcucuuuucagagccaccaaaaaaaaaaaaaaaaaaaaaaaaaaaaaaaaaaaaaaaaaaaaaaaaaaaaaaaaaaaaaaaaaaaaaaaaaaaaaaaaaaaaaaaaaaaaaaaaaaaaa

SEQ ID NO: 20983 - RNA, 2036 nt, Artificial Sequence
  mRNA product Design a-1 (hSL-A100) comprising derived and/or modified sequence from LASV(GA391;Clade III)__AAA46284__SP-IgE_NP(2-570) (opt4)
aggagagucccgcagucggcguccagcggcucugcuuguucgugugugugucguugcaggccuuauucaagcuuaccauggacuggaccuggauccuguuccugguggccgccgccaccagagugcacagcagcgccagcaaggaggugagaagcugccuguggacccagagccugagaagagagcugagcggcuacugcagcaacaucaagcugcagguggugaaggacgcccaggcccugcugcacggccuggacuucagcgaggugagcaacgugcagagacugaugagaaagcagaagagagacgacggcgaccugaagagacugagagaccugaaccaggccgugaacaaccugguggagcugaagagcacccagcagaagagcgugcugagagugggcacccugagcagcgacgaccugcugauccuggccgccgaccuggagaagcugaagagcaaggugaccagaaccgagagaccccugagcagcggcguguacaugggcaaccugagcagccagcagcuggaccagagaagagcccugcugaacaugaucggcaugaccggcgugagcggcggcggcaagggcgccagcaacggcaucgugagagugugggacgugaagaacgccgagcugcugaacaaccaguucggcaccaugcccagccugacccuggccugccugaccaagcagggccagguggaccugaacgacgccgugcaggcccugaccgaccugggccugaucuacaccgccaaguaccccaacagcagcgaccuggacagacugagccagagccaccccauccugaacaugaucgacaccaagaagagcagccugaacaucagcggcuacaacuucagccugggcgccgccgugaaggccggcgccugcaugcuggacggcggcaacaugcuggagaccaucaaggugagcccccagaccauggacggcauccugaagagcauccugaaggugaagaagagccugggcauguucgugagcgacacccccggcgagagaaaccccuacgagaacauccuguacaagaucugccugagcggcgacggcuggagcuacaucgccagcagaaccagcaucgugggcagagccugggagaacaccgugguggaccuggagcaggacaacaagccccagaagaucggcaacggcggcagcaacaagagccugcagagcgccggcuucgccgccggccugaucuacagccagcugaugacccugaaggacuucaagugcuucaaccugauccccaacgccaagaccuggauggacaucgagggcagacccgaggaccccguggagaucgcccuguaccagcccagcagcggcugcuacgugcacuucuucagagagcccaccgaccugaagcaguucaagcaggacgccaaguacagccacggcagagacgugaccgaccuguucgccgcccagcccggccugaccagcgccgugaucgaggcccugcccagaaacauggugaucaccugccagggcagcgaggacaucagaaagcugcuggagagccagggcagaagagacaucaagcugaucgacaucacccugagcaaggccgacagcagaaaguucgagaacgccgugugggaccaguucaaggaccugugccacaugcacaccggcguggugguggagaagaagaagagaggcggcaaggaggagaucaccccccacugcgcccugauggacugcaucauguucgacgccgccgugagcggcggccuggacgccaaggugcugagaguggugcugcccagagacaugguguucagaaccagcacccccaagguggugcugugaggacuagucccuguucccagagcccacuuuuuuuucuuuuuuugaaauaaaauagccugucuuucagaucucaaaggcucuuuucagagccaccaaaaaaaaaaaaaaaaaaaaaaaaaaaaaaaaaaaaaaaaaaaaaaaaaaaaaaaaaaaaaaaaaaaaaaaaaaaaaaaaaaaaaaaaaaaaaaaaaaaaa

SEQ ID NO: 20984 - RNA, 2033 nt, Artificial Sequence
  mRNA product Design a-1 (hSL-A100) comprising derived and/or modified sequence from LASV(Nig08-A19;Clade III)__ADU56619__SP-IgE_NP(2-569) (opt4)
aggagagucccgcagucggcguccagcggcucugcuuguucgugugugugucguugcaggccuuauucaagcuuaccauggacuggaccuggauccuguuccugguggccgccgccaccagagugcacagcagcgccagcaaggaggugaagagcuuccuguggacccagagccugagaagagagcugagcggcuacugcagcaacaucaagcugcagguggugaaggacgcccaggcccugcugcacggccuggacuucagcgaggugagcaacgugcagagacugaugagaaagcagaagagagacgacggcgaccugaagagacugagagaccugaaccaggccgugaacaaccugguggagcugaagagcacccagcagaagagcgugcugagagugggcacccugagcagcgacgaccugcuggugcuggccgccgaccuggagaagcugaagagcaagguggugagaaccgagagaccccugagcagcggcaucuacaugggcaaccugagcagccagcagcuggaccagagaaaggcccugcugaacaugaucggcaugaccggcggcaacggcggcagaaacaccaccagcgacggcaucgugagagugugggacgugaagaacgccgagcugcugaacaaccaguucggcaccaugcccagccugacccuggccugccugaccaagcagggccagguggaccugaacgacgccgugcaggcccugaccgaccugggccugaucuacaccgccaaguaccccaacagcagcgaccuggacagacuggcccagagccaccccauccugaacaugaucgacaccaagaagagcagccugaacaucagcggcuacaacuucagccugggcgccgccgugaaggccggcgccugcaugcuggacggcggcaacaugcuggagaccaucaaggugagcccccagaccauggacggcauccugaagagcauccugaaggugaagagaagccugggcauguucaucagcgacacccccggcgagagaaaccccuacgagaacauccuguacaagaucugccugagcggcgacggcuggcccuacaucgccagcagaaccagcaucgugggcagagccugggagaacaccgugguggaccuggagagcgacaacaagccccagaagaccggcaacggcggcagcaacaagagccugcagagcgccggcuucgccgccggccugaccuacagccagcugaugacccugaaggacagcaugcugcagcuggaccccaacgccaagaccuggauggacaucgagggcagacccgaggaccccguggagaucgcccuguaccagcccagcagcggcugcuacauccacuucuucagagagcccaccgaccugaagcaguucaagcaggacgccaaguacagccacggcaucgacgugaccgaccuguucgccgcccagcccggccugaccagcgccgugaucgaggcccugcccagaaacauggugaucaccugccagggcagcgaggacaucagaaagcugcuggagagccagggcagaagagacaucaagcugaucgacaucagccugagcaagguggacagcagaaaguucgagaacgccgugugggaccaguucaaggaccugugccacaugcacaccggcaucgugguggagaagaagaagagaggcggcaaggaggagaucaccccccacugcgcccugauggacugcaucauguucgacgccgccgugagcggcggcguggacgccaaggugcugagagccgugcugcccagagacaugguguucagaaccagcacccccaagguggugcugugaggacuagucccuguucccagagcccacuuuuuuuucuuuuuuugaaauaaaauagccugucuuucagaucucaaaggcucuuuucagagccaccaaaaaaaaaaaaaaaaaaaaaaaaaaaaaaaaaaaaaaaaaaaaaaaaaaaaaaaaaaaaaaaaaaaaaaaaaaaaaaaaaaaaaaaaaaaaaaaaaaaaa

SEQ ID NO: 20985 - RNA, 2033 nt, Artificial Sequence
  mRNA product Design a-1 (hSL-A100) comprising derived and/or modified sequence from LASV(G1180-SLE-2010;Clade IV)__AIT17169__SP-IgE_NP(2-569) (opt4)
aggagagucccgcagucggcguccagcggcucugcuuguucgugugugugucguugcaggccuuauucaagcuuaccauggacuggaccuggauccuguuccugguggccgccgccaccagagugcacagcagcgccagcaaggagaucaagagcuuccuguggacccagagccugagaagagagcugagcggcuacugcagcaacaucaagcugcagguggugaaggacgcccaggcccugcugcacggccuggacuucagcgaggugagcaacgugcagagacugaugagaaaggagagaagagacgacaacgaccugaagagacugagagaccugaaccaggccgugaacaaccugguggagcugaagagcacccagcagaagagcauccugagagugggcacccugaccagcgacgaccugcugauccuggccgccgaccuggagaagcugaagagcaaggugaucagaaccgagagaccccugagcgccggcguguacaugggcaaccugagcagccagcagcuggaccagagaagagcccugcugagcaugaucggcaugagcagcggcaaccagagagcccaggccggcagagacggcguggugagagugugggacgugaagaacguggagcugcugaacaaccaguucggcaccaugcccagccugacccuggccugccugaccaagcagggccagguggaccugaacgacgccgugcaggcccugaccgaccugggccugaucuacaccgccaaguaccccaacaccagcgaccuggacagacugacccagagccaccccauccugaacaugaucgacaccaagaagagcagccugaacaucagcggcuacaacuucagccugggcgccgccgugaaggccggcgccugcaugcuggacggcggcaacaugcuggagaccaucaaggugagcccccagaccauggacggcauccugaagagcauccugaaggugaagaaggcccugggcauguucaucagcgacacccccggcgagagaaaccccuacgagaacauccuguacaagaucugccugagcggcgacggcuggcccuacaucgccagcagaaccagcaucaccggcagagccugggagaacaccgugguggaccuggagagcgacggcaagccccagaaggccggcagcaacaacagcaacaagagccugcagagcgugggcuucaccgccggccugaccuacagccagcugaugacccugaaggacgccaugcugcagcuggaccccaacgccaagaccuggauggacaucgagggcagacccgaggaccccguggagaucgcccuguaccagcccagcagcggcugcuacauccacuucuucagagagcccaccgaccugaagcaguucaagcaggacgccaaguacagccacggcaucgacgugaccgaccuguucgccgcccagcccggccugaccagcgccgugaucgacgcccugcccagaaacauggugaucaccugccagggcagcgacgacaucagaaagcugcuggagagccagggcagaaaggacaucaagcugaucgacaucgcccugagcaagaccgacagcagaaaguacgagaacgccgugugggaccaguacaaggaccugugccacaugcacaccggcguggugguggagaagaagaagagaggcggcaaggaggagaucaccccccacugcgcccugauggacugcaucauguucgacgccgccgugagcggcggccugaacaccagcgugcugagagccgugcugcccagagacaugguguucagaaccagcacccccagaguggugcugugaggacuagucccuguucccagagcccacuuuuuuuucuuuuuuugaaauaaaauagccugucuuucagaucucaaaggcucuuuucagagccaccaaaaaaaaaaaaaaaaaaaaaaaaaaaaaaaaaaaaaaaaaaaaaaaaaaaaaaaaaaaaaaaaaaaaaaaaaaaaaaaaaaaaaaaaaaaaaaaaaaaaa

SEQ ID NO: 20986 - RNA, 2033 nt, Artificial Sequence
  mRNA product Design a-1 (hSL-A100) comprising derived and/or modified sequence from LASV(G1442-SLE-2011;Clade IV)__AIT17181__SP-IgE_NP(2-569) (opt4)
aggagagucccgcagucggcguccagcggcucugcuuguucgugugugugucguugcaggccuuauucaagcuuaccauggacuggaccuggauccuguuccugguggccgccgccaccagagugcacagcagcgccagcaaggaggugaagagcuuccuguggacccagagccugagaagagagcugagcggcuacugcagcaacaucaagcugcagguggugaaggacgcccaggcccugcugcacggccuggacuucagcgaggugagcaacgugcagagacugaugagaaagcagagaagagacgacaacgaccugaagagacugagagaccugaaccaggccgugaacaaccugguggagcugaagagcacccagcagaagagcgugcugagagugggcacccugaccagcgacgaccugcuggugcuggccgccgaccuggagaagcugaagagcaaggugaucagaaccgagagaccccugagcgccggcguguacaugggcaaccugagcagccagcagcuggaccagagaagagcccugcugaacaugaucggcaugagcggcggcauccagggcaccagaaccggcagagacggcguggugagagugugggacgugaagaacgccgaccugcugaacaaccaguucggcaccaugcccagccugacccuggccugccugaccaagcagggccagguggaccugaacgacguggugcaggcccugaccgaccugggccugaucuacaccgccaaguaccccaacgccagcgaccuggacagacugacccagagccaccccauccugaacaugaucgacaccaagaagagcagccugaacaucagcggcuacaacuucagccugggcgccgccgugaaggccggcgccugcaugcuggacggcggcaacaugcuggagaccaucaaggugagcccccagaccauggacggcauccugaagagcauccugaaggugaagaagacccugggcauguucaucagcgacacccccggcgagagaaaccccuacgagaacauccuguacaagaucugccugagcggcgacggcuggcccuacaucgccagcagaaccagcaucaccggcagagccugggagaacaccgugguggaccuggagagcgacggcaagccccagaaggccggcagcaacaacagcaacaagagccugcagagcgccggcuucgccgccggccugaccuacagccagcugaugacccugaaggacgccaugcugcagcuggaccccaacgccaagaccuggauggacaucgagggcagacccgaggaccccguggagaucgcccuguaccagcccagcagcggcugcuacauccacuucuucagagagcccaccgaccugaagcaguucaagcaggacgccaaguacagccacggcaucgacgugaccgaccuguucgccgcccagcccggccugaccagcgccgugaucgaggcccugcccagaaacauggugaucaccugccagggcagcgacgacaucaagaagcugcuggagagccagggcagaaaggacaucaagcugaucgacaucgcccugagcaagaccgacagcagaaaguacgagaacgccgugugggaccaguacaaggaccugugccacaugcacaccggcguggugguggagaagaagaagagaggcggcaaggaggagaucaccccccacugcgcccugauggacugcaucauguucgacgccgccgugagcggcggccugaacacccuggugcugagagccgugcugcccagagacaugguguucagaaccagcacccccagaguggugcugugaggacuagucccuguucccagagcccacuuuuuuuucuuuuuuugaaauaaaauagccugucuuucagaucucaaaggcucuuuucagagccaccaaaaaaaaaaaaaaaaaaaaaaaaaaaaaaaaaaaaaaaaaaaaaaaaaaaaaaaaaaaaaaaaaaaaaaaaaaaaaaaaaaaaaaaaaaaaaaaaaaaaa

SEQ ID NO: 20987 - RNA, 2033 nt, Artificial Sequence
  mRNA product Design a-1 (hSL-A100) comprising derived and/or modified sequence from LASV(G3010-SLE-2013;Clade IV)__AIT17345__SP-IgE_NP(2-569) (opt4)
aggagagucccgcagucggcguccagcggcucugcuuguucgugugugugucguugcaggccuuauucaagcuuaccauggacuggaccuggauccuguuccugguggccgccgccaccagagugcacagcagcgccagcaaggagaucaagagcuuccuguggacccagagccugagaagagagcugagcggcuacugcagcaacaucaagcugcagguggugaaggacgcccaggcccugcugcacggccuggacuucagcgaggugagcaacgugcagagacugaugagaaaggagagaagagacgacaacgaccugaagagacugagagaccugaaccaggccgugaacaaccugguggagcugaagagcacccagcagaagagcauccugagagugggcacccugaccagcgacgaccugcugauccuggccgccgaccuggagaagcugaagagcaaggugaccagaaccgagagaccccugagcgccggcguguacaugggcaaccugagcagccagcagcuggaccagagaagagcccugcugagcaugaucggcaugagcagcggcgugcagggcgccagagccggcagagacggcguggugagagugugggacgugaagaacgccgagcugcugaacaaccaguucggcaccaugcccagccugacccuggccugccugaccaagcagggccagguggaccugaacgacguggugcaggcccugaccgaccugggccugaucuacaccgccaaguaccccaacaccagcgaccuggacagacugacccagagccaccccauccugaacaugaucgacaccaagaagagcagccugaacaucagcggcuacaacuucagccugggcgccgccgugaaggccggcgccugcaugcuggacggcggcaacaugcuggagaccaucaaggugagcccccagaccauggacggcauccugaagagcauccugaaggugaagaaggcccugggcauguucaucagcgagacccccggcgagagaaaccccuacgagaacauccuguacaagaucugccugagcggcgacggcuggcccuacaucgccagcagaaccagcaucaccggcagagccugggagaacaccgugguggaccuggagagcgacggcaagccccagaaggccggcagcaacaacagcaacaagagccugcagagcgccggcuucaccgccggccugaccuacagccagcugaugacccugaaggacgccaugcugcagcuggaccccaacgccaagaccuggauggacaucgagggcagacccgaggaccccguggagguggcccuguaccagcccagcagcggcugcuacauccacuucuucagagagcccaccgaccugaagcaguucaagcaggacgccaaguacagccacggcaucgacgugaccgaccuguucgccgcccagcccggccugaccagcgccgugaucgacgcccugcccagaaacauggugaucaccugccagggcagcgacgacaucaagaagcugcuggagagccagggcagaaaggacaucaagcugaucgacaucgcccugagcaagaccgacagcagaaaguacgagaacgccgugugggaccaguacaaggaccugugccacaugcacaccggcguggugguggagaagaagaagagaggcggcaaggaggagaucaccccccacugcgcccugauggacugcaucauguucgacgccgccgugagcggcggccugaacaccagcgugcugagagccgugcugcccagagacaugguguucagaaccagcacccccagaguggugcugugaggacuagucccuguucccagagcccacuuuuuuuucuuuuuuugaaauaaaauagccugucuuucagaucucaaaggcucuuuucagagccaccaaaaaaaaaaaaaaaaaaaaaaaaaaaaaaaaaaaaaaaaaaaaaaaaaaaaaaaaaaaaaaaaaaaaaaaaaaaaaaaaaaaaaaaaaaaaaaaaaaaaa

SEQ ID NO: 20988 - RNA, 2033 nt, Artificial Sequence
  mRNA product Design a-1 (hSL-A100) comprising derived and/or modified sequence from LASV(G502-SLE-2009;Clade IV)__AIT17127__SP-IgE_NP(2-569) (opt4)
aggagagucccgcagucggcguccagcggcucugcuuguucgugugugugucguugcaggccuuauucaagcuuaccauggacuggaccuggauccuguuccugguggccgccgccaccagagugcacagcagcgccagcaaggagaucaagagcuuccuguggacccagagccugagaagagagcugagcggcuacugcagcaacaucaagcugcagguggugaaggacgcccaggcccugcugcacggccuggacuucagcgaggugagcaacgugcagagacugaugagaaaggagagaagagacgacaacgaccugaagagacugagagaccugaaccaggccgugaacaaccugguggagcugaagagcacccagcagaagagcauccugagagugggcacccugaccagcgacgaccugcugauccuggccgccgaccuggagaagcugaagagcaaggugaucagaaccgagagaccccugagcgccggcguguacaugggcaaccugagcagccagcagcuggaccagagaagagcccugcugagcaugaucggcaugagcggcggcaaccagggcgugagagccggcaaggacggcguggugagagugugggacgugaagaacgccgagcugcugaacaaccaguucggcaccaugcccagccugacccuggccugccugaccaagcagggccagguggaccugaacgacgccgugcaggcccugaccgaccugggccugaucuacaccgccaaguaccccaacaccagcgaccuggacagacugacccagagccaccccauccugaacaugaucgacaccaagaagagcagccugaacaucagcggcuacaacuucagccugggcgccgccgugaaggccggcgccugcaugcuggacggcggcaacaugcuggagaccaucaaggugagcccccagaccauggacggcauccugaagagcauccugaaggugaagaaggcccugggcauguucaucagcgacacccccggcgagagaaaccccuacgagaacauccuguacaagaucugccugagcggcgacggcuggcccuacaucgccagcagaaccagcaucaccggcagagccugggagaacaccgugguggaccuggagagcgacggcaagccccagaaggccggcagcaacaacagcaacaagagccugcagagcgccggcuucaccgccggccugaccuacagccagcugaugacccugaaggacgccaugcugcagcuggaccccaacaccaagaccuggauggacaucgagggcagacccgaggaccccguggagaucgcccuguaccagcccagcagcggcugcuacauccacuucuucagagagcccaccgaccugaagcaguucaagcaggacgccaaguacagccacggcaucgacgugaccgaccuguucgccgcccagcccggccugaccagcgccgugaucgacgcccugcccagaaacauggugaucaccugccagggcagcgacgacaucagaaagcugcuggagagccagggcagaaaggacaucaagcugaucgacaucgcccugaacaagaccgacagcagaaaguacgagaacgccgugugggaccaguacaaggaccugugccacaugcacaccggcguggugguggagaagaagaagagaggcggcaaggaggagaucaccccccacugcgcccugauggacugcaucauguucgacgccgccgugagcggcggccugaacaccagcgugcugagagccgugcugcccagagacaugguguucagaaccagcacccccagaguggugcugugaggacuagucccuguucccagagcccacuuuuuuuucuuuuuuugaaauaaaauagccugucuuucagaucucaaaggcucuuuucagagccaccaaaaaaaaaaaaaaaaaaaaaaaaaaaaaaaaaaaaaaaaaaaaaaaaaaaaaaaaaaaaaaaaaaaaaaaaaaaaaaaaaaaaaaaaaaaaaaaaaaaaa

SEQ ID NO: 20989 - RNA, 2033 nt, Artificial Sequence
  mRNA product Design a-1 (hSL-A100) comprising derived and/or modified sequence from LASV(G733-SLE-2010;Clade IV)__AIT17155__SP-IgE_NP(2-569) (opt4)
aggagagucccgcagucggcguccagcggcucugcuuguucgugugugugucguugcaggccuuauucaagcuuaccauggacuggaccuggauccuguuccugguggccgccgccaccagagugcacagcagcgccagcaaggagaucaagagcuuccuguggacccagagccugagaagagagcugagcggcuacugcagcaacaucaagcugcagguggugaaggacgcccaggcccugcugcacggccuggacuucagcgaggugagcaacgugcagagacugaugagaaaggagagaagagacgacaacgaccugaagagacugagagaccugaaccaggccgugaacaaccugguggagcugaagagcacccagcagaagagcgugcugagagugggcacccugaccagcgacgagcugcuggugcuggccgccgaccuggagaagcugaagagcaaggugaucagaaccgagagaccccugagcgccggcguguacaugggcaaccugagcagccagcagcuggaccagagaagagcccugcugagcaugaucggcaugagcggcggcaaccagggcgccagaaccggcagagacggcguggugagagugugggacgugaagaacgccgagcugcugaacaaccaguucggcaccaugcccagccugacccuggccugccugaccaagcagggccagguggaccugaacgacgccgugcaggcccugaccgaccugggccugaucuacaccgccaaguaccccaacaccagcgaccuggacagacugacccagagccaccccauccugaacaugaucgacaccaagaagagcagccugaacaucagcggcuacaacuucagccugggcgccgccgugaaggccggcgccugcaugcuggacggcggcaacaugcuggagaccaucaaggugagcccccagaccauggacggcauccugaagagcauccugaaggugaagaaggcccugggcauguucaucagcgacacccccggcgagagaaaccccuacgagaacauccuguacaagaucugccugagcggcgacggcuggcccuacaucgccagcagaaccagcaucaccggcagagccugggagaacaccgugguggaccuggagagcgacggcaagccccagaaggccggcagcaacaacagcaacaagagccugcagagcgccggcuucaccgccggccugaccuacagccagcugaugacccugaaggacgccaugcugcagcuggaccccaacgccaagaccuggauggacaucgagggcagacccgaggaccccguggagaucgcccuguaccagcccagcagcggcugcuacauccacuucuucagagagcccaccgaccugaagcaguucaagcaggacgccaaguacagccacggcaucgacgugaccgaccuguucgccgcccagcccggccugaccagcgccgugaucgacgcccugcccagaaacauggugaucaccugccagggcagcgacgacaucagaaagcugcuggagagccagggcagaaaggacaucaagcugaucgacaucgcccugagcaagaucgacagcagaaaguacgagaacgccgugugggaccaguacaaggaccugugccacaugcacaccggcguggugguggagaagaagaagagaggcggcaaggaggagaucaccccccacugcgcccugauggacugcaucauguucgacgccgccgugagcggcggccugaacagccuggugcugagagccgugcugcccagagacaugguguucagaaccagcacccccagaguggugcugugaggacuagucccuguucccagagcccacuuuuuuuucuuuuuuugaaauaaaauagccugucuuucagaucucaaaggcucuuuucagagccaccaaaaaaaaaaaaaaaaaaaaaaaaaaaaaaaaaaaaaaaaaaaaaaaaaaaaaaaaaaaaaaaaaaaaaaaaaaaaaaaaaaaaaaaaaaaaaaaaaaaaa

SEQ ID NO: 20990 - RNA, 2033 nt, Artificial Sequence
  mRNA product Design a-1 (hSL-A100) comprising derived and/or modified sequence from MOPV/LASV reassortant(IGS-1;Clade IV)__AFY05578__SP-IgE_NP(2-569) (opt4)
aggagagucccgcagucggcguccagcggcucugcuuguucgugugugugucguugcaggccuuauucaagcuuaccauggacuggaccuggauccuguuccugguggccgccgccaccagagugcacagcagcgccagcaaggagaucaagagcuuccuguggacccagagccugagaagagagcugagcggcuacugcagcaacaucaagcugcagguggugaaggacgcccaggcccugcugcacggccuggacuucagcgaggugagcaacgugcagagacugaugagaaaggagagaagagacgacaacgaccugaagagacugagagaccugaaccaggccgugaacaaccugguggagcugaagagcacccagcagaagagcauccugagagugggcacccugaccagcgacgaccugcugauccuggccgccgaccuggagaagcugagaagcaaggugaucagaaccgagagaccccugagcgccggcguguacaugggcaaccugagcagccagcagcuggaccagagaagagcccugcugaacaugaucggcaugagcggcggcaaccagggcgccagagccggcagagacggcguggugagagugugggacgugaagaacgccgagcugcugagcaaccaguucggcaccaugcccagccugacccuggccugccugaccaagcagggccagguggaccugaacgacgccgugcaggcccugaccgaccugggccugaucuacaccgccaaguaccccaacaccagcgaccuggacagacugacccagagccaccccauccugaacaugaucgacaccaagaagagcagccugaacaucagcggcuacaacuucagccugggcgccgccgugaaggccggcgccugcaugcuggacggcggcaacaugcuggagaccaucaaggugagcccccagaccauggacggcauccugaagagcauccugaaggugaagaaggcccugggcauguucaucagcgacacccccggcgagagaaaccccuacgagaacauccuguacaagaucugccugagcggcgacggcuggcccuacaucgccagcagaaccagcaucaccggcagagccugggagaacaccgugguggaccuggagagcgacggcaagccccagaaggccgacagcaacaacagcagcaagagccugcagagcgccggcuucaccgccggccugaccuacagccagcugaugacccugaaggacgccaugcugcagcuggaccccaacgccaagaccuggauggacaucgagggcagacccgaggaccccguggagaucgcccuguaccagcccagcagcggcugcuacauccacuucuucagagagcccaccgaccugaagcaguucaagcaggacgccaaguacagccacggcaucgacgugaccgaccuguucgccacccagcccggccugaccagcgccgugaucgacgcccugcccagaaacauggugaucaccugccagggcagcgacgacaucagaaagcugcuggagagccagggcagaaaggacaucaagcugaucgacaucgaccugagcaagaccgacagcagaaaguacgagaacgccgugugggaccaguacaaggaccugugccacaugcacaccggcguggugguggagaagaagaagagaggcggcaaggaggagaucaccccccacugcgcccugauggacugcaucauguucgacgccgccgugagcggcggccugaacaccagcgugcugagagccgugcugcccagagacaugguguucagaaccagcacccccagaguggugcugugaggacuagucccuguucccagagcccacuuuuuuuucuuuuuuugaaauaaaauagccugucuuucagaucucaaaggcucuuuucagagccaccaaaaaaaaaaaaaaaaaaaaaaaaaaaaaaaaaaaaaaaaaaaaaaaaaaaaaaaaaaaaaaaaaaaaaaaaaaaaaaaaaaaaaaaaaaaaaaaaaaaaa

SEQ ID NO: 20991 - RNA, 2033 nt, Artificial Sequence
  mRNA product Design a-1 (hSL-A100) comprising derived and/or modified sequence from LASV(LM765-SLE-2012;Clade IV)__AIT17815__SP-IgE_NP(2-569) (opt4)
aggagagucccgcagucggcguccagcggcucugcuuguucgugugugugucguugcaggccuuauucaagcuuaccauggacuggaccuggauccuguuccugguggccgccgccaccagagugcacagcagcgccagcaaggagaucaagagcuuccuguggacccagagccugagaagagagcugagcggcuacugcagcaacaucaagcugcagguggugaaggacgcccaggcccugcugcacggccuggacuucagcgaggugagcaacgugcagagacugaugagaaaggagagaagagacgacaacgaccugaagagacugagagaccugaaccaggccgugaacaaccugguggagcugaagagcacccagcagaagagcauccugagagugggcacccugaccagcgacgaccugcugauccuggccgccgaccuggagaagcugaagagcaaggugaccagaaccgagagaccccugagcgccggcguguacaugggcaaccugagcagccagcagcuggaccagagaagagcccugcuggacaugaucggcaugagcggcagcaaccagggcgccagagccggcagagacggcguggugagagugugggacgugaagaacgccgagcugcugaacaaccaguucggcaccaugcccagccugacccuggccugccugaccaagcagggccagguggaccugaacgacgccgugcaggcccugaccgaccugggccugaucuacaccgccaaguaccccaacaccagcgaccuggacagacugacccagagccaccccauccugaacaugaucgacaccaagaagagcagccugaacaucagcggcuacaacuucagccugggcgccgccgugaaggccggcgccugcaugcuggacggcggcaacaugcuggagaccaucaaggugagcccccagaccauggacggcauccugaagagcauccugaaggugaagaaggcccugggcauguucaucagcgacgcccccggcgagagaaaccccuacgagaacauccuguacaagaucugccugagcggcgacggcuggcccuacaucgccagcagaaccagcaucaccggcagagccugggagaacaccgugguggaccuggagagcgacggcaagccccagaaggccggcagcaacggcagcaacaagagccugcagagcgccggcuucaccgccggccugaccuacagccagcugaugacccugaaggacgccaugcugcagcuggaccccaacgccaagaccuggauggacaucgagggcagacccgaggaccccguggagaucgcccuguaccagcccagcagcggcugcuacauccacuucuucagagagcccaccgaccugaagcaguucaagcaggacgccaaguacagccacggcaucgacgugaccgaccuguucgccgcccagcccggccugaccagcgccgugaucgacgcccugcccagaaacauggugaucaccugccagggcagcgacgacaucagaaagcuguucgagagccagggcagaaaggacaucaagcugaucgacaucgcccugagcaagaccgacagcagaaaguacgagaacgccgugugggaccaguacaaggaccugugccacaugcacaccggcaucgugguggagaagaagaagagaggcggcaaggaggagaucaccccccacugcgcccugauggacugcaucauguucgacgccgccgugagcggcggccugaacaccagcgugcugagagccgugcugcccagagacaugguguucagaaccagcacccccagaguggugcugugaggacuagucccuguucccagagcccacuuuuuuuucuuuuuuugaaauaaaauagccugucuuucagaucucaaaggcucuuuucagagccaccaaaaaaaaaaaaaaaaaaaaaaaaaaaaaaaaaaaaaaaaaaaaaaaaaaaaaaaaaaaaaaaaaaaaaaaaaaaaaaaaaaaaaaaaaaaaaaaaaaaaa

SEQ ID NO: 20992 - RNA, 2033 nt, Artificial Sequence
  mRNA product Design a-1 (hSL-A100) comprising derived and/or modified sequence from LASV(LM776-SLE-2012;Clade IV)__AIT17825__SP-IgE_NP(2-569) (opt4)
aggagagucccgcagucggcguccagcggcucugcuuguucgugugugugucguugcaggccuuauucaagcuuaccauggacuggaccuggauccuguuccugguggccgccgccaccagagugcacagcagcgccagcaaggagaucaagagcuuccuguggacccagagccugagaagagagcugagcagcuacugcagcaacaucaagcugcagguggugaaggacgcccaggcccugcugcacggccuggacuucagcgaggugagcaacgugcagagacugaugagaaaggagagaagagacgacaacgaccugaagagacugagagaccugaaccaggccgugaacaaccugguggagcugaagagcacccagcagaagagcauccugagagugggcacccugaccagcgacgaccugcugauccuggccgccgaccuggagaagcugaagagcaaggugaccagaaccgagagaccccugagcgccggcguguacaugggcaaccugagcagccagcagcuggaccagagaagagcccugcugagcaugaucggcaugagcggcagcaaccagggcgccagagccggcagagacggcguggugagagugugggacgugaagaacgccgagcugcugaacaaccaguucggcaccaugcccagccugacccuggccugccugaccaagcagggccagguggaccugaacgacgccgugcaggcccugaccgaccugggccugaucuacaccgccaaguaccccaacaccagcgaccuggacagacugacccagagccaccccauccugaacaugaucgacaccaagaagagcagccugaacaucagcggcuacaacuucagccugggcgccgccgugaaggccggcgccugcaugcuggacggcggcaacaugcuggagaccaucaaggugagcccccagaccauggacggcauccugaagagcauccugaaggugaagaaggcccugggcauguucaucagcgacacccccggcgagagaaaccccuacgagaacauccuguacaagaucugccugagcggcgacggcuggcccuacaucgccagcagaaccagcaucaccggcagagccugggagaacaccgugguggaccuggagagcgacggcaagccccagaaggccggcagcaacaacagcaacaagagccugcagagcgccggcuucaccgccggccugaccuacagccagcugaugacccugaaggacgccaugcugcagcuggaccccaacgccaagaccuggauggacaucgagggcagacccgaggaccccguggagguggcccuguaccagcccagcagcggcugcuacauccacuucuucagagagcccaccgaccugaagcaguucaagcaggacgccaaguacagccacggcaucgacgugaccgaccuguucgccgcccagcccggccugaccagcgccgugaucgacgcccugcccagaaacauggugaucaccugccagggcagcgacgacaucagaaagcugcuggagagccagggcagaaaggacaucaagcugaucgacaucgcccugagcaagaccgacagcagaaaguacgagaacgccgugugggaccaguacaaggaccugugccacaugcacaccggcguggugguggagaagaagaagagaggcggcaaggaggagaucaccccccacugcgcccugauggacugcaucauguucgacgccgccgugagcggcggccugaacaccagcgugcugagagccgugcugcccagagacaugguguucagaaccagcacccccagaguggugcugugaggacuagucccuguucccagagcccacuuuuuuuucuuuuuuugaaauaaaauagccugucuuucagaucucaaaggcucuuuucagagccaccaaaaaaaaaaaaaaaaaaaaaaaaaaaaaaaaaaaaaaaaaaaaaaaaaaaaaaaaaaaaaaaaaaaaaaaaaaaaaaaaaaaaaaaaaaaaaaaaaaaaa

SEQ ID NO: 20993 - RNA, 2033 nt, Artificial Sequence
  mRNA product Design a-1 (hSL-A100) comprising derived and/or modified sequence from LASV(Mad39;Clade IV)__ANH09723__SP-IgE_NP(2-569) (opt4)
aggagagucccgcagucggcguccagcggcucugcuuguucgugugugugucguugcaggccuuauucaagcuuaccauggacuggaccuggauccuguuccugguggccgccgccaccagagugcacagcagcgccagcaaggagaucaagagcuuccuguggacccagagccugagaagagagcugagcggcuacugcagcaacaucaagcugcagguggugaaggacgcccaggcccugcugcacggccuggacuucagcgaggugagcaacgugcagagacugaugagaaagcagagaagagacgacaacgaccugaagagacugagagaccugaaccaggccgugaacaaccugguggagcugaagagcacccagcagaagagcgugcugagagugggcacccugaccagcgacgaccugcugacccuggccgccgaccuggagaagcugaagagcaaggugaccagaaccgagagaccccugaccgccggcguguacaugggcaaccugagcagccagcagcuggaccagagaagagcccugcugaacaugaucggcaugagcggcggcaaccagggcgccagaaccggcagagacggcguggugagagugugggacgugaagaacgccgagcugcugaacaaccaguucggcaccaugcccagccugacccuggccugccugaccaagcagggccagguggaccugaacgacguggugcaggcccugaccgaccugggccugaucuacaccgccaaguaccccaacaccagcgaccuggacagacugacccagagccaccccauccugaacaugaucgacaccaacaagagcagccugaacaucagcggcuacaacuucagccugggcgccgccgugaaggccggcgccugcaugcuggacggcggcaacaugcuggagaccaucaaggugagcccccagaccauggacggcauccugaagagcauccugaaggugaagaagagccugggcauguucaucagcgacacccccggcgagagaaaccccuacgagaacauccuguacaagaucugccugagcggcgacggcuggcccuacaucgccagcagaaccagcaucaccggcagagccugggagaacaccgugguggaccuggagagcggcggcaagccccagaaggccggcagcaacaacagcaacaagagccugcagagcgccggcuucgccgccggccugaccuacagccagcugaugacccugaaggacgccaugcugcagcuggaccccaacgccaagaccuggauggacaucgagggcagacccgaggaccccguggagaucgcccuguaccagcccaucagcggcugcuacauccacuucuucagagagcccaccgaccugaagcaguucaagcaggacgccaaguacagccacggcaucgacgugaccgaccuguucgccgcccagcccggccugaccagcgccgugaucgaggcccugcccagaaacauggugaucaccugccagggcagcgacgacaucagaaagcuguucgagagccagggcagaaaggacaucaagcugaucgacaucgcccugagcaagaccgacagcagaaaguacgagaacgccgugugggaccaguacaaggaccugugccacaugcacaccggcguggugguggagaagaagaagaagggcggcaaggaggagaucaccccccacugcgcccugauggacugcaucauguucgacgccgccgugagcggcggccugaacacccuggugcugagagccgugcugcccagagacaugguguucagaaccagcacccccaagguggugcugugaggacuagucccuguucccagagcccacuuuuuuuucuuuuuuugaaauaaaauagccugucuuucagaucucaaaggcucuuuucagagccaccaaaaaaaaaaaaaaaaaaaaaaaaaaaaaaaaaaaaaaaaaaaaaaaaaaaaaaaaaaaaaaaaaaaaaaaaaaaaaaaaaaaaaaaaaaaaaaaaaaaaa

SEQ ID NO: 20994 - RNA, 2033 nt, Artificial Sequence
  mRNA product Design a-1 (hSL-A100) comprising derived and/or modified sequence from LASV(Z0947-SLE-2011;Clade IV)__AIT17841__SP-IgE_NP(2-569) (opt4)
aggagagucccgcagucggcguccagcggcucugcuuguucgugugugugucguugcaggccuuauucaagcuuaccauggacuggaccuggauccuguuccugguggccgccgccaccagagugcacagcagcgccagcaaggagaucaagagcuuccuguggacccagagccugagaagagagcugagcggcuacugcagcaacaucaagcugcagguggugaaggacgcccaggcccugcugcacggccuggacuucagcgaggugagcaacgugcagagacugaugagaaaggagagaagagacgacaacgaccugaagagacugagagaccugaaccaggccgugaacaaccugguggagcugaagagcacccagcagaagagcauccugagagugggcacccugaccagcgacgaccugcugauccuggccgccgaccuggagaagcugaagagcaaggugaccagaaccgagagaccccugagcgccggcguguacaugggcaaccugagcagccagcagcuggaccagagaagagcccugcugaacaugaucggcaugagcggcagcaaccagggcgccagaaccggcagagacggcguggugagagugugggacgugaagaacgccgagcugcugaacaaccaguucggcaccaugcccagccugacccuggccugccugaccaagcagggccagguggaccugaacgacgccgugcaggcccugaccgaccugggccugaucuacaccgccaaguaccccaacaccagcgaccuggacagacugacccagagccaccccauccugaacaugaucgacaccaagaagagcagccugaacaucagcggcuacaacuucagccugggcgccgccgugaaggccggcgccugcaugcuggacggcggcaacaugcuggagaccaucaaggugagcccccagaccauggacggcauccugaagagcauccugaaggugaagaaggcccugggcauguucaucagcgacgcccccggcgagagaaaccccuacgagaacauccuguacaagaucugccugagcggcgacggcuggcccuacaucgccagcagaaccagcaucaccggcagagccugggagaacaccgugguggaccuggagagcgacggcaagccccagaaggccggcagcaacggcagcaacaagagccugcagagcgccggcuucaccgccggccugaccuacagccagcugaugacccugaaggacgccaugcugcagcuggaccccaacgccaagaccuggauggacaucgagggcagacccgaggaccccguggagaucgcccuguaccagcccagcagcggcugcuacauccacuucuucagagagcccaccgaccugaagcaguucaagcaggacgccaaguacagccacggcaucgacgugaccgaccuguucgccgcccagcccggccugaccagcgccgugaucgacgcccugcccagaaacauggugaucaccugccagggcagcgacgacaucagaaagcuguucgagagccagggcagaaaggacaucaagcugaucgacaucgcccugagcaagaccgacagcagaaaguacgagaacgccgugugggaccaguacaaggaccugugccacaugcacaccggcaucgugguggagaagaagaagagaggcggcaaggaggagaucaccccccacugcgcccugauggacugcaucauguucgacgccgccgugagcggcggccugaacaccagcgugcugagagccgugcugcccagagacaugguguucagaaccagcacccccagaguggugcugugaggacuagucccuguucccagagcccacuuuuuuuucuuuuuuugaaauaaaauagccugucuuucagaucucaaaggcucuuuucagagccaccaaaaaaaaaaaaaaaaaaaaaaaaaaaaaaaaaaaaaaaaaaaaaaaaaaaaaaaaaaaaaaaaaaaaaaaaaaaaaaaaaaaaaaaaaaaaaaaaaaaaa

SEQ ID NO: 20995 - RNA, 2033 nt, Artificial Sequence
  mRNA product Design a-1 (hSL-A100) comprising derived and/or modified sequence from LASV(Josiah;Clade IV)__NP_694869__SP-IgE_NP(2-569) (opt5)
aggagagucccgcagucggcguccagcggcucugcuuguucgugugugugucguugcaggccuuauucaagcuuaccauggacuggaccuggauccuguuccucguggccgcugccacaagaguccacagcagcgccuccaaggagaucaaaucuuuccuguggacccagagccucagacgggaacuguccggcuacugcucuaacauuaagcugcaaguggucaaagacgcucaggcccugcuccacgggcuggauuuuagcgagguuuccaaugugcagcgccuuaugagaaaggaacggcgcgacgauaacgaccugaaaagacuccgggaucugaaucaggcggugaacaaucuggucgagcucaagucuacacaacaaaagagcauccugcgcgugggaacgcuuaccuccgacgaucugcucauucuggcugccgaccuugaaaaacuuaagagcaaaguuaucagaacagagcggccccucucugccggcguguauauggggaaccuguccagccagcagcuggaucagcgcagagcucuccugaauaugauuggaaugucuggcgggaaccagggagcccgggcuggccgcgacggcgucgugagaguuugggaugugaagaaugccgagcuucugaacaaucaguucgggaccaugccuucccucacacuggcgugucuuaccaaacagggacaagucgaccugaacgaugccgugcaggcucucacagaccugggccugaucuacaccgccaaguauccgaauacgagcgaccucgaucggcugacccagucucaucccauccuuaacaugauugacacaaagaaauccagccugaauaucuccggguacaacuuuucucucggagcugccgugaaggcgggcgccugcaugcuggaugggggaaacaugcuugaaaccauuaaagucagcccucaaacaauggacggcauccugaaguccauucucaaaguuaagaaagcucugggcauguucaucagcgauacccccggggagcgcaauccuuaugaaaacauucuguacaagaucugucucucuggagacggcuggcccuauaucgccuccagaacgagcauuacagggcgggcuugggagaauaccgugguggaucuggagucugacggaaagccucagaaagccgauagcaacaauuccucuaagagccuucaguccgccggcuuuacagcugggcugaccuacagccagcucaugacccugaaagacgcgaugcugcaacuugauccgaacgccaagacauggauggacaucgaaggaagacccgaggacccugucgaaauugcucucuaccagcccucuuccggcugcuauauccacuucuuucgcgagccuacggaucugaaacaguucaagcaggacgccaaguacagccauggcauugaugugaccgaccuguuugccacacaacccgggcucaccucugcuguuaucgaugcccugccgcggaauauggugaucacaugucagggauccgacgauauuagaaaacuucuggaaagccagggccgcaaggacaucaaacucauugauaucgcgcuguccaagaccgacucucggaaauaugagaacgcugucugggaucaguacaaggaccugugccacaugcauacgggggugguuguggagaagaaaaagagaggaggcaaagaagagauuacaccucacugugcccuuauggauugcaucauguucgacgccgcugucagcgggggccucaauaccuccgugcugcgcgccguccugccccgggacaugguguuuagaaccucuacaccucgcguugugcucugaggacuagucccuguucccagagcccacuuuuuuuucuuuuuuugaaauaaaauagccugucuuucagaucucaaaggcucuuuucagagccaccaaaaaaaaaaaaaaaaaaaaaaaaaaaaaaaaaaaaaaaaaaaaaaaaaaaaaaaaaaaaaaaaaaaaaaaaaaaaaaaaaaaaaaaaaaaaaaaaaaaaa

SEQ ID NO: 20996 - RNA, 2033 nt, Artificial Sequence
  mRNA product Design a-1 (hSL-A100) comprising derived and/or modified sequence from LASV(LP;Clade I)__AAF86702__SP-IgE_NP(2-569) (opt5)
aggagagucccgcagucggcguccagcggcucugcuuguucgugugugugucguugcaggccuuauucaagcuuaccauggacuggaccuggauccuguuccucguggccgcugccacaagaguccacagcagcaacuccaaggagaucaaaucuuuccuguggacccagagccucagacgggaacuguccggcuacugcucuaauauuaagcuccaaguggucaaagacgcccaggcucugcuccacgggcuggauuuuagcgagguuuccaacgugcagcgccuuaugagaaagcagaaacgggacgaugccgaccugaagcgccucagagaucugaaucaagcggugaacaaucuggucgaacucaagucuacacagcagaaaaacgugcugcggguuggaacgcuuagcuccgacgaucugaucacccucgcugccgaccuggagaaacuuaaaagcaaggugauucgcacagaaagaccccugucuuccggcgucuauauggggaaucucagcucucagcaacuggaucagcggcgcgcccugcucuccaugaucggaaugagcggcgggccucagggaaacagaaccggcggcgacggggugguucgggugugggaugucaaaaaugcugagcugcuuaacaaucaguucggaacaaugccgucucugacccucgccugucugacaaagcaaggccagguggaccuuaacgaugcugugcaggcccugaccgaccucgggcugauuuacacggcgaaguaucccaauuccagcgaccuggauaugcucacccaaucccauccuauccugggaauggucgacacaaagaagucuagccuuaacaucuccggcuacaauuuuagccugggggccgcuguuaaagccggagcuugcaugcucgauggcggcaacaugcuggagaccauuaaggugucuccccagacaauggacgggauccuuaaauccauucugaaggugaaacgcagccucggaauguucaucucugauaccccuggcgaaagaaaccccuaugagaauauucuguacaagaucugucugagcggggaaggauggccuuauauugccucccggacgucuaucacaggccgcgcgugggagaacacccucgucgaccuggagagcgauaauaagccgcccaaacuuaacuccgccgggagcaauaagucucugcaggcugccggacucaacgcuggccugacauacucccagcugaugacccuuaaagacugcaugcuccaacuggauccuagcucuaagaccuggaucgacauugaaggcagacccgaggauccuguggaaaucgcccuguuucagcccuccagcggguguuacauucacuucuuucgggagccgacagaccucaaacaguucaagcaggacgccaaguauucccauggaaucgauguuacggaccuguuuucuacccaaccuggccuuacaagcgcugugauugaagcgcugcccagaaauaugguccuuaccugccagggguccgaugacaucaaaaagcugcuggagucucagggacgccgggauaucaaacuuauugacaucagccucuccaaggccgauagcagaaaauucgagaacgcugugugggaccaguacaaggaucugugucacaugcauacaggcguuguggucgaaaagaaaaagcgcgggggcaaagaggaaauuaccccucacugcgcccugcucgacuguaucauguuugaugccgcuacgacaggaucucugaauauuaccacccuucgggccgugcugcccagagacauggucuuccgcacauccacccccaaggugguucucugaggacuagucccuguucccagagcccacuuuuuuuucuuuuuuugaaauaaaauagccugucuuucagaucucaaaggcucuuuucagagccaccaaaaaaaaaaaaaaaaaaaaaaaaaaaaaaaaaaaaaaaaaaaaaaaaaaaaaaaaaaaaaaaaaaaaaaaaaaaaaaaaaaaaaaaaaaaaaaaaaaaaa

SEQ ID NO: 20997 - RNA, 2033 nt, Artificial Sequence
  mRNA product Design a-1 (hSL-A100) comprising derived and/or modified sequence from LASV(803213;Clade II)__AAF86704__SP-IgE_NP(2-569) (opt5)
aggagagucccgcagucggcguccagcggcucugcuuguucgugugugugucguugcaggccuuauucaagcuuaccauggacuggaccuggauccuguuccucguggccgcugccacaagaguccacagcagcgccuccaaggaggugaaaucuuuccuguggacccagagccucagacgggaacuguccggcuacugcucuaacaucaaacuucaagucguuaaggacgcucaggcccugcuccacgggcuggauuuuagcgaggugaauaacgugcagcgccuuaugagaaagcagaaacgggacgauggagaccugaagcgccucagagaucugaaucaagcggucaacaaucugguggaacucaaguccacacagcagaaaucuauucugcggguuggcacgcuuaccagcgacgaucugcucacacuggcugccgaccuugagaagcugaaauccaaggugauccgcaccgaaagaccccucagcucuggggucuauaugggaaaccuguccacacagcaacuggagcagcggcgcgcccuccugaauaugauuggcauggugggaggagcucagggcacccagccuggcagagaugggguugugcgggucugggacgugaaaaacccggaucuucugaauaaccaauucggaacaaugcccagccucacccuggccugucuuacgaagcagggccagguggaccugaaugaugcuguccucgcccugaccgaccuggggcucaucuacacagcgaaguauccuaacucuuccgaccuggaucgccuuagccaaucucaucccauucugaauaugguugacaccaaaaaguccagccucaacaucuccggauacaauuuuucucugggcgccgcugugaaagccggggcuugcaugcuugauggaggcaacaugcuggagacaaucaaggugaccccucagacgauggacggcauucucaaaagcauccugaaggucaaaagaucccuggggauguucgugagcgauacacccggagaacggaacccuuaugagaauauucucuacaagaucugucugucuggcgacggguggccguauauugccucccgcaccagcaucguugggagagcgugggaaaacacaaccguggaucuugagucugacggcaagccccagaaagucgggaccgccggaagcaauaagucccugcagucugcuggcuuuccuacaggccucacguacagccaacugaugacccugaaagauuccaugaugcagcuugaccccagcgccaagacauggauugauaucgaggggcggccugaagaccccguggagaucgcucucuaccagccgaugucuggaugcuauauucacuucuuuagagaaccuaccgaccugaaacaguucaagcaagaugccaaguacucccauggcaucgacguugccgaucuguuucccgcucagccugggcucacaagcgcggugauugaggcccugccccgcaacaugguccuuaccugucagggaucugacgauaucaaaaagcugcucgacucccagggccggagagauauuaaacugaucgacaucagccuguccaagguggauucucgcaaauucgaaaaugcugucugggaccaaugcaaggaucuuugucacaugcauacgggggugguuguggagaagaaaaagcggggcggaaaagaggaaauuacaccccacugcgcccucauggacuguaucauguuugaugccgcugucagcggcgggcugaacauuccugugcugagagccguucucccgcgcgacaugguguuccggaccuccucucccaaggucgugcugugaggacuagucccuguucccagagcccacuuuuuuuucuuuuuuugaaauaaaauagccugucuuucagaucucaaaggcucuuuucagagccaccaaaaaaaaaaaaaaaaaaaaaaaaaaaaaaaaaaaaaaaaaaaaaaaaaaaaaaaaaaaaaaaaaaaaaaaaaaaaaaaaaaaaaaaaaaaaaaaaaaaaa

SEQ ID NO: 20998 - RNA, 2036 nt, Artificial Sequence
  mRNA product Design a-1 (hSL-A100) comprising derived and/or modified sequence from LASV(GA391;Clade III)__CAA36646__SP-IgE_NP(2-570) (opt5)
aggagagucccgcagucggcguccagcggcucugcuuguucgugugugugucguugcaggccuuauucaagcuuaccauggacuggaccuggauccuguuccucguggccgcugccacaagaguccacagcagcgccuccaaggaggugagaucuuuccuguggacccagagccuccggcgcgaacuguccggcuacugcucuaacaucaaacuucaagucguuaaggacgcucaggcccugcuccacgggcuggauuuuagcgagguguccaaugugcagagacuuaugcggaaacagaagcgcgacgauggagaccugaaaagacuccgggaucugaaccaagcggucaauaaccugguggaacucaagucuacacagcagaaaagcguucugcgcgugggcacgcuuuccagcgacgaucugcucauucuggcugccgaccuugagaaacugaagucuaaagucaccagaacagaacggccccucuccagcgggguguauaugggaaaucugucuucccagcaacuggaucagcgcagagcccuccugaacaugaucggcaugaccgggguuagcggaggcggcaagggggcuucugacggaauugugcgggucugggaugugaaaaaugccgagcuucugaacaaucaguucggcacaaugccuucccucacccuggcuugucuuacaaagcaggggcaaguggaccugaacgaugccguccaggcgcucaccgaccugggacugaucuacacggccaaguauccgaauagcuccgaccucgaucgccugucucagagccaucccauucuuaacaugaucgacaccaaaaaguccagccugaauaucucuggcuacaacuuuucccucggggcugccguuaaagcuggagccugcaugcuggauggcggcaauaugcuugagacaauuaaggugagcccucaaaccauggacgggauccugaaaucuauucucaaggugaaaaagagccugggaauguucgucuccgauacacccggcgaaagaaacccuuaugagaacauccuguacaagauuugucucucuggggacggauggcccuauaucgcgagccggaccuccauugugggccgcgccugggaaaauacgguuguggaucuggagcaggacaacaaaccucagaagaucgggaauggaggcagcaacaaaucucuucaguccgcuggcuuugccgcugggcugacauacagccaacucaugacccugaaggauuucaaaugcuuuaaucugaucccgaacgccaagacauggauggacauugagggaagacccgaagauccugucgagaucgcccuuuaccagcccucuuccggcuguuaugugcacuucuuucgggaaccuaccgaccucaagcaguucaaacaggacgcuaaguacagccaugggauugauguuaccgaccuguuugcggcccaacccggacugacauccgcugugaucgaggcccucccgagaaauauggucauuacgugccagggcucugaagauauccgcaaacugcuugagagccaggggcggagagacaucaagcugauugauaucacccucuccaaagccgacucucgcaaguucgagaacgcugugugggaucaguuuaaggaccugugucacaugcauacaggcgucgugguugaaaagaagaaacggggaggcaaggaggaaauuaccccucacugcgcccugauggauuguaucauguucgacgcggcugugagcgggggacuugaugccaaaguccucagagugguucugccccgcgacaugguguuccggacauccaccccuaaggucgugcugugaggacuagucccuguucccagagcccacuuuuuuuucuuuuuuugaaauaaaauagccugucuuucagaucucaaaggcucuuuucagagccaccaaaaaaaaaaaaaaaaaaaaaaaaaaaaaaaaaaaaaaaaaaaaaaaaaaaaaaaaaaaaaaaaaaaaaaaaaaaaaaaaaaaaaaaaaaaaaaaaaaaaa

SEQ ID NO: 20999 - RNA, 2033 nt, Artificial Sequence
  mRNA product Design a-1 (hSL-A100) comprising derived and/or modified sequence from LASV(AV;Clade V)__CCA30315__SP-IgE_NP(2-569) (opt5)
aggagagucccgcagucggcguccagcggcucugcuuguucgugugugugucguugcaggccuuauucaagcuuaccauggacuggaccuggauccuguuccucguggccgcugccacaagaguccacagcagcgccuccaaggaggugaaaucuuuccuguggacccagagccucagacgggaacuguccggcuacugcucuaacaucaaacuucaagucguuaaggacgcucaggcccugcuccacgggcuggauuuuagcgagguguccaaugugcagcgccuuaugagaaagcagcggcgcgacgauucugaccugaaaagacuccgggaucugaaccaagcggucaauaaccugguggaacucaagagcacacagcagaaguccguucugcgcgugggaacgcuuagcucugacgaucugcucacccuggcugccgaccuugagaaacugaaguccaaagucacaagaaccgaacggccccucagcucuggcguguauauggggaaucuguccagccagcaacuggaucagcgcagagcccuccugaaccuuauuggaaugacaaauggcucucaggggucccaggcuggacgggacggcguugugcgcgucugggaugugaagaacgccgagcugcucaauaaccaauucggcaccaugccuagccugacacuugcuugucugaccaaacagggacagguggaccucaaugaugucguucaagcccugacggaccuggggcucaucuacaccgcgaaguauccgaacacauccgaccuggauagacuuacccagucucaucccauucugaauaugaucgacacaaagaaaagcucccucaacauuagcggcuacaauuuuucucugggggccgcugugaaggccggagcuugcaugcuugauggcgggaacaugcuggagaccaucaaaguguccccucagagcauggacggaauccucaagucuauucugaaagucaagcgggcccugggcauguucgugagcgauacgcccggcgaacgcaacccuuaugagaauauccucuacaaaauuugucuguccggggacggauggcccuauaucgcgucuagaacaagcauuguuggccgggccugggaaaacaccguggucgaucuugagacagacgggaagccucagaagaucggauccggcaauagcaacaaaucucugcaauccgcuggguuuagcgccggacucaccuacucucagcugaugacccugaaggaugcuaugcuucagcucgacccgaaugccaaaacauggauggauauugagggcagacccgaagacccuguggagguugcccuguaccagcccaucuccggcugcuauauccacuucuuucgcgaaccuacggaccugaagcaauucaaacaggaugcuaaguacagccaugggauugacaucgcggaucucuuugccgcucagcccggacugaccuccgccgugauugaggcccuuccgcggaacauggucaucacaugucagggcucugaagacauuaagaaacugcucgagagccaagggagaaaggauaucaaacugaucgacauugcucuguccaagaucgauucucgcaaauucgagaaugccgugugggaccaguauaaggaucuuugccacaugcauaccggagucgugguugaaaagaaaaagcggggcgggaaagaggaaauuacaccucacugugcgcucauggacugcaucauguuugaugcugccgugagcggcggacugaacacccugguccucagagccgugcugccccgcgacaugguuuuccggacguccacaccuagagugguccuuugaggacuagucccuguucccagagcccacuuuuuuuucuuuuuuugaaauaaaauagccugucuuucagaucucaaaggcucuuuucagagccaccaaaaaaaaaaaaaaaaaaaaaaaaaaaaaaaaaaaaaaaaaaaaaaaaaaaaaaaaaaaaaaaaaaaaaaaaaaaaaaaaaaaaaaaaaaaaaaaaaaaaa

SEQ ID NO: 21000 - RNA, 2033 nt, Artificial Sequence
  mRNA product Design a-1 (hSL-A100) comprising derived and/or modified sequence from LASV(Togo/2016/7082;Clade VI)__AMR44578__SP-IgE_NP(2-569) (opt5)
aggagagucccgcagucggcguccagcggcucugcuuguucgugugugugucguugcaggccuuauucaagcuuaccauggacuggaccuggauccuguuccucguggccgcugccacaagaguccacagcagcaacuccaaggaggugaaaucuuuccuguggacccagagccucagacgggaacuguccggcuacugcucuaauaucaaacuucaagucguuaaagacgcccaggcucugcuccacgggcuggauuuuagcgagguguccaacgugcagcgccuuaugagaaagcagaaacgggacgauggagaccugaagcgccucagagaucugaaucaagccgucaacaaucugguggaacucaagucuguucagcagaaaagcauucugcgggugggcacacuuacguccgacgaucugcucacccuggcggcugaccuugagaagcugaaaagcaaggucacacgcaccgaaagaccccucucuuccgggguguauaugggaaaccugagcucucagcaacuggaucagcggcgcgcccuccuguccaugaucggcaugagcgggggaaaucagaacucucagccuaaaggcgacggcguugugagagucugggaugugaagaaugccgaccuucugaacaaucaauucgggacaaugccgucccucacccuggcuugucuuacaaagcagggacagguggaucugaacgacgccguccaagcucucaccgaccugggccugauuuacacggccaaauaucccaauagcuccgaucucgaccggcugucucagagccauccuauccuuaacaugauugauaccaagaaauccagccugaauaucucuggguacaacuuuucccucggagcggccaucaagacaggcgcuugcaugcuggacgggggaaacaugcuugagaccauuaaaguuacaccccagaccauggauggcauccucaagagcauucugaaagugaagcgcucucugggcauguucaucagcgacacgccuggggagagaaaucccuaugaaaacauucuguacaagaucugucucuccggagauggcuggccuuauauugccucucggacagcuaucaucgggcgcgccugggagaauaccguggucgaccuggaaagcgauuccaaaccgcagaagauuggaagcaacggcucuaauaaaucccuucaaagcgcgggguuugcccccggacugacauacucucagcucaugacccugaaggacuccaugcugcagcuugauccuaacgcuaaaaccuggaucgacauugagggcagacccgaggacccuguggaaguugcccucuuccagcccaucagcggcugcuacauucacuuuuuccgggagccgacagaucugaagcaauuuaagcaggacgcuaaauauucccaugggaucgaugugacggaccuguucgccgcccagccuggacucaccucugcugucaucgaagcgcugcccagaaauauggugcuuacaugucagggcagcgaugacauuaagaaacugcucgauucccaagggcgccgggacaucaagcugauugauguuucucugaacaaaaucgacagcagaaaguuugagaaugccgugugggaucaguacaaggaccuuugccacaugcauaccggagucguggucgaaaagaagaaaaagggcgggaaagaggagauuacaccucacugugcucuccuggauugcaucauguucgacgccgccguguccggcggacugaacgcuaccguucuccgcgccgugcugccccgggacauggucuuuagaacgagcucucccaaggugguucuuugaggacuagucccuguucccagagcccacuuuuuuuucuuuuuuugaaauaaaauagccugucuuucagaucucaaaggcucuuuucagagccaccaaaaaaaaaaaaaaaaaaaaaaaaaaaaaaaaaaaaaaaaaaaaaaaaaaaaaaaaaaaaaaaaaaaaaaaaaaaaaaaaaaaaaaaaaaaaaaaaaaaaa

SEQ ID NO: 21001 - RNA, 2033 nt, Artificial Sequence
  mRNA product Design a-1 (hSL-A100) comprising derived and/or modified sequence from LASV(KAK-428;Clade n.d. (VII))__ANH09741__SP-IgE_NP(2-569) (opt5)
aggagagucccgcagucggcguccagcggcucugcuuguucgugugugugucguugcaggccuuauucaagcuuaccauggacuggaccuggauccuguuccucguggccgcugccacaagaguccacagcagcaacuccaaggaggugaaaucuuuccuguggacccagagccucagacgggaacuguccggcuacugcacaaauaucaaacuucaagucguuaaggacgcccaggcucugcuccacgggcuggauuuuucugaggugagcaacgugcagcgccuuaugagaaagcagaaacgggacgauaaugaccugaagcgccucagagaucugaaccaagccgucaauaaccugguggaacucaaguccguucagcagaaaucugugcugaaggucggaacgcuuaauagcgacgaucugcucacccuggcggcugaccuugagaaacugaaguccaaagugguucggacagaacgcccccucagcucuggcguguauauggggaaccuguccagccagcaacuggaucagagacgggcccuccugaauaugauuggaauggccggcgggucucagggaaaccagccuucccgcgacggcgucgugagagugugggaugucaagaaugcugaccuucugaacaaucaauucggcaccaugccgagccucacacuggccugucuuaccaagcaggggcagguugaucugaacgacguggugcucgcucugacagaccugggacucaucuacaccgccaaauaucccaauucuuccgaucuggaccggcuuagccaaaaccauccuguccugaacaugauugaugugaauaaguccucucucaacaucagcggcuacaauuuuucccugggggcggccguuaaagcuggagccugcaugcuugacggcgggaacaugcuggagacgauuaagaucagcccccagaccguggauggaauccucaaaucuauucugaaggucaaacgcgcucugggcauguucguguccgacacaccuggcgagagaaaucccuaugaaaacauccucuacaagguuugucugagcgggaauggauggccuuauauugccucucggaccagcaucgugggccgcgcgugggagaacacagucguggaucuugaauccaauaagaaccagccgaaagucgggaauaacggaucuaauaagaugcugcagagcuccggcuuugccaccgggcucacguacagccaacugaugacacugagagacucuaugcuucagcucgaucccaccgcuaaaacauggauugacaucgagggacggccugaggaucccguggaacuggcccuguuccagccuuccagcggcugcuacauucacuuuuucagagagcccaccgaccucaagcaguuuaaacaagacgcuaaguauucucauggcaucgauguuaacgaccuguucuccgcccagccggggcuuaccagcgccgugcuggaagcucucccucgcaauaugguccugacaugucagggauccgaugacauccggaagcugcuugauucucaggacagaaaagauauuaagcucaucgacauuagccuguccaaagcggaugcccgcaaguuugagaacgacgugugggaucaauucaaagaccugugccacaugcauacgggcaucguuguggaaaagaagaaaaagggagggaaacaggagaugacaccccacugugcucuccuggauugcauuauguuugacgccgccgucucuggcgggcuuaacgugccuacccugcgggcugugcuccccaccgacaugguuuucagaacaaucaccacgaaggucgugcugugaggacuagucccuguucccagagcccacuuuuuuuucuuuuuuugaaauaaaauagccugucuuucagaucucaaaggcucuuuucagagccaccaaaaaaaaaaaaaaaaaaaaaaaaaaaaaaaaaaaaaaaaaaaaaaaaaaaaaaaaaaaaaaaaaaaaaaaaaaaaaaaaaaaaaaaaaaaaaaaaaaaaa

SEQ ID NO: 21002 - RNA, 2033 nt, Artificial Sequence; identical to SEQ ID NO: 20996
  mRNA product Design a-1 (hSL-A100) comprising derived and/or modified sequence from LASV(Pinneo-NIG-1969;Clade I)__AIT17837__SP-IgE_NP(2-569) (opt5)

SEQ ID NO: 21003 - RNA, 2033 nt, Artificial Sequence
  mRNA product Design a-1 (hSL-A100) comprising derived and/or modified sequence from LASV(ISTH0009-NIG-2011;Clade II)__AIT17405__SP-IgE_NP(2-569) (opt5)
aggagagucccgcagucggcguccagcggcucugcuuguucgugugugugucguugcaggccuuauucaagcuuaccauggacuggaccuggauccuguuccucguggccgcugccacaagaguccacagcagcguguccaaggaggucaaaucuuuccuguggacccagagccucagacgggaacuguccggcuacugcucuaacaucaaacuucaaguugugaaggacgcccaggcucugcuccacgggcuggauuuuagcgagguguccaauguccagcgccuuaugagaaagcagaaacgggacgauucugaccugaagcgccucagagaucugaaccaagccgugaauaaccugguugaacucaagagcacacagcagaaauccauucugcgggugggaacgcuuaccagcgacgaucugcucacacuggcggcugaccuugagaagcugaaaucuaaggucauccgcaccgaaagaccccucuccagcggcguguauauggggaaucugucuacacagcaacuggagcagcggcgcgcccuccugaacaugauuggaaugguuggcggggcccagggaacccagccuggcagagauggcgugguccgggugugggacgugaaaaauccggaucuucugaacaaucaauucgggacaaugcccucccucacccuggcuugucuuacgaagcagggacaggucgaccugaacgaugccguucucgcucugaccgaccugggccucaucuacacagccaaguauccuaauagcucugaccuggaucgccuuucccaaagccaucccauucugaacaugguggacaucaaaaaguccucucucaauaucagcggguacaacuuuucccugggagcggccgugaaagcuggcgccugcaugcuugaugggggaaauaugcuggagaccauuaaggucacaccucagaccauggacggcauccucaaaagcauucugaaggugaaaagaucucugggcauguucguuuccgauacgcccggggaacggaacccuuaugagaacauccucuacaagauuugucugagcggagacggcuggccguauaucgcuucucgcacaagcauuguggggagagccugggaaaauaccacagucgaucuugaguccgacggaaagccccagaaagugggcucugcggggagcaacaagucccugcagagcgccggauuuccuaccggccucaccuacucucaacugaugacacugaaagauuccaugaugcagcuugaccccagcgcuaagacguggaucgauaucgagggccggccugaagaccccguugagauugcccucuaccagccgaugucugggugcuauauccacuucuuuagagaaccuaccgaccugaaacaguucaagcaagaugcuaaguacucccauggaauugacguggccgaucuguuucccgcccagccuggccucacaagcgcugucaucgaggcgcugccccgcaauauggugcuuaccugucagggguccgacgauauuaaacggcugcucgacucucagggaagacgcgauaucaagcugaucgacauugcccugagcaaagcugauucccggagauucgaaaacgccgucugggaccaaugcaaggaucuuugucacaugcauacaggcgugguuguggagaaaaagaagcgcgggggcaaagaggaaaucacgccccacugcgcccucauggacuguauuauguaugaugcugccgucucuggaggccugaauaucccugugcugcgggcgguucucccgagagacaugguguuucgcaccagcucccccaaggucgugcugugaggacuagucccuguucccagagcccacuuuuuuuucuuuuuuugaaauaaaauagccugucuuucagaucucaaaggcucuuuucagagccaccaaaaaaaaaaaaaaaaaaaaaaaaaaaaaaaaaaaaaaaaaaaaaaaaaaaaaaaaaaaaaaaaaaaaaaaaaaaaaaaaaaaaaaaaaaaaaaaaaaaaa

SEQ ID NO: 21004 - RNA, 2033 nt, Artificial Sequence
  mRNA product Design a-1 (hSL-A100) comprising derived and/or modified sequence from LASV(ISTH2010-NIG-2012;Clade II)__AIT17483__SP-IgE_NP(2-569) (opt5)
aggagagucccgcagucggcguccagcggcucugcuuguucgugugugugucguugcaggccuuauucaagcuuaccauggacuggaccuggauccuguuccucguggccgcugccacaagaguccacagcagcgccuccaaggaggugaaaucuuuccuguggacccagagccucagacgggaacuguccggcuacugcucuaacaucaaacuucaagucguuaaggacgcucaggcccugcuccacgggcuggauuuuagcgagguguccaaugugcagcgccuuaugagaaagcagaaacgggacgauucugaccugaagcgccucagagaucugaaccaagcggucaauaaccugguggaacucaagagcacacagcagaaauccauucugcggguuggaacgcuuaccagcgacgaucugcucacacuggcugccgaccuugagaagcugaaaucuaaggugauccgcaccgaaagaccccucuccagcggcgucuauauggggaaucugucuacacagcaacuggagcagcggcgcgcccuccugaaccuuauuggaauggugggcggggcucagggaacccagccuggcagagauggcguugugcgggucugggacgugaaaaauccggaucugcucaacaaucaauucgggacaaugcccucccugacccuugccugucugacgaagcagggacagguggaccucaacgaugcuguccuggcccugaccgaccucggccugaucuacacagcgaaguauccuaauagcucugaccuugaucgccugucccaaagccaucccauucucaacaugguugacaccaaaaaguccucucugaauaucagcggguuuaacuucucccuuggagccgcugugaaagccggcgcuugcaugcuggaugggggaaauaugcucgagacaaucaaggugaccccucagacgauggacggcauucugaaaagcauccugaaggucaaaaagucucucggcauguuuguguccgauacacccggggaaagaaacccuuacgagaacauucuguauaagaucugucuuagcggagacggcuggccguacauugccucucggaccagcaucguugggcgcgcgugggaaaauacaaccguggaucuggaguccgacggaaaaccccacaaggucggcaccgccgggucuaacaaaagccuccaguccgcuggauucccuacaggccugacguauagccagcugaugacccuuaaggauucuaugaugcaacucgaccccuccgccaaaacauggauugauaucgagggcagaccugaagaccccguggagaucgcucuguaccagccgaugagcgggugcuacauucacuuuuuccgggaaccuaccgaccugaagcaguuuaagcaggaugccaaauauucucauggaaucgacguugccgaucucuuccccgcucaaccuggccugacauccgcggugauugaggcccuucccagaaauaugguccugaccugucaggggagcgacgauaucaagcgccuccuggacucccagggacggagagauauuaaacugaucgacaucgcucuuucuaaggccgauagccgccgguuugaaaacgccgugugggaccagugcaaagaucucugucauaugcacacgggcgucgugguugagaagaagaaaagagggggcaaggaggaaauuacaccccacugcgcucugauggacuguaucauguacgaugccgcgguguccggaggccugaauauuccuguccuccgcgcugugcugccgcgggacaugguuuucagaaccucuagccccaaagugguccuuugaggacuagucccuguucccagagcccacuuuuuuuucuuuuuuugaaauaaaauagccugucuuucagaucucaaaggcucuuuucagagccaccaaaaaaaaaaaaaaaaaaaaaaaaaaaaaaaaaaaaaaaaaaaaaaaaaaaaaaaaaaaaaaaaaaaaaaaaaaaaaaaaaaaaaaaaaaaaaaaaaaaaa

SEQ ID NO: 21005 - RNA, 2033 nt, Artificial Sequence
  mRNA product Design a-1 (hSL-A100) comprising derived and/or modified sequence from LASV(Lassa virus/H.sapiens-wt/NGA/2015/ISTH_0543;Clade II)__AVO03640__SP-IgE_NP(2-569) (opt5)
aggagagucccgcagucggcguccagcggcucugcuuguucgugugugugucguugcaggccuuauucaagcuuaccauggacuggaccuggauccuguuccucguggccgcugccacaagaguccacagcagcgccuccaaggaggugaaaucuuuccuguggacccagagccucagacgggaacuguccggcuacugcucuaacaucaaacuucaagucguuaaggacgcucaggcccugcuccacgggcuggauuuuagcgagguguccaaugugcagcgccuuaugagaaagcagaaacgggacgauucugaccugaagcgccucagagaucugaaccaagcggucaauaaccugguggaacucaagagcacacagcagaaauccauucugcggguuggaacgcuuaccagcgacgaucugcucacacuggcugccgaccuugagaagcugaaaucuaaggugauccgcaccgaaagaccccucuccagcggcgucuauauggggaaucugucuacacagcaacuggagcagcggcgcgcccuccugaacaugauuggaauggugggcggggcucagggaacccagccuggcagagauggcguugugcgggucugggacgugaaaaauccggaucuucugaacaaucaauucgggacaaugcccucccucacccuggccugucuuacgaagcagggacagguggaccugaacgaugcuguccucgcccugaccgaccugggccucaucuacacagcgaaguauccuaauagcucugaccuggaucgccuuucccaaagccaucccauucugaacaugguugacaccaaaaaguccucucucaauaucagcggguacaacuuuucccugggagccgcugugaaagccggcgcuugcaugcuugaugggggaaauaugcuggagacaaucaaggugaccccucagacgauggacggcauucucaaaagcauccugaaggucaaaaagucucugggcauguucguguccgauacacccggggaaagaaacccuuaugagaacauucucuacaagaucugucugagcggagacggcuggccguauauugccucucggaccagcaucguugggcgcgcgugggaaaauacaaccguggaucuugaguccgacggaaaaccccagaaggucggcucugccgggagcaacaaaucccugcagagcgcuggauuuccuaccggccucacauacucucaacugaugacgcugaaggauuccaugaugcagcuugaccccagcgccaaaaccuggauugauaucgagggcagaccugaagaccccguggagaucgcucucuaccagccgaugucugggugcuauauucacuucuuucgggaaccuacagaccugaagcaguucaagcaagaugccaaauacucccauggaaucgacguugccgaucuguuucccgcucagccuggccucaccagcgcggugauugaggcccugcccagaaauaugguccuuacaugucagggguccgacgauaucaagcgccugcucgacucucagggacggaaagauauuaagcugaucgacaucgcucugagcaaagccgauuccagacgcuucgaaaacgccgugugggaccaaugcaaggaucuuugucacaugcauaccggcgucgugguugagaagaaaaagagagggggcaaagaggaaauuacgccccacugcgcucucauggacuguaucauguaugaugccgcggugucuggaggccugaauauuccuguccugcgggcugugcucccgcgcgacaugguuuuucggacaagcucccccaaggugguccugugaggacuagucccuguucccagagcccacuuuuuuuucuuuuuuugaaauaaaauagccugucuuucagaucucaaaggcucuuuucagagccaccaaaaaaaaaaaaaaaaaaaaaaaaaaaaaaaaaaaaaaaaaaaaaaaaaaaaaaaaaaaaaaaaaaaaaaaaaaaaaaaaaaaaaaaaaaaaaaaaaaaaa

SEQ ID NO: 21006 - RNA, 2033 nt, Artificial Sequence
  mRNA product Design a-1 (hSL-A100) comprising derived and/or modified sequence from LASV(Lassa virus/H.sapiens-wt/NGA/2016/ISTH_0009;Clade II)__AVO03572__SP-IgE_NP(2-569) (opt5)
aggagagucccgcagucggcguccagcggcucugcuuguucgugugugugucguugcaggccuuauucaagcuuaccauggacuggaccuggauccuguuccucguggccgcugccacaagaguccacagcagcgccuccaaggaggugaaaucuuuccuguggacccagagccucagacgggaacuguccggcuacugcucuaacaucaaacuucaagucguuaaggacgcucaggcccugcuccacgggcuggauuuuagcgagguguccaaugugcagcgccuuaugagaaagcagaaacgggacgauucugaccugaagcgccucagagaucugaaccaagcggucaauaaccugguggaacucaagagcacacagcagaaauccauucugcggguuggaacgcuuaccagcgacgaucugcucacacuggcugccgaccuugagaagcugaaaucuaaggugauccgcaccgaaagaccccucuccagcggcgucuauauggggaaucugucuacacagcaacuggagcagcggcgcgcccuccugaacaugauuggaauggugggcggggcucagggaacccagccuggcagagauggcguugugcgggucugggacgugaaaaauccggaucuucugaacaaucaauucgggacaaugcccucccucacccuggccugucuuacgaagcagggacagguggaccugaacgaugcuguccucgcccugaccgaccugggccucaucuacacagcgaaguauccuaauagcucugaccuggaucgccuuucccaaagccaucccauucugaacaugguugacaccaaaaaguccucucucaauaucagcggguacaacuuuucccugggagccgcugugaaagccggcgcuugcaugcuugaugggggaaauaugcuggagacaaucaaggugaccccucagacgauggacggcauucucaaaagcauccugaaggucaaaaagucucugggcauguucguguccgauacacccggggaaagaaacccuuaugagaacauucucuacaagaucugucugagcggagacggcuggccguauauugccucucggaccagcaucguugggcgcgcgugggaaaauacaaccguggaucuugaguccgacggaaaaccccagaaggucggcucugccgggagcaacaaaucccugcagagcgcuggauuuccuaccggccucacauacucucaacugaugacgcugaaggauuccaugaugcagcuugaccccagcgccaaaaccuggauugauaucgagggcagaccugaagaccccguggagaucgcucucuaccagccgaugucugggugcuauauucacuucuuucgggaaccuacagaccugaagcaguucaagcaagaugccaaauacucccauggaaucgacguugccgaucuguuucccgcucagccuggccucaccagcgcggugauugaggcccugcccagaaauaugguccuuacaugucagggguccgacgauaucaagcgccugcucgacucucagggacggagagauauuaaacugaucgacaucgcucugagcaaggccgauucccgccgguucgaaaacgccgugugggaccaaugcaaagaucuuugucacaugcauaccggcgucgugguugagaagaagaaaagagggggcaaggaggaaauuacgccccacugcgcucucauggacuguaucauguaugaugccgcggugucuggaggccugaauauuccuguccugcgcgcugugcucccgcgggacaugguuuuuagaacaagcucccccaaagugguccugugaggacuagucccuguucccagagcccacuuuuuuuucuuuuuuugaaauaaaauagccugucuuucagaucucaaaggcucuuuucagagccaccaaaaaaaaaaaaaaaaaaaaaaaaaaaaaaaaaaaaaaaaaaaaaaaaaaaaaaaaaaaaaaaaaaaaaaaaaaaaaaaaaaaaaaaaaaaaaaaaaaaaa

SEQ ID NO: 21007 - RNA, 2033 nt, Artificial Sequence
  mRNA product Design a-1 (hSL-A100) comprising derived and/or modified sequence from LASV(Lassa virus/H.sapiens-wt/NGA/2016/ISTH_0017;Clade II)__AVO03568__SP-IgE_NP(2-569) (opt5)
aggagagucccgcagucggcguccagcggcucugcuuguucgugugugugucguugcaggccuuauucaagcuuaccauggacuggaccuggauccuguuccucguggccgcugccacaagaguccacagcagcgccuccaaggaggugaaaucuuuccuguggacccagagccucagacgggaacuguccggcuacugcucuagcaucaaacuucaagucguuaaggacgcucaggcccugcuccacgggcuggauuuuuccgaggugucuaacgugcagcgccuuaugagaaagcagaaacgggacgauagcgaccugaagcgccucagagaucugaaucaagcggucaacaaucugguggaacucaaguccacacagcagaaaagcauucugcggguuggaacgcuuaccucugacgaucugcucacacuggcugccgaccuugagaagcugaaauccaaggugauccgcaccgaaagaccccucagcucuggcgucuauauggggaaccuguccacacagcaacuggagcagcggcgcgcccuccugaauaugauuggaauggcuggcggggcccagggaacccagccuggcagagauggcgugguucgggugugggacgucaaaaacccggaucuucugaauaaccaauucgggacaaugcccagccucacccuggcuugucuuacgaagcagggacagguggaccugaaugaugccgugcucgcgcugaccgaccugggccucaucuacacagccaaguauccuaacucuuccgaccuggaucgccuuagccaaucccaucccauucugaauauggucgacaccaaaaagucuagccucaacaucuccggguacaauuuuagccugggagcugccguuaaagcuggcgccugcaugcuugaugggggaaacaugcuggagacaaucaaggugaccccucagacgauggacggcauucucaaaucuauccugaaggugaaaagaucccugggcauguucgucagcgaugcgcccggggaacggaauccuuaugagaacauucucuacaagaucugucugucuggagacggcuggccguauauugccagccgcacauccaucguggggagagcuugggaaaacaccacaguugaucuugagucugacggaaagccccagaaagugggcgccaccgggagcaauaagucccugcagagcgcuggauuuccuaccggccucacauacucucaacugaugacgcugaaagauuccaugaugcagcuugaccccagcgccaagaccuggauugauaucgagggccggccugaagaccccgucgagguggcccucuaccagccgguuucugggugcuauauccacuucuuuagagaaccuacagaccugaaacaguucaagcaagaugcuaaguacucccauggaauugacguggcggaucuguuucccgcccagccuggccucaccagcgcugucaucgaggcccugccccgcaacauggugcuuacaugucagggguccgacgauauuaaaaagcugcucgacucucagggacggaaagauaucaagcugauugacaucgcccugagcaaagcugauuccagacgcuucgaaaaugccgucugggaccaaugcaaggaucuuugucacaugcauaccggcgugguuguggagaagaaaaagagagggggcaaagaggaaaucacgccccacugcgcgcucauggacuguauuauguaugaugcugccgucucuggaggccugaacaucccugugcugcgggccguucucccgcgcgacaugguguuucggacaagcucccccaaggucgugcugugaggacuagucccuguucccagagcccacuuuuuuuucuuuuuuugaaauaaaauagccugucuuucagaucucaaaggcucuuuucagagccaccaaaaaaaaaaaaaaaaaaaaaaaaaaaaaaaaaaaaaaaaaaaaaaaaaaaaaaaaaaaaaaaaaaaaaaaaaaaaaaaaaaaaaaaaaaaaaaaaaaaaa

SEQ ID NO: 21008 - RNA, 2033 nt, Artificial Sequence
  mRNA product Design a-1 (hSL-A100) comprising derived and/or modified sequence from LASV(Lassa virus/H.sapiens-wt/NGA/2018/ISTH_0959;Clade II)__AVV65100__SP-IgE_NP(2-569) (opt5)
aggagagucccgcagucggcguccagcggcucugcuuguucgugugugugucguugcaggccuuauucaagcuuaccauggacuggaccuggauccuguuccucguggccgcugccacaagaguccacagcagcgccuccaaggaggugaaaucuuuccuguggacccagagccucagacgggaacuguccggcuacugcucuaacaucaaacuucaagucguuaaggacgcucaggcccugcuccacgggcuggauuuuagcgagguguccaaugugcagcgccuuaugagaaagcagaaacgggacgauucugaccugaagcgccucagagaucugaaccaagcggucaauaaccugguggaacucaagagcacccagcagaaauccauucugcggguuggaacgcuuaccagcgacgaucugcucacacuggcugccgaccuugagaagcugaaaucuaaggugauccgcaccgaaagaccccucuccagcggcgucuauauggggaaucugucuacacagcaacuggagcagcggcgcgcccuccugaaccuuauuggaauggugggcggggcucagggaacccagccuggcagagauggcguugugcgggucugggacgugaaaaauccggaucugcucaacaaucaauucgggacaaugcccucccugacccuugccugucugacgaagcagggacagguggaccucaacgaugucguucuggcucugaccgaccucggccugaucuacacagccaaguauccuaauagcucugaccuugaucgccugucccaaagccaucccauucucaacaugguggacaccaaaaaguccucucugaauaucagcggguuuaacuucucccuuggagcggccgugaaagcuggcgccugcaugcuggaugggggaaauaugcucgagacaaucaaggucaccccucagacgauggacggcauucugaaaagcauccugaaggugaaaaagucucucggcauguuuguuuccgauacacccggggaaagaaacccuuacgagaacauucuguauaagaucugucuuagcggagacggcuggccguacauugcuucucggaccagcaucguggggcgcgccugggaaaauacaaccgucgaucuggaguccgacggaaaaccccacaaggugggcaccgcggggucuaacaaaagccuccaguccgccggauucccuacaggccugacguauagccagcugaugacccuuaaggauucuaugaugcaacucgaccccuccgcuaaaacauggauugauaucgagggcagaccugaagaccccguugagaucgcccuguaccagccgaugagcgggugcuacauucacuuuuuccgggaaccuaccgaccugaagcaguuuaagcaggaugcuaaauauucucauggaaucgacguggccgaucucuuccccgcccaaccuggccugacauccgcugucauugaggcgcuucccagaaauauggugcugaccugucaggggagcgacgauaucaagcgccuccuggacucccagggacggaaagauauuaagcugaucgacaucgcccuuucuaaaacggauagcagacgcuuugaaaacgcugucugggaccagugcaaggaucucugucauaugcacacaggcgugguuguggagaagaaaaagagagggggcaaagaggaaauuacaccccacugcgcccugauggacuguaucauguacgaugccgcugucuccggaggccugaauauuccugugcuccgggccguucugccgcgcgacaugguguuccggaccucuagccccaaggucgugcuuugaggacuagucccuguucccagagcccacuuuuuuuucuuuuuuugaaauaaaauagccugucuuucagaucucaaaggcucuuuucagagccaccaaaaaaaaaaaaaaaaaaaaaaaaaaaaaaaaaaaaaaaaaaaaaaaaaaaaaaaaaaaaaaaaaaaaaaaaaaaaaaaaaaaaaaaaaaaaaaaaaaaaa

SEQ ID NO: 21009 - RNA, 2033 nt, Artificial Sequence
  mRNA product Design a-1 (hSL-A100) comprising derived and/or modified sequence from LASV(LASV003-NIG-2008;Clade II)__AIT17581__SP-IgE_NP(2-569) (opt5)
aggagagucccgcagucggcguccagcggcucugcuuguucgugugugugucguugcaggccuuauucaagcuuaccauggacuggaccuggauccuguuccucguggccgcugccacaagaguccacagcagcgccuccaaggaggugaaaucuuuccuguggacccagagccucagacgggaacuguccggcuacugcucuagcaucaaacuucaagucguuaaggacgcucaggcccugcuccacgggcuggauuuuuccgaggugucuaacgugcagcgccuuaugagaaagcagaaacgggacgauagcgaccugaagcgccucagagaucugaaucaagcggucaacaaucugguggaacucaaguccacccagcagaaaagcguucugcgggugggaacgcuuaccucugacgaucugcucacacuggcugccgaccuugagaagcugaaauccaaggucauucgcaccgaaagaccccucagcucuggcguguauauggggaaccuguccgcccagcaacuggagcagcggcgcacacuccugaauaugaucggaaugguuggcggggcucagggaacccagccuggcagagauggcgugguccgggugugggacgugaaaaacccggaucuucugaauaaccaauucgggacaaugcccagccucacccuggccugucuuacgaagcagggacaggucgaccugaaugauguugugcucgcucugaccgaccugggccucauuuacacagccaaguauccuaacucuuccgaccuggaucgccuuagccaaucccaucccauccugucuaugguggacaccaaaaagagcucccucaauauuagcggguacaacuuuucucugggagcggccgucaaagcuggcgccugcaugcuugaugggggaaauaugcuggagacaaucaaggugaccccucagacgauggacggcauccucaaauccauucugaagguuaaaaagagccugggcauguucgugucugauacacccggggaaagaaacccuuaugagaauauccucuacaagauuugucugagcggagacggcuggccguauaucgcuucccggaccucuauugucgggcgcgccugggaaaacacaaccguggaucuugagagcgacggaaaaccccagaagguuggcaccgcgggguccaacaaaagccugcagucugccggauuuccuacaggccucacguacucccaacugaugacccugaaggauagcaugaugcagcuugaccccucugcuaaaacauggaucgauauugagggcagaccugaagaccccguggagaucgcccucuaccagccgauguccgggugcuauauccacuucuuucgggaaccuaccgaccugaagcaguucaagcaagaugcuaaauacagccauggaauugacgucacagaucuguuucccgcccagccuggccucaccuccgccgugaucgaggcucugcccagaaauaugguccuuacgugucaggggucugacgauauuaagcgccugcucgacagccagggacggagagauaucaaacugauugacaucgcgcuguccaaggccgauucucgccgguucgaaaacgcugugugggaccaaugcaaagaucuuugucacaugcauacaggcguuguggucgagaagaagaaaagagggggcaaggaggaaaucacaccccacugcgcccucauggacuguauuauguaugaugccgcugugagcggaggccugaauaucccuguucugcgcgccgugcucccgcgggacauggucuuuagaaccuccagccccaaaguggugcugugaggacuagucccuguucccagagcccacuuuuuuuucuuuuuuugaaauaaaauagccugucuuucagaucucaaaggcucuuuucagagccaccaaaaaaaaaaaaaaaaaaaaaaaaaaaaaaaaaaaaaaaaaaaaaaaaaaaaaaaaaaaaaaaaaaaaaaaaaaaaaaaaaaaaaaaaaaaaaaaaaaaaa

SEQ ID NO: 21010 - RNA, 2033 nt, Artificial Sequence
  mRNA product Design a-1 (hSL-A100) comprising derived and/or modified sequence from LASV(LASV035-NIG-2009;Clade II)__AIT17589__SP-IgE_NP(2-569) (opt5)
aggagagucccgcagucggcguccagcggcucugcuuguucgugugugugucguugcaggccuuauucaagcuuaccauggacuggaccuggauccuguuccucguggccgcugccacaagaguccacagcagcgccuccaaggaggugaaaucuuuccuguggacccagagccucagacgggaacuguccggcuacugcucuagcaucaaacuucaagucguuaaagacgcucaggcccugcuccacgggcuggauuuuuccgaggugucuaacgugcagcgccuuaugagaaagcagaaacgggacgauagcgaccugaagcgccucagagaucugaaucaagcggucaacaaucugguggaacucaaguccacacagcagaaaagcauucugcggguuggaacgcuuaccucugacgaucugcucacacuggcugccgaccuugagaagcugaaauccaaggugauccgcaccgaaagaccccucagcucuggcgucuauauggggaaccuguccgcccagcaacuggagcagcggcgcgcucuccugaauaugauuggaauggugggcggggcccagggaacacagccuggcagagauggcguugugcgggucugggacgugaaaaacccggaucuucugaauaaccaauucgggaccaugcccagccucacacuggcuugucuuaccaagcagggacagguggaccugaaugaugccguccucgcgcugacggaccugggccucaucuacaccgccaaguauccuaacucuuccgaccuggaucgccuuagccaaucccaucccauucugaauaugguugacacaaagaagucuagccucaacaucuccggguacaauuuuagccugggagcugccgugaaagcuggcgccugcaugcuugaugggggaaacaugcuggagaccaucaaggugacaccucagaccauggacggcauucucaaaucuauccugaaggucaaaagaucccugggcauguucgugagcgauacgcccggggaacggaauccuuaugagaacauucucuacaagaucugucugucuggagacggcuggccguauauugcgagccgcacauccaucguugggagagccugggaaaacaccacaguggaucuugagucugacggaaagccccagaaagucggcaccaccgggagcaauaagucccugcagagcgcuggauuuccuacaggccucacguacucucaacugaugacccugaaagauuccaugaugcagcuugaccccagcgccaagacauggauugauaucgagggccggccugaagaccccguggagaucgcucucuaccagccgaugucugggugcuauauucacuucuuuagagaaccuaccgaccugaaacaguucaagcaagaugccaaguacucccauggaaucgacguugccgaucuguuucccgcucagccuggccucacaagcgcggugauugaggcccugccccgcaacaugguccuuaccugucagggguccgacgauaucaaaaagcugcucgacucucagggacggagagauauuaaacugaucgacaucgcucugagcaaggccgauucccgcaaauucgaaaaugccgugugggaccaaugcaaggaucuuugucacaugcauacgggcgucgugguugagaagaaaaagagagggggcaaagaggaaauuacaccccacugcgcucucauggacuguaucauguaugaugccgcggugucuggaggccugaacauuccuguccugcgggcugugcucccgcgcgacaugguuuuucggaccagcucccccaaggugguccugugaggacuagucccuguucccagagcccacuuuuuuuucuuuuuuugaaauaaaauagccugucuuucagaucucaaaggcucuuuucagagccaccaaaaaaaaaaaaaaaaaaaaaaaaaaaaaaaaaaaaaaaaaaaaaaaaaaaaaaaaaaaaaaaaaaaaaaaaaaaaaaaaaaaaaaaaaaaaaaaaaaaaa

SEQ ID NO: 21011 - RNA, 2033 nt, Artificial Sequence
  mRNA product Design a-1 (hSL-A100) comprising derived and/or modified sequence from LASV(LASV1000-NIG-2009;Clade II)__AIT17783__SP-IgE_NP(2-569) (opt5)
aggagagucccgcagucggcguccagcggcucugcuuguucgugugugugucguugcaggccuuauucaagcuuaccauggacuggaccuggauccuguuccucguggccgcugccacaagaguccacagcagcgccuccaaggaggugaaaucuuuccuguggacccagagccucagacgggaacuguccggcuacugcucuaacaucaaacuucaagucguuaaggacgcucaggcccugcuccacgggcuggauuuuagcgagguguccaaugugcagcgccuuaugagaaagcagaaacgggacgauucugaccugaagcgccucagagaucugaaccaagcggucaauaaccugguggaacucaagagcacacagcagaaauccauucugcggguuggaacgcuuaccagcgacgaucugcucacacuggcugccgaccuugagaagcugaaaucuaaggugauccgcaccgaaagaccccucuccagcggcgucuauauggggaaucugucuacacagcaacuggagcagcggcgcgcccuccugaacaugauuggaauggugggcggggcucagggaacccagccuggcagagauggcguugugcgggucugggacgugaaaaauccggaucuucugaacaaucaauucgggacaaugcccucccucacccuggccugucuuacgaagcagggacagguggaccugaacgaugucguucucgcucugaccgaccugggccucaucuacacagccaaguauccuaauagcucugaccuggaucgccuuucccaaagccaucccauucugaacaugguggacaccaaaaaguccucucucaauaucagcggguacaacuuuucccugggagcggccgugaaagcuggcgccugcaugcuugaugggggaaauaugcuggagacaaucaaggucaccccucagacgauggacggcauucucaaaagcauccugaaggugaaaaagucucugggcauguucguuuccgauacacccggggaaagaaacccuuaugagaacauucucuacaagaucugucugagcggagacggcuggccguauauugcuucucggaccagcaucguggggcgcgccugggaaaauacaaccgucgaucuugaguccgacggaaaaccccagaaggugggcaccgcggggucuaacaaaagccugcaguccgccggauuuccuacaggccucacguacagccaacugaugacccugaaggauucuaugaugcagcuugaccccuccgcuaaaacauggauugauaucgagggcagaccugaagaccccguugagaucgcccucuaccagccggugagcgggugcuauauucacuucuuucgggaaccuaccgaccugaagcaguucaagcaagaugcuaaauacucucauggaaucgacgucgccgaucuguuucccgcccagccuggccucacauccgcugugauugaggcgcugcccagaaauaugguccuuaccugucaggggagcgacgauaucaagcgccugcucgacucccagggacggagagauauuaaacugaucgacaucgcccugucuaaggcugauagccgccgguucgaaaacgccgugugggaccaaugcaaagaucuuugucacaugcauacgggcguuguggucgagaagaagaaaagagggggcaaggaggaaauuacaccccacugcgcccucauggacuguaucauguaugaugcugccguguccggaggccugaauauuccuguucugcgcgcggugcucccgcgggacauggucuuuagaaccucuagccccaaaguggugcugugaggacuagucccuguucccagagcccacuuuuuuuucuuuuuuugaaauaaaauagccugucuuucagaucucaaaggcucuuuucagagccaccaaaaaaaaaaaaaaaaaaaaaaaaaaaaaaaaaaaaaaaaaaaaaaaaaaaaaaaaaaaaaaaaaaaaaaaaaaaaaaaaaaaaaaaaaaaaaaaaaaaaa

SEQ ID NO: 21012 - RNA, 2033 nt, Artificial Sequence
  mRNA product Design a-1 (hSL-A100) comprising derived and/or modified sequence from LASV(LASV221-NIG-2010;Clade II)__AIT17625__SP-IgE_NP(2-569) (opt5)
aggagagucccgcagucggcguccagcggcucugcuuguucgugugugugucguugcaggccuuauucaagcuuaccauggacuggaccuggauccuguuccucguggccgcugccacaagaguccacagcagcgccuccaaggaggugaaaucuuuccuguggacccagagccucagacgggaacuguccggcuacugcucuagcaucaaacuucaagucguuaaggacgcucaggcccugcuccacgggcuggauuuuuccgaggugucuaacgugcagcgccuuaugagaaagcagcggcgcgacgauagcgaccugaaaagacuccgggaucugaaucaagcggucaacaaucugguggaacucaaguccacacagcaaaagagcauucugcgcguuggaacgcuuaccucugacgaucugcucacacuggcugccgaccuugagaaacugaaguccaaagugaucagaaccgaacggccccucagcucuggcgucuauauggggaaccuguccacacagcagcuggagcagcgcagagcccuccugaauaugauuggaauggugggcggggcucagggaacccagccuggccgggauggcguugugcgcgucugggacgugaagaacccggaucuucugaauaaccaauucgggacaaugcccagccucacccuggccugucuuacgaaacagggacagguggaccugaaugaugcuguccucgcccugaccgaccugggccucaucuacacagcgaaguauccuaacucuuccgaccuggauagacuuagccaaucccaucccauucugaauaugguugacaccaagaaaucuagccucaacaucuccggguacaauuuuagccugggagccgcugugaaggccggcgcuugcaugcuugaugggggaaacaugcuggagacaaucaaagugaccccucagacggucgacggcauucucaagucuauccugaaagugaagcggucccugggcauguucguuagcgauacacccggggaacgcaauccuuaugagaacauucucuacaaaaucugucugucuggagacggcuggccguauauugccagcagaaccuccaucguggggcgggcgugggaaaacacaaccgucgaucuugagucugacggaaagccccagaaggugggcaccgccgggagcaauaaaucccugcagagcgcuggauuuccuacaggccucacguacucucaacugaugacccugaaggauuccaugaugcagcuugaccccagcgccaaaacauggauugauaucgagggcagaccugaagaccccguugagaucgcucucuaccagccgaugucugggugcuauauucacuucuuucgcgaaccuaccgaccugaagcaguucaaacaagaugccaaguacucccauggaaucgacguggccgaucuguuucccgcucagccuggccucacaagcgcggucauugaggcccugccccggaacauggugcuuaccugucagggguccgacgauaucaagagacugcucgacucucagggacgccgggauauuaaacugaucgacaucgcucugagcaaggccgauuccagaaaauucgaaaaugccgucugggaccaaugcaaggaucuuugucacaugcauacgggcgugguuguggagaaaaagaagcgcgggggcaaagaggaaauuacaccccacugcgcucucauggacuguaucauguaugaugccgcggucucuggaggccugaacauuccugugcugcgggcuguucucccgagagacaugguguuucgcaccagcucccccaaggucgugcugugaggacuagucccuguucccagagcccacuuuuuuuucuuuuuuugaaauaaaauagccugucuuucagaucucaaaggcucuuuucagagccaccaaaaaaaaaaaaaaaaaaaaaaaaaaaaaaaaaaaaaaaaaaaaaaaaaaaaaaaaaaaaaaaaaaaaaaaaaaaaaaaaaaaaaaaaaaaaaaaaaaaaa

SEQ ID NO: 21013 - RNA, 2033 nt, Artificial Sequence
  mRNA product Design a-1 (hSL-A100) comprising derived and/or modified sequence from LASV(LASV237-NIG-2010;Clade II)__AIT17639__SP-IgE_NP(2-569) (opt5)
aggagagucccgcagucggcguccagcggcucugcuuguucgugugugugucguugcaggccuuauucaagcuuaccauggacuggaccuggauccuguuccucguggccgcugccacaagaguccacagcagcgccuccaaggaggugaaaucuuuccuguggacccagagccucagacgggaacuguccggcuacugcucuaacaucaaacuucaagucguuaaggacgcucaggcccugcuccacgggcuggauuuuagcgagguguccaaugugcagcgccuuaugagaaagcagaaacgggacgauucugaccugaagcgccucagagaucugaaccaagcggucaauaaccugguggaacucaagagcacacagcagaaauccauucugcggguuggaacgcuuaccagcgacgaucugcucacacuggcugccgaccuugagaagcugaaaucuaaggugauccgcaccgaaagaccccucuccagcggcgucuauauggggaaucugucuacacagcaacuggagcagcggcgcgcccuccugaacaugauuggaauggugggcggggcucagggaacccagccuggcagagauggcguugugcgggucugggacgugaaaaauccggaucuucugaacaaucaauucgggacaaugcccucccucacccuggccugucuuacgaagcagggacagguggaccugaacgaugcuguccucgcccugaccgaccugggccucaucuacacagcgaaguauccuaauagcucugaccuggaucgccuuucccaaagccaucccauucugaacaugguugacaucaaaaaguccucucucaauaucagcggguacaacuuuucccugggagccgcugugaaagccggcgcuugcaugcuugaugggggaaauaugcuggagaccauuaaggugacaccucagaccauggacggcauccucaaaagcauucugaaggucaaaagaucucugggcauguucguguccgauacgcccggggaacggaacccuuaugagaacauccucuacaagauuugucugagcggagacggcuggccguauaucgccucucgcacaagcauuguugggagagcgugggaaaauaccacaguggaucuugaguccgacggaaagccccagaaagucggcucugccgggagcaacaagucccugcagagcgcuggauuuccuaccggccucaccuacucucaacugaugacacugaaagauuccaugaugcagcuugaccccagcgccaagacguggaucgauaucgagggccggccugaagaccccguggagauugcucucuaccagccgaugucugggugcuauauccacuucuuuagagaaccuaccgaccugaaacaguucaagcaagaugccaaguacucccauggaauugacguugccgaucuguuucccgcucagccuggccucacaagcgcggugaucgaggcccugccccgcaauaugguccuuaccugucagggguccgacgauauuaaacggcugcucgacucucagggaagacgcgauaucaagcugaucgacauugcucugagcaaagccgauucccggagauucgaaaacgccgugugggaccaaugcaaggaucuuugucacaugcauacaggcgucgugguugagaaaaagaagcgcgggggcaaagaggaaaucacgccccacugcgcucucauggacuguauuauguaugaugccgcggugucuggaggccugaauaucccuguccugcgggcugugcucccgagagacaugguuuuucgcaccagcucccccaaggugguccugugaggacuagucccuguucccagagcccacuuuuuuuucuuuuuuugaaauaaaauagccugucuuucagaucucaaaggcucuuuucagagccaccaaaaaaaaaaaaaaaaaaaaaaaaaaaaaaaaaaaaaaaaaaaaaaaaaaaaaaaaaaaaaaaaaaaaaaaaaaaaaaaaaaaaaaaaaaaaaaaaaaaaa

SEQ ID NO: 21014 - RNA, 2033 nt, Artificial Sequence
  mRNA product Design a-1 (hSL-A100) comprising derived and/or modified sequence from LASV(LASV253-NIG-2011;Clade II)__AIT17671__SP-IgE_NP(2-569) (opt5)
aggagagucccgcagucggcguccagcggcucugcuuguucgugugugugucguugcaggccuuauucaagcuuaccauggacuggaccuggauccuguuccucguggccgcugccacaagaguccacagcagcgccuccaaggaggugaaaucuuuccuguggacccagagccucagacgggaacuguccggcuacugcucuagcaucaaacuucaagucguuaaggacgcucaggcccugcuccacgggcuggauuuuuccgaggugucuaacgugcagcgccuuaugagaaagcagaaacgggacgauagcgaccugaagcgccucagagaucugaaucaagcggucaacaaucugguggaacucaaguccacccagcagaaaagcguucugcgggugggaacgcuuaccucugacgaucugcucacacuggcugccgaccuugagaagcugaaauccaaggucauucgcaccgaaagaccccucagcucuggcguguauauggggaaccuguccacacagcaacuggagcagcggcgcgcccuccugaauaugaucggaaugguuggcggggcucagggaacccagccuggcagagauggcgugguccgggugugggacgugaaaaacccggaucuucugaauaaccaauucgggacaaugcccagccucacccuggccugucuuacgaagcagggacaggucgaccugaaugauguugugcucgcucugaccgaccugggccucauuuacacagccaaguauccuaacucuuccgaccuggaucgccuuagccaaucccaucccauccugaauaugguggacaccaaaaagucuagccucaacauuuccggguacaauuuuagccugggagcggccgucaaagcuggcgccugcaugcuugaugggggaaacaugcuggagacaaucaaggugaccccucagacgauggacggcauccucaaaucuauucugaagguuaaaaagucccugggcauguucgugagcgauacacccggggaaagaaauccuuaugagaacauccucuacaagauuugucugucuggagacggcuggccguauaucgcuagccggaccuccauugucgggcgcgccugggaaaacacaaccguggaucuugagucugacggaaaaccccagaagguuggcaccgcggggagcaauaaaucccugcagagcgccggauuuccuacaggccucacguacucucaacugaugacccugaaggauuccaugaugcagcuugaccccagcgcuaaaacauggaucgauauugagggcagaccugaagaccccguggagaucgcccucuaccagccgaugucugggugcuauauccacuucuuucgggaaccuaccgaccugaagcaguucaagcaagaugcuaaauacucccauggaauugacgucacagaucuguuucccgcccagccuggccucaccagcgccgugaucgaggcucugcccagaaacaugguccuuacgugucagggguccgacgauauuaagcgccugcucgacucucagggacggagagauaucaaacugauugacaucgcgcugagcaaggccgauucccgccgguucgaaaaugcugugugggaccaaugcaaagaucuuugucacaugcauacaggcguuguggucgagaagaagaaaagagggggcaaggaggaaaucacaccccacugcgcccucauggacuguauuauguaugaugccgcugugucuggaggccugaacaucccuguucugcgcgccgugcucccgcgggacauggucuuuagaaccagcucccccaaaguggugcugugaggacuagucccuguucccagagcccacuuuuuuuucuuuuuuugaaauaaaauagccugucuuucagaucucaaaggcucuuuucagagccaccaaaaaaaaaaaaaaaaaaaaaaaaaaaaaaaaaaaaaaaaaaaaaaaaaaaaaaaaaaaaaaaaaaaaaaaaaaaaaaaaaaaaaaaaaaaaaaaaaaaaa

SEQ ID NO: 21015 - RNA, 2033 nt, Artificial Sequence
  mRNA product Design a-1 (hSL-A100) comprising derived and/or modified sequence from LASV(LASV254-NIG-2011;Clade II)__AIT17675__SP-IgE_NP(2-569) (opt5)
aggagagucccgcagucggcguccagcggcucugcuuguucgugugugugucguugcaggccuuauucaagcuuaccauggacuggaccuggauccuguuccucguggccgcugccacaagaguccacagcagcgccuccaaggaggugaaaucuuuccuguggacccagagccucagacgggaacuguccggcuacugcucuagcaucaaacuucaagucguuaaggacgcucaggcccugcuccacgggcuggauuuuuccgaggugucuaacgugcagcgccuuaugagaaagcagaaacgggacgauagcgaccugaagcgccucagagaucugaaucaagcggucaacaaucugguggaacucaaguccacacagcagaaaagcguucugcgggugggaacgcuuaccucugacgaucugcucacacuggcugccgaccuugagaagcugaaauccaaggucauucgcaccgaaagaccccucagcucuggcguguauauggggaaccuguccacacagcaacuggagcagcggcgcgcccuccugaauaugaucggaaugguuggcggggcucagggaacccagccuggcagagauggcgugguccgggugugggacgugaaaaacccggaucuucugaauaaccaauucgggacaaugcccagccucacccuggccugucuuacgaagcagggacaggucgaccugaaugaugcuguucucgcccugaccgaccugggccucauuuacacagcgaaguauccuaacucuuccgaccuggaucgccuuagccaaucccaucccauccugaauaugguggacaccaaaaagucuagccucaacauuuccggguacaauuuuagccugggagccgcugugaaagccggcgcuugcaugcuugaugggggaaacaugcuggagacaaucaaggucaccccucagacgauggacggcauccucaaaucuauucugaaggugaaaaagucccugggcauguucguuagcgauacacccggggaaagaaauccuuaugagaacauccucuacaagauuugucugucuggagacggcuggccguauaucgccagccggaccuccauuguggggcgcgcgugggaaaacacaaucgucgaucuugagucugacggaaaaccccagaaggugggcaccgccgggagcaauaaaucccugcagagcgcuggauuuccuaccggccucacauacucucaacugaugacgcugaaggauuccaugaugcagcuugaccccagcgccaaaaccuggauugauaucgagggcagaccugaagaccccguugagaucgcucucuaccagccgaugucugggugcuauauucacuucuuucgggaaccuacagaccugaagcaguucaagcaagaugccaaauacucccauggaaucgacguggccgaucuguuucccgcucagccuggccucaccagcgcggucauugaggcccugcccagaaacauggugcuuacaugucagggguccgacgauaucaagcgccugcucgacucucagggacggagagauauuaaacugaucgacaucgcucugagcaaggccgauucccgccgguucgaaaaugccgucugggaccaaugcaaagaucuuugucacaugcauaccggcgugguuguggagaagaagaaaagagggggcaaggaggaaauuacgccccacugcgcucucauggacuguaucauguaugaugccgcggucucuggaggccugaacauuccugugcugcgcgcuguucucccgcgggacaugguguuuagaacaagcucccccaaagucgugcugugaggacuagucccuguucccagagcccacuuuuuuuucuuuuuuugaaauaaaauagccugucuuucagaucucaaaggcucuuuucagagccaccaaaaaaaaaaaaaaaaaaaaaaaaaaaaaaaaaaaaaaaaaaaaaaaaaaaaaaaaaaaaaaaaaaaaaaaaaaaaaaaaaaaaaaaaaaaaaaaaaaaaa

SEQ ID NO: 21016 - RNA, 2033 nt, Artificial Sequence
  mRNA product Design a-1 (hSL-A100) comprising derived and/or modified sequence from LASV(Nig08-04;Clade II)__ADU56611__SP-IgE_NP(2-569) (opt5)
aggagagucccgcagucggcguccagcggcucugcuuguucgugugugugucguugcaggccuuauucaagcuuaccauggacuggaccuggauccuguuccucguggccgcugccacaagaguccacagcagcgccuccaaggaggugaaaucuuuccuguggacccagagccucagacgggaacuguccggcuacugcucuaacaucaaacuucaagucguuaaggacgcucaggcccugcuccacgggcuggauuuuagcgagguguccaaugugcagcgccuuaugagaaagcagaaacgggacgauggagaccugaagcgccucagagaucugaaccaagcggucaauaaccugguggaacucaagucuacccagcagaaaagcguucugcgggugggcacgcuuaccuccgacgaucugcucacacuggcugccgaccuugagaagcugaaaagcaaggucauucgcaccgaaagaccccucucuuccgggguguauaugggaaaucugagcacacagcaacuggagcagcggaaagcccuccugucuaugaucggcaugguugggggagcucagggcacccagccuggccgcgaugggguggucagagugugggacgugaagaacccggaucuucugaauaaccaauucggaacaaugcccucccucacccuggccugucuuacgaagcagggccaggucgaccugaaugaugcuguucucgcccugaccgaccuggggcucauuuacacagcgaaauauccuaacagcucugaccuggaucggcuuucccaaagccaucccauccugaauaugguggacaccaagaaauccucucucaacauuagcggauacaauuuuucccugggcgccgcugugaaggccggggcuugcaugcuugauggaggcaacaugcuggagacaaucaaagucaccccucagacgauggacggcauccucaagagcauucugaaagugaagcgcucucuggggauguucguuuccgauacacccggagaaagaaauccuuaugagaacauccucuacaagauuugucugagcggcgacggguggccguauaucgccucucggaccagcauugugggacgcgcgugggaaaacacaaccgucgaucuugaguccgacggcaaaccccagaagguggggaccgccggaucuaauaaaagccugcaguccgcuggcuuuccuacaggccucacguacagccaacugaugacccugaaggauucuaugaugcagcuugaccccuccgccaaaacauggaucgauauugaggggagaccugaagaccccguugagaucgcucucuaccagccgaugagcggaugcuauauccacuucuuucgggaaccuaccgaccugaagcaguucaagcaagaugccaaauacucucauggcauugacgugacagaucuguuuuccgcccagcccgggcucaccagcgcugucaucgaggcgcugccuagaaacauggugcuuacgugucagggauccgacgauauuaagaaacugcucgacucucagggccgccgggauaucaagcugauugacaucagccugaauaaagccgauuccagacgcuucgaaaacgcugucugggaccaaugcaaggaucuuugucacaugcauacaggggugguuguggagaagaaaaagcggggcggaaaagaggaaaucacaccccacugcgcccucauggacuguauuauguuugaugccgcugucucuggcgggcugaauauccccauucugagagccgugcucccucgcgacaugguuuuccggaccagcuccccgaaggugguccugugaggacuagucccuguucccagagcccacuuuuuuuucuuuuuuugaaauaaaauagccugucuuucagaucucaaaggcucuuuucagagccaccaaaaaaaaaaaaaaaaaaaaaaaaaaaaaaaaaaaaaaaaaaaaaaaaaaaaaaaaaaaaaaaaaaaaaaaaaaaaaaaaaaaaaaaaaaaaaaaaaaaaa

SEQ ID NO: 21017 - RNA, 2036 nt, Artificial Sequence
  mRNA product Design a-1 (hSL-A100) comprising derived and/or modified sequence from LASV(GA391;Clade III)__AAA46284__SP-IgE_NP(2-570) (opt5)
aggagagucccgcagucggcguccagcggcucugcuuguucgugugugugucguugcaggccuuauucaagcuuaccauggacuggaccuggauccuguuccucguggccgcugccacaagaguccacagcagcgccuccaaggaggugagaucuugccuguggacccagagccuccggcgcgaacuguccggcuacuguucuaacaucaaacuucaagucguuaaggacgcucaggcccugcuccacgggcuggauuucagcgagguguccaaugugcagagacuuaugcggaaacagaagcgcgacgauggagaccugaaaagacuccgggaucugaaccaagcggucaauaaccugguggaacucaagucuacacagcagaaaagcguucugcgcgugggcacgcuuuccagcgacgaucugcucauucuggcugccgaccuugagaaacugaagucuaaagucaccagaacagaacggccccucuccagcgggguguauaugggaaaucugucuucccagcaacuggaucagcgcagagcccuccugaacaugaucggcaugaccgggguuagcggaggcggcaagggggcuucuaauggaauugugcgggucugggacgugaaaaacgccgagcuucugaauaaccaguuuggcacaaugccuucccucacccuggcuugccuuacaaagcaggggcaaguggaucugaaugacgccguccaggcgcucaccgaucugggacugaucuacacggccaaguauccgaacagcuccgaccucgaccgccugucucagagccaucccauucuuaauaugaucgauaccaaaaaguccagccugaacaucucuggcuacaauuucucccucggggcugccguuaaagcuggagccuguaugcuggacggcggcaacaugcuugagacaauuaaggugagcccucaaaccauggaugggauccugaaaucuauucucaaggugaaaaagagccugggaauguuugucuccgacacacccggcgaaagaaacccuuaugagaauauccuguacaagauuugccucucuggggauggauggagcuauaucgcgucccggaccagcauugugggccgcgccugggaaaacacgguuguggaccuggagcaggauaauaaaccccagaagaucgggaacggaggcucuaauaaaucccuucagagcgcuggcuucgccgcugggcugaucuacucucaacucaugacacugaaggacuuuaaauguuucaaccugauuccuaaugccaagaccuggauggauaucgagggaagaccggaagaccccgucgagauugcccuuuaccagccuuccagcggcugcuaugugcacuuuuuccgggaacccacagaucucaagcaguuuaaacaggacgcuaaguacucccaugggagagacguuaccgaucuguucgcggcccaaccuggacugaccucugcugugaucgaggcccucccccgcaacauggucauuacaugucagggcagcgaagacauccggaaacugcuugagucccaggggagacgcgauaucaagcugauugacaucacgcucucuaaagccgauagccggaaguuugagaaugcugugugggaccaguucaaggaucugugccacaugcauaccggcgucgugguugaaaagaagaaaagaggaggcaaggaggaaauuacaccgcacugugcccugauggacugcaucauguuugaugcggcuguguccgggggacuugacgccaaaguccuccgcgugguucugccucgggauaugguguucagaaccagcacacccaaggucgugcugugaggacuagucccuguucccagagcccacuuuuuuuucuuuuuuugaaauaaaauagccugucuuucagaucucaaaggcucuuuucagagccaccaaaaaaaaaaaaaaaaaaaaaaaaaaaaaaaaaaaaaaaaaaaaaaaaaaaaaaaaaaaaaaaaaaaaaaaaaaaaaaaaaaaaaaaaaaaaaaaaaaaaa

SEQ ID NO: 21018 - RNA, 2033 nt, Artificial Sequence
  mRNA product Design a-1 (hSL-A100) comprising derived and/or modified sequence from LASV(Nig08-A19;Clade III)__ADU56619__SP-IgE_NP(2-569) (opt5)
aggagagucccgcagucggcguccagcggcucugcuuguucgugugugugucguugcaggccuuauucaagcuuaccauggacuggaccuggauccuguuccucguggccgcugccacaagaguccacagcagcgccuccaaggaggugaaaucuuuccuguggacccagagccucagacgggaacuguccggcuacugcucuaacaucaaacuucaagucguuaaggacgcucaggcccugcuccacgggcuggauuuuagcgagguguccaaugugcagcgccuuaugagaaagcagaaacgggacgauggagaccugaagcgccucagagaucugaaccaagcggucaauaaccugguggaacucaagucuacacagcagaaaagcguucugcgggugggcacgcuuuccagcgacgaucugcucguccuggcugccgaccuugagaagcugaaaucuaaggugguucgcaccgaaagaccccucuccagcgggauuuauaugggaaaucugucuucccagcaacuggaucagcggaaagcccuccugaacaugaucggcaugacagggggaaauggcggccgcaacaccacaagcgacgggauugugagagucugggaugugaagaaugcugagcuucugaacaaucaguucggaaccaugccuucucucacacuggccugucuuaccaagcagggccaaguggaccugaacgaugcuguccaggcccucacggaccuggggcugaucuacaccgcgaaauaucccaauuccagcgaccucgaucggcuggcccagucccauccgauucuuaacaugaucgacacaaagaaaucuagccugaauaucuccggauacaacuuuagccucggcgcugccguuaaggcuggggccugcaugcuggauggaggcaacaugcuugagaccauuaaagugucuccucaaacaauggacggcauccugaaguccauucucaaagugaagcgcagccuggggauguucaucucugauacccccggagaaagaaauccuuaugagaacauucuguacaagaucugucucagcggcgacggguggcccuauauugcgucccggacgucuaucgucggacgcgccugggaaaauacagugguugaucuggagagcgacaacaaaccucagaagaccggcaaugggggauccaacaaaagccuucagucugcuggcuuugccgcuggccugacauacucccagcucaugacccugaaggauagcaugcugcaacuugacccgaaugccaaaaccuggauggauaucgaggggagacccgaagacccuguggagauugcccucuaccagcccucuuccggaugcuauauccacuucuuucgggaaccuacagaccugaagcaguucaagcaggaugcuaaauacagccauggcauugacgucacggaucuguuugcggcccaacccgggcucaccuccgcugugaucgaggcccugccgagaaacaugguuauuacaugucagggaucugaagacauccgcaaacuucuggagagccagggccggagagauaucaagcucauugacaucucccugucuaagguggauagccgcaaauucgagaaugccgucugggaccaguuuaaggaucugugccacaugcauaccgggauuguggucgaaaagaaaaagcggggcggaaaagaggaaaucacaccucacugugcucuuauggacugcauuauguucgaugccgcgguguccggcgggguugacgcuaaggugcucagagccguccugccccgcgauaugguguuucggaccagcacgccuaaaguugugcugugaggacuagucccuguucccagagcccacuuuuuuuucuuuuuuugaaauaaaauagccugucuuucagaucucaaaggcucuuuucagagccaccaaaaaaaaaaaaaaaaaaaaaaaaaaaaaaaaaaaaaaaaaaaaaaaaaaaaaaaaaaaaaaaaaaaaaaaaaaaaaaaaaaaaaaaaaaaaaaaaaaaaa

SEQ ID NO: 21019 - RNA, 2033 nt, Artificial Sequence
  mRNA product Design a-1 (hSL-A100) comprising derived and/or modified sequence from LASV(G1180-SLE-2010;Clade IV)__AIT17169__SP-IgE_NP(2-569) (opt5)
aggagagucccgcagucggcguccagcggcucugcuuguucgugugugugucguugcaggccuuauucaagcuuaccauggacuggaccuggauccuguuccucguggccgcugccacaagaguccacagcagcgccuccaaggagaucaaaucuuuccuguggacccagagccucagacgggaacuguccggcuacugcucuaacauuaagcugcaaguggucaaagacgcucaggcccugcuccacgggcuggauuuuagcgagguuuccaaugugcagcgccuuaugagaaaggaacggcgcgacgauaacgaccugaaaagacuccgggaucugaaucaggcggugaacaaucuggucgagcucaagucuacacaacaaaagagcauccugcgcgugggaacgcuuaccuccgacgaucugcucauucuggcugccgaccuugaaaaacuuaagagcaaaguuaucagaacagagcggccccucucugccggcguguauauggggaaccuguccagccagcagcuggaucagcgcagagcucuccugucuaugauuggaauguccagcggcaaucagcgggcccaggcugggcgcgacggagucgugagaguuugggaugugaagaacgucgagcuucugaauaaccaguucggcaccaugccuucucucacacuggccugucuuaccaaacaaggccagguggaccugaaugaugcggugcaggcccucacagaccuggggcugaucuacaccgcuaaguauccgaacacguccgaccucgaucggcugacccaaagccaucccauccuuaauaugauugacacaaagaaauccucucugaacaucagcggauacaauuuuucccucggcgccgcugucaaggccggggcgugcaugcuggauggaggcaacaugcuugaaaccauuaaaguuagcccucagacaauggacgggauccugaagucuauucucaaagugaagaaagcccugggaauguucaucuccgauacccccggcgagcgcaacccuuaugaaaauauucuguacaagaucugucucagcggcgacggguggcccuauaucgcuucuagaacgagcauuacaggacgggccugggagaacaccguggucgaucuggaguccgacggcaagccucagaaagcugggucuaauaacagcaauaagucccuucagagcgugggauuuacagccggccugaccuacucucaacucaugacccugaaagaugccaugcugcagcuugacccgaacgcuaagacauggauggauaucgaagggagacccgaggacccuguugaaauugcgcucuaccagcccuccagcggaugcuauauccacuucuuucgcgagccuacggaccugaaacaguucaagcaagaugccaaguacucucauggcauugacgugaccgaucuguuugcugcccagcccggccucacauccgccgucaucgacgcucugccgcggaauauggugaucaccugucaggggagcgaugacauuagaaaacuucuggaaucccagggacgcaaggauaucaaacucauugacaucgcccugucuaagacagauagccggaaauaugagaacgcgguuugggaccaauacaaggaucugugccacaugcauaccggcguggucguggagaagaaaaagagagggggaaaagaagagauuacgccucacugugcucuuauggacugcaucauguucgaugccgccgucuccggcgggcucaauacaucugugcugcgcgcuguucugccccgggacaugguguuuagaaccagcaccccucgcgucgugcucugaggacuagucccuguucccagagcccacuuuuuuuucuuuuuuugaaauaaaauagccugucuuucagaucucaaaggcucuuuucagagccaccaaaaaaaaaaaaaaaaaaaaaaaaaaaaaaaaaaaaaaaaaaaaaaaaaaaaaaaaaaaaaaaaaaaaaaaaaaaaaaaaaaaaaaaaaaaaaaaaaaaaa

SEQ ID NO: 21020 - RNA, 2033 nt, Artificial Sequence
  mRNA product Design a-1 (hSL-A100) comprising derived and/or modified sequence from LASV(G1442-SLE-2011;Clade IV)__AIT17181__SP-IgE_NP(2-569) (opt5)
aggagagucccgcagucggcguccagcggcucugcuuguucgugugugugucguugcaggccuuauucaagcuuaccauggacuggaccuggauccuguuccucguggccgcugccacaagaguccacagcagcgccuccaaggaggugaaaucuuuccuguggacccagagccucagacgggaacuguccggcuacugcucuaacaucaaacuucaagucguuaaggacgcucaggcccugcuccacgggcuggauuuuagcgagguguccaaugugcagcgccuuaugagaaagcagcggcgcgacgauaacgaccugaaaagacuccgggaucugaaucaagcggucaacaaucugguggaacucaagucuacacagcaaaagagcguucugcgcgugggaacgcuuaccuccgacgaucugcucguccuggcugccgaccuugagaaacuuaagagcaaagugauuagaacagaacggccccucucugccggcguuuauauggggaaccuguccagccagcagcuggaucagcgcagagcucuccugaauaugaucggaaugucuggcgggauucagggaacccggacaggccgcgacggcguggucagagugugggaugugaagaacgccgaccuucugaauaaccaguucgggaccaugccuucccucacacuggcuugucuuaccaaacaaggacaggucgaucugaaugacguugugcaggcccucacggaccugggccugaucuacaccgcgaaguauccgaacgccagcgaucucgaccggcugacacaaucucaucccauucuuaauaugaucgauaccaagaaauccagccugaacaucuccggguacaauuuuucucucggagcugccgugaaggcuggcgccugcaugcuggacgggggaaacaugcuugagacaauuaaagucagcccucagaccauggauggcauccugaaguccauucucaaagugaagaaaacgcugggcauguucaucagcgacacacccggggagcgcaacccuuaugaaaauauucuguacaagaucugucucucuggagauggcuggcccuauauugcguccagaaccagcaucacagggcgggccugggagaacaccguuguggaccuggaaucugauggaaagccucagaaagcuggcagcaauaacuccaauaagucucuucagagcgccggguuugcugccggacugaccuacucccaacucaugacacugaaagacgccaugcugcagcuugauccgaacgcuaagacguggauggacaucgagggcagacccgaggacccugucgaaauugcgcucuaccagcccagcucuggcugcuauauccacuucuuucgcgagccuaccgaucugaaacaguucaagcaagacgccaaguacucccaugggauugaugugacagaccuguuugcugcccagcccggacucaccagcgccguuaucgaagcucugccgcggaauauggugauuacaugucagggcucugaugacaucaaaaagcugcuggagucccaggggagaaaagauaucaagcucauugacaucgcccugagcaaaaccgauucccgcaaguaugaaaacgcggucugggaccaauacaaggaucugugccacaugcauacgggaguggucguggagaaaaagaaacggggcgggaaggaggaaauuacaccucacugugcucuuauggacugcaucauguucgaugccgccguuucuggcggacucaauacccuggugcugagagcuguccucccccgcgacaugguguuucggaccagcacaccuagaguugugcugugaggacuagucccuguucccagagcccacuuuuuuuucuuuuuuugaaauaaaauagccugucuuucagaucucaaaggcucuuuucagagccaccaaaaaaaaaaaaaaaaaaaaaaaaaaaaaaaaaaaaaaaaaaaaaaaaaaaaaaaaaaaaaaaaaaaaaaaaaaaaaaaaaaaaaaaaaaaaaaaaaaaaa

SEQ ID NO: 21021 - RNA, 2033 nt, Artificial Sequence
  mRNA product Design a-1 (hSL-A100) comprising derived and/or modified sequence from LASV(G3010-SLE-2013;Clade IV)__AIT17345__SP-IgE_NP(2-569) (opt5)
aggagagucccgcagucggcguccagcggcucugcuuguucgugugugugucguugcaggccuuauucaagcuuaccauggacuggaccuggauccuguuccucguggccgcugccacaagaguccacagcagcgccuccaaggagaucaaaucuuuccuguggacccagagccucagacgggaacuguccggcuacugcucuaacauuaaacuucaaguggucaaagacgcucaggcccugcuccacgggcuggauuuuagcgagguuuccaaugugcagcgccuuaugagaaaggaacggcgcgacgauaacgaccugaaaagacuccgggaucugaaucaggcggugaacaaucuggucgagcucaagucuacacaacaaaagagcauccugcgcgugggaacgcuuaccuccgacgaucugcucauucuggcugccgaccuugaaaaacuuaagagcaaaguuacaagaaccgagcggccccucucugccggcguguauauggggaaccuguccagccagcagcuggaucagcgcagagcucuccugucuaugaucggaauguccagcggcguccagggggcccgggcuggacgcgacggcgugguuagagugugggaugucaagaaugccgagcuucugaacaaucaguucggcacaaugccuucucucacccuggcgugucuuacaaaacaggggcaaguggaccugaacgaugugguccaggcccucaccgaccugggacugauuuacacggcuaaguauccgaauaccuccgaccucgaucggcugacacagagccaucccauccuuaacaugaucgacaccaagaaauccucucugaauauuagcggcuacaacuuuucccucggggccgcuguuaaggccggagcgugcaugcuggauggcgggaauaugcuugaaacaaucaaagugagcccucaaaccauggacggcauucugaagucuauccucaaagugaagaaagcccugggaauguucauuuccgagacgcccggcgaacgcaacccuuaugagaacauccuguacaagauuugucucagcggggauggauggcccuauaucgcuucuagaacaagcaucaccggccgggccugggagaauacagucguggaccuggaauccgaugggaagccucagaaagcuggaucuaacaauagcaacaagucccuucagagcgccggcuuuaccgccgggcugaccuacucucagcucaugacacugaaagacgcuaugcugcaacuugauccgaaugcgaagacguggauggacauugagggaagacccgaagauccuguugagguggcccucuaccagcccuccagcggcugcuauauccacuucuuucgcgaaccuaccgaccugaaacaguucaagcaggacgcuaaguacucucauggcauugaugucacagaccuguuugccgcccaacccgggcucaccuccgcugugaucgaugcccugccgcggaacaugguuauuacaugucagggaagcgacgauaucaaaaagcugcuggagucccagggcagaaaagacaucaagcucauugauaucgcgcugucuaaaaccgacagccgcaaguaugagaaugcugugugggaucaguacaaggaccugugccacaugcauacgggggucguggucgaaaagaagaaacggggaggcaaggaggaaauuacaccucacugugcccuuauggauugcaucauguucgacgccgcuguguccgggggccucaacaccucuguucugagagccgugcugccccgcgauauggucuuucggaccagcacaccuagagugguucucugaggacuagucccuguucccagagcccacuuuuuuuucuuuuuuugaaauaaaauagccugucuuucagaucucaaaggcucuuuucagagccaccaaaaaaaaaaaaaaaaaaaaaaaaaaaaaaaaaaaaaaaaaaaaaaaaaaaaaaaaaaaaaaaaaaaaaaaaaaaaaaaaaaaaaaaaaaaaaaaaaaaaa

SEQ ID NO: 21022 - RNA, 2033 nt, Artificial Sequence
  mRNA product Design a-1 (hSL-A100) comprising derived and/or modified sequence from LASV(G502-SLE-2009;Clade IV)__AIT17127__SP-IgE_NP(2-569) (opt5)
aggagagucccgcagucggcguccagcggcucugcuuguucgugugugugucguugcaggccuuauucaagcuuaccauggacuggaccuggauccuguuccucguggccgcugccacaagaguccacagcagcgccuccaaggagaucaaaucuuuccuguggacccagagccucagacgggaacuguccggcuacugcucuaacauuaagcugcaaguggucaaagacgcucaggcccugcuccacgggcuggauuuuagcgagguuuccaaugugcagcgccuuaugagaaaggaacggcgcgacgauaacgaccugaaaagacuccgggaucugaaucaggcggugaacaaucuggucgagcucaagucuacacaacaaaagagcauccugcgcgugggaacgcuuaccuccgacgaucugcucauucuggcugccgaccuugaaaaacuuaagagcaaaguuaucagaacagagcggccccucucugccggcguguauauggggaaccuguccagccagcagcuggaucagcgcagagcucuccugucuaugauuggaauguccggcgggaaucagggaguccgggccggcaaggacggcgugguucgcgugugggaugucaaaaacgcugagcuucugaauaaccaguucgggaccaugccuagccucacacuggccugucuuaccaagcagggacaaguggaccugaaugaugcggugcaggcccucacagaccugggccugaucuacaccgcuaaguauccgaacacgucugaccucgauagacugacccagucccaucccauccuuaauaugauugacaccaaaaagagcucccugaacaucucuggguacaauuuuagccucggagccgcugucaaagccggcgcgugcaugcuggaugggggaaacaugcuugaaacaauuaagguuuccccucaaacaauggacggcauccugaaaagcauucucaaggugaaaaaggcccugggcauguucaucucugauacccccggggagcggaacccuuaugaaaauauucuguacaagaucugucucuccggagacggcuggcccuauaucgcuagccgcacgucuauuacagggagagccugggagaacaccguggucgaucuggagagcgacggaaaaccucagaaggcuggcuccaauaacucuaauaaaagccuucaguccgccggguuuacagccggacugaccuacagccagcucaugacccugaaggaugcuaugcugcaacuugacccgaacacaaaaacguggauggauaucgaaggccggcccgaggacccuguggaaauugcgcucuaccagcccucuuccggcugcuauauccacuucuuuagagagccuaccgaccugaagcaguucaagcaggaugccaaauacagccaugggauugacguuacagaucuguuugcugcccaacccggacucaccucugccgugaucgacgcucugccgcgcaauauggucaucacaugucagggcuccgaugacauucggaaacuucuggaaagccaggggagaaaggauaucaagcucauugacaucgcccugaacaaaaccgauucccgcaaguaugagaaugcggugugggaccaguacaaggaucugugccacaugcauacgggaguuguggucgagaaaaagaaacggggcgggaaggaagagauuacaccucacugugcucuuauggacugcaucauguucgaugccgccgugucuggcggacucaacaccagcguccugagagcugugcugccccgcgacaugguuuuucggaccuccacaccuagagugguccucugaggacuagucccuguucccagagcccacuuuuuuuucuuuuuuugaaauaaaauagccugucuuucagaucucaaaggcucuuuucagagccaccaaaaaaaaaaaaaaaaaaaaaaaaaaaaaaaaaaaaaaaaaaaaaaaaaaaaaaaaaaaaaaaaaaaaaaaaaaaaaaaaaaaaaaaaaaaaaaaaaaaaa

SEQ ID NO: 21023 - RNA, 2033 nt, Artificial Sequence
  mRNA product Design a-1 (hSL-A100) comprising derived and/or modified sequence from LASV(G733-SLE-2010;Clade IV)__AIT17155__SP-IgE_NP(2-569) (opt5)
aggagagucccgcagucggcguccagcggcucugcuuguucgugugugugucguugcaggccuuauucaagcuuaccauggacuggaccuggauccuguuccucguggccgcugccacaagaguccacagcagcgccuccaaggagaucaaaucuuuccuguggacccagagccucagacgggaacuguccggcuacugcucuaacauuaagcugcaaguggucaaagacgcucaggcccugcuccacgggcuggauuuuagcgagguuuccaaugugcagcgccuuaugagaaaggaacggcgcgacgauaacgaccugaaaagacuccgggaucugaaucaggcggugaacaaucuggucgagcucaagucuacacaacaaaagagcgugcugcgcguuggaacgcuuaccuccgacgaacugcucgugcuggcugccgaucuugagaaacuuaagagcaaagucaucagaacagagcggccccucucugccggcguguauauggggaaccuguccagccagcagcuggaccagcgcagagcucuccugucuaugauuggaauguccggcgggaaucagggagcccggaccggccgcgauggcguugugagagucugggacgugaagaacgcugaacuucugaauaaccaguucgggacaaugccuagccucacccuggccugucuuacaaaacagggacaaguggaucugaaugacgcgguccaggcccucaccgaucugggccugaucuacacggcuaaguauccgaacaccucugaccucgaccggcugacacagucccaucccauucuuaauaugaucgauaccaagaaaagcucccugaacaucucuggguacaauuuuagccucggagccgcuguuaaggccggcgcgugcaugcuggacgggggaaacaugcuugagacaauuaaaguguccccucaaaccauggauggcauccucaagagcauucugaaagugaagaaagcccugggcauguucaucucugacacgcccggggaacgcaacccuuaugagaauauucuguacaagaucugucucuccggagauggcuggcccuauauugcuagcagaacaucuaucaccgggcgggccugggagaacacagucguggaccuggaaagcgauggaaagccucagaaagcuggcuccaauaacucuaauaagagccuucaguccgccggguuuaccgccggacugaccuacagccagcucaugacacugaaagacgcuaugcugcaacuugauccgaacgcgaagacguggauggacaucgagggcagacccgaagauccuguugagauugcccucuaccagcccucuuccggcugcuauauccacuucuuucgcgaaccuaccgaccugaaacaguucaagcaggacgcuaaguacagccaugggauugaugugacagaccuguuugccgcccaacccggacucaccucugcugucaucgaugcccugccgcggaauauggugauuacaugucagggcuccgacgauaucagaaaacuucuggagagccaggggcgcaaggacaucaaacucauugauaucgcgcuguccaagauugacucucggaaauaugagaacgcuguuugggaucaguacaaggaccugugccacaugcauaccggaguggucguggaaaagaaaaagagaggcgggaaagaggaaaucacgccucacugugcccuuauggauugcauuauguucgacgccgcugucagcggcggacucaauucccuggugcugcgcgccguucucccccgggauaugguguuuagaacaucuaccccucgcgucgugcugugaggacuagucccuguucccagagcccacuuuuuuuucuuuuuuugaaauaaaauagccugucuuucagaucucaaaggcucuuuucagagccaccaaaaaaaaaaaaaaaaaaaaaaaaaaaaaaaaaaaaaaaaaaaaaaaaaaaaaaaaaaaaaaaaaaaaaaaaaaaaaaaaaaaaaaaaaaaaaaaaaaaaa

SEQ ID NO: 21024 - RNA, 2033 nt, Artificial Sequence
  mRNA product Design a-1 (hSL-A100) comprising derived and/or modified sequence from MOPV/LASV reassortant(IGS-1;Clade IV)__AFY05578__SP-IgE_NP(2-569) (opt5)
aggagagucccgcagucggcguccagcggcucugcuuguucgugugugugucguugcaggccuuauucaagcuuaccauggacuggaccuggauccuguuccucguggccgcugccacaagaguccacagcagcgccuccaaggagaucaaaucuuuccuguggacccagagccucagacgggaacuguccggcuacugcucuaacauuaaacuucaaguggucaaggacgcucaggcccugcuccacgggcuggauuuuagcgagguuuccaaugugcagcgccuuaugagaaaggaacggcgcgacgauaacgaccugaaaagacuccgggaucugaaucaggcggugaacaaucuggucgagcucaagucuacacaacaaaagagcauccugcgcgugggaacgcuuaccuccgacgaucugcucauucuggcugccgaccuugaaaaacugagaagcaagguuauccggacagagcgcccccucucugccggcguguauauggggaaccuguccagccagcagcuggaucagagacgggcucuccugaauaugauuggaaugucuggcgggaaccagggagcccgcgcuggcagagacggcgucgugcggguuugggaugugaaaaaugccgagcuucuguccaaccaguucgggaccaugccuagccucacacuggcgugucuuaccaagcagggacaagucgaccugaaugaugccgugcaggcucucacagaccugggccugaucuacaccgccaaauauccgaacacgucugaccucgaucgccugacccagucccaucccauccuuaauaugauugacacaaagaaaagcucccugaacaucucuggguacaauuuuagccucggagcugccgugaaggcgggcgccugcaugcuggaugggggaaacaugcuugaaaccauuaaggucuccccucaaacaauggacggcauccugaaaagcauucucaagguuaaaaaggcucugggcauguucaucucugauacccccggggagagaaacccuuaugaaaauauucuguacaaaaucugucucuccggagacggcuggcccuauaucgccagccggacgucuauuacagggagagcuugggagaacaccgugguggaucuggagagcgacggaaagccucagaaggccgauuccaauaacucuagcaaaucccuucagagcgccggcuuuacagcugggcugaccuacucucagcucaugacccugaaggacgcgaugcugcaacuugauccgaaugccaaaacauggauggacaucgaaggacgccccgaggacccugucgaaauugcucucuaccagcccuccagcggcugcuauauccacuucuuucgggagccuacggaucugaagcaguucaaacaggacgccaaguacucucauggcauugaugugaccgaccuguuugccacacaacccgggcucaccuccgcuguuaucgaugcccugccgagaaacauggugaucacaugucagggaagcgacgauauucgcaaacuucuggaaucccagggccggaaggacaucaagcucauugauaucgaccugucuaaaaccgauagcagaaaguaugagaaugcggucugggaccaguacaaagaucugugccacaugcauacgggggugguuguggagaagaagaaacgcggaggcaaggaagagauuacaccucacugugcucuuauggacugcaucauguucgacgccgccgucuccgggggccucaacaccucugugcugcgggcuguccugcccagagauaugguguuucgcaccagcacaccucggguugugcucugaggacuagucccuguucccagagcccacuuuuuuuucuuuuuuugaaauaaaauagccugucuuucagaucucaaaggcucuuuucagagccaccaaaaaaaaaaaaaaaaaaaaaaaaaaaaaaaaaaaaaaaaaaaaaaaaaaaaaaaaaaaaaaaaaaaaaaaaaaaaaaaaaaaaaaaaaaaaaaaaaaaaa

SEQ ID NO: 21025 - RNA, 2033 nt, Artificial Sequence
  mRNA product Design a-1 (hSL-A100) comprising derived and/or modified sequence from LASV(LM765-SLE-2012;Clade IV)__AIT17815__SP-IgE_NP(2-569) (opt5)
aggagagucccgcagucggcguccagcggcucugcuuguucgugugugugucguugcaggccuuauucaagcuuaccauggacuggaccuggauccuguuccucguggccgcugccacaagaguccacagcagcgccuccaaggagaucaaaucuuuccuguggacccagagccucagacgggaacuguccggcuacugcucuaacauuaagcugcaaguggucaaagacgcucaggcccugcuccacgggcuggauuuuagcgagguuuccaaugugcagcgccuuaugagaaaggaacggcgcgacgauaacgaccugaaaagacuccgggaucugaaucaggcggugaacaaucuggucgagcucaagucuacacaacaaaagagcauccugcgcgugggaacgcuuaccuccgacgaucugcucauucuggcugccgaccuugaaaaacuuaagagcaaaguuacaagaaccgagcggccccucucugccggcguguauauggggaaccuguccagccagcagcuggaucagcgcagagcucuccuggacaugaucggaaugucuggcuccaaucagggggcccgggcuggacgcgauggcgucgugagaguuugggacgugaagaacgccgagcuucugaauaaccaguucggcacaaugccuagccucacccuggcgugucuuacaaaacaggggcaagucgaucugaaugacgccgugcaggcucucaccgaccugggacugauuuacacggccaaguauccgaacaccucugaucucgaccggcugacacagucccaucccauccuuaauaugaucgauaccaagaaaagcucccugaacauuucuggcuacaauuuuagccucggggcugccgugaaggcgggagccugcaugcuggacggcgggaacaugcuugaaacaaucaaagucuccccucaaaccauggauggcauucucaagagcauccugaaaguuaagaaagcucugggaauguucauuucugacgcccccggcgagcgcaacccuuaugaaaauauccuguacaagauuugucucuccggggauggauggcccuauaucgcuagcagaacgucuaucacaggccgggccugggagaacaccgugguggaccuggagagcgaugggaagccucagaaagccggauccaauggcucuaacaagagccuucaguccgcuggguuuacagcgggacugaccuacagccagcucaugacccugaaagacgccaugcugcaacuugauccgaaugcuaagacauggauggacauugaaggcagacccgaggacccugucgaaaucgcccucuaccagcccucuuccggcugcuauauucacuucuuucgcgagccuacggaucugaaacaguucaagcaggacgccaaguacagccaugggaucgaugugaccgaccuguuugcugcccaacccggacucacaucugcgguuauugaugcucugccgcggaacauggugaucaccugucagggcuccgacgauaucagaaaacuuuucgaaagccaggggcgcaaggacauuaaacugaucgauauugcccucuccaagacagacucucggaaauaugagaaugccgucugggaucaguacaaggaccugugccacaugcauaccggaaucgugguugagaagaaaaagagaggcgggaaagaagagauuacgccucacugugcucugauggauugcaucauguuugacgccgcugugagcggcggacuuaacacauccguccuccgcgccgugcugccccgggacauggucuucagaaccucuaccccucgcgugguucugugaggacuagucccuguucccagagcccacuuuuuuuucuuuuuuugaaauaaaauagccugucuuucagaucucaaaggcucuuuucagagccaccaaaaaaaaaaaaaaaaaaaaaaaaaaaaaaaaaaaaaaaaaaaaaaaaaaaaaaaaaaaaaaaaaaaaaaaaaaaaaaaaaaaaaaaaaaaaaaaaaaaaa

SEQ ID NO: 21026 - RNA, 2033 nt, Artificial Sequence
  mRNA product Design a-1 (hSL-A100) comprising derived and/or modified sequence from LASV(LM776-SLE-2012;Clade IV)__AIT17825__SP-IgE_NP(2-569) (opt5)
aggagagucccgcagucggcguccagcggcucugcuuguucgugugugugucguugcaggccuuauucaagcuuaccauggacuggaccuggauccuguuccucguggccgcugccacaagaguccacagcagcgccuccaaggagaucaaaucuuuccuguggacccagagccucagacgggaacuguccucuuacugcagcaacauuaaacuucaaguggucaaggacgcucaggcccugcuccacggccuggauuuuuccgagguuucuaaugugcagcgccuuaugagaaaggaacggcgcgacgauaacgaccugaaaagacuccgggaucugaaucaggcggugaacaaucuggucgagcucaagagcacacaacagaaguccauccugcgcguggggacgcuuaccagcgacgaucugcucauucuggcugccgaccuugaaaaacugaagucuaaaguuacaagaaccgagcggccccucuccgccggaguguauaugggcaaccugagcucucagcagcuggaucaacgcagagcucuccuguccaugaucgggaugagcggaucuaaucagggcgcccgggcugggcgcgacggagucgugagaguuugggaugugaagaacgccgagcuucugaauaaccaguucggcacaaugccuucccucacccuggcgugucuuacaaaacagggccaagucgaccugaaugaugccgugcaggcucucaccgaccuggggcugauuuacacggccaaguauccgaacaccagcgaccucgaucggcugacacagucccaucccauccuuaauaugaucgacaccaagaaaucuagccugaacauuuccggauacaauuuuagccucggcgcugccgugaaggcgggggccugcaugcuggauggaggcaacaugcuugaaacaaucaaagucucuccucaaaccauggacgggauucugaaguccauccucaaaguuaagaaagcucugggaauguucauuagcgauacgcccggcgagcgcaacccuuaugaaaauauccuguacaagauuugucucucuggcgacggguggcccuauaucgccagcagaacauccaucaccggacgggcuugggagaacacagugguggaucuggagucugacggcaagccucagaaagccgggagcaauaacuccaauaagagccuucagucugccggauuuaccgcuggccugaccuacucccagcucaugacacugaaagaugcgaugcugcaacuugacccgaacgccaagacguggauggauauugaagggagacccgaggacccugucgaaguggcucucuaccagcccagcucuggaugcuauauccacuucuuucgcgagccuaccgaccugaaacaguucaagcaggaugccaaguacucccauggcauugacguuacagaucuguuugccgcucaacccggccucaccagcgccgugaucgacgcgcugccgcggaauauggucauuacaugucagggguccgaugacaucagaaaacuucuggaaucucagggacgcaaggauaucaaacucauugacaucgcucugagcaagaccgauucccggaaauaugagaacgccgugugggaccaguacaaggaucugugccacaugcauacgggcguuguggucgagaagaaaaagagagggggaaaagaagagauuacaccucacugugcccuuauggacugcaucauguucgaugcugccgugucuggcgggcucaauaccagcguccugcgcgcugugcugccccgggacaugguuuuuagaaccuccacaccucgcgugguccucugaggacuagucccuguucccagagcccacuuuuuuuucuuuuuuugaaauaaaauagccugucuuucagaucucaaaggcucuuuucagagccaccaaaaaaaaaaaaaaaaaaaaaaaaaaaaaaaaaaaaaaaaaaaaaaaaaaaaaaaaaaaaaaaaaaaaaaaaaaaaaaaaaaaaaaaaaaaaaaaaaaaaa

SEQ ID NO: 21027 - RNA, 2033 nt, Artificial Sequence
  mRNA product Design a-1 (hSL-A100) comprising derived and/or modified sequence from LASV(Mad39;Clade IV)__ANH09723__SP-IgE_NP(2-569) (opt5)
aggagagucccgcagucggcguccagcggcucugcuuguucgugugugugucguugcaggccuuauucaagcuuaccauggacuggaccuggauccuguuccucguggccgcugccacaagaguccacagcagcgccuccaaggagaucaaaucuuuccuguggacccagagccucagacgggaacuguccggcuacugcucuaacauuaagcugcaaguggucaaagacgcucaggcccugcuccacgggcuggauuuuagcgagguuuccaaugugcagcgccuuaugagaaagcagcggcgcgacgauaacgaccugaaaagacuccgggaucugaaucaagcggugaacaaucuggucgaacucaagucuacacagcaaaagagcgugcugcgcguuggaacgcuuaccuccgacgaucugcucacacuggcugccgaccuugagaaacuuaagagcaaagugaccagaacagaacggccccucaccgccggcgucuauauggggaaccugucuucccagcagcuggaucagcgcagagcucuccugaauaugaucggaaugagcggcgggaaccagggagcccggacaggccgcgacggcgugguuagagugugggaugucaagaaugcugagcuucugaacaaucaguucgggaccaugccuucucucacgcuggccugucuuaccaaacaaggacagguggaccugaacgaugugguccaggcgcucacagaccugggccugauuuacaccgccaaguauccgaauacauccgaccucgaucggcugacccaaagccaucccauccuuaacaugauugacacgaauaagucuucccugaacaucagcggguacaacuuuucccucggagcugccguuaaagcuggcgccugcaugcuggaugggggaaauaugcuugagacaaucaaggugucuccucagaccauggacggcauucugaaaagcauccucaaggugaaaaagucccugggcauguucauuagcgauacacccggggaacgcaacccuuaugagaauauccuguacaaaauuugucucucuggagacggcuggcccuauaucgcguccagaaccagcauuaccgggcgggccugggaaaacacagucguggaucuggagucuggaggcaagccucagaaggcugggagcaauaacuccaauaaaucucuucagagcgccggauuugcugccggccugacguacucccaacucaugacccugaaggacgccaugcugcagcuugauccgaacgcuaaaacauggauggacaucgagggcagacccgaagauccuguugagaucgcgcucuaccagcccauuagcgggugcuauauccacuucuuucgcgaaccuaccgaccugaagcaguucaaacaagacgccaaguacucucauggaauugaugugacagaccuguuugcugcccagcccggccucaccuccgccgucaucgaggcucugccgcggaauauggugauuacgugucaggggagcgaugacaucagaaaacuuuucgaaucucagggacgcaaggauaucaagcugauugacaucgcccucuccaaaacagauagccggaaguaugagaacgcgguuugggaccaauacaaagaucugugccacaugcauaccggcguggucguggagaagaagaaaaagggcgggaaagaagagauuaccccucacugugcucugauggacugcaucauguuugaugccgccgucuccggaggccuuaauacacucgugcugagagcuguucugccccgcgacaugguguuccggaccucuacaccuaaggucgugcucugaggacuagucccuguucccagagcccacuuuuuuuucuuuuuuugaaauaaaauagccugucuuucagaucucaaaggcucuuuucagagccaccaaaaaaaaaaaaaaaaaaaaaaaaaaaaaaaaaaaaaaaaaaaaaaaaaaaaaaaaaaaaaaaaaaaaaaaaaaaaaaaaaaaaaaaaaaaaaaaaaaaaa

SEQ ID NO: 21028 - RNA, 2033 nt, Artificial Sequence
  mRNA product Design a-1 (hSL-A100) comprising derived and/or modified sequence from LASV(Z0947-SLE-2011;Clade IV)__AIT17841__SP-IgE_NP(2-569) (opt5)
aggagagucccgcagucggcguccagcggcucugcuuguucgugugugugucguugcaggccuuauucaagcuuaccauggacuggaccuggauccuguuccucguggccgcugccacaagaguccacagcagcgccuccaaggagaucaaaucuuuccuguggacccagagccucagacgggaacuguccggcuacugcucuaacauuaagcugcaaguggucaaagacgcucaggcccugcuccacgggcuggauuuuagcgagguuuccaaugugcagcgccuuaugagaaaggaacggcgcgacgauaacgaccugaaaagacuccgggaucugaaucaggcggugaacaaucuggucgagcucaagucuacacaacaaaagagcauccugcgcgugggaacgcuuaccuccgacgaucugcucauucuggcugccgaccuugaaaaacuuaagagcaaaguuacaagaaccgagcggccccucucugccggcguguauauggggaaccuguccagccagcagcuggaucagcgcagagcucuccugaauaugaucggaaugucuggcuccaaccagggggcccggacaggacgcgacggcgucgugagaguuugggaugugaagaaugcugagcuucugaacaaucaguucggcaccaugccuagccucacacuggccugucuuaccaaacaggggcaagucgaccugaacgaugcggugcaggcccucacggaccugggacugauuuacaccgcuaaguauccgaauacaucugaccucgaucggcugacccagucccaucccauccuuaacaugaucgacacaaagaaaagcucccugaauauuucuggcuacaacuuuagccucggggccgcugugaaggccggagcgugcaugcuggauggcgggaacaugcuugaaaccaucaaagucuccccucaaacgauggacggcauucucaagagcauccugaaaguuaagaaagcccugggaauguucauuucugaugcucccggcgagcgcaauccuuaugaaaacauccuguacaagauuugucucuccggggacggauggcccuauaucgccagcagaacaucuaucaccggccgggcuugggagaauacagugguggaucuggagagcgacgggaagccucagaaagccggauccaacggcucuaauaagagccuucaguccgccggguuuaccgcuggacugaccuacagccagcucaugacacugaaagaugcgaugcugcaacuugacccgaacgccaagacguggauggauauugaaggcagacccgaggacccugucgaaaucgcucucuaccagcccucuuccggcugcuauauucacuucuuucgcgagccuaccgaccugaaacaguucaagcaggaugccaaguacagccaugggaucgacgugacagaucuguuugccgcucaacccggacucaccucugccguuauugacgcgcugccgcggaauauggugaucacaugucagggcuccgaugacaucagaaaacuuuucgaaagccaggggcgcaaggauauuaaacugaucgacauugcucucuccaagaccgauucucggaaauaugagaacgccgucugggaccaguacaaggaucugugccacaugcauacgggaaucgugguugagaagaaaaagagaggcgggaaagaagagauuacaccucacugugcccugauggacugcaucauguuugaugcugccgugagcggcggacuuaauaccuccguccuccgcgcugugcugccccgggacauggucuucagaaccucuacaccucgcgugguucugugaggacuagucccuguucccagagcccacuuuuuuuucuuuuuuugaaauaaaauagccugucuuucagaucucaaaggcucuuuucagagccaccaaaaaaaaaaaaaaaaaaaaaaaaaaaaaaaaaaaaaaaaaaaaaaaaaaaaaaaaaaaaaaaaaaaaaaaaaaaaaaaaaaaaaaaaaaaaaaaaaaaaa

SEQ ID NO: 21029 - RNA, 2009 nt, Artificial Sequence
  mRNA product Design a-1 (A100) comprising derived and/or modified sequence from LASV(Josiah;Clade IV)__NP_694869__SP-IgE_NP(2-569) (opt1)
aggagagucccgcagucggcguccagcggcucugcuuguucgugugugugucguugcaggccuuauucaagcuuaccauggacuggaccuggauccuguuccucguggccgccgcgacccgcguccacagcagcgccuccaaggagaucaagagcuuccuguggacccagucccuccgccgggagcugagcggcuacugcuccaacaucaagcuccagguggucaaggacgcccaggcgcugcugcacgggcuggacuucagcgagguguccaacgugcagcgccucaugcggaaggagcgccgggacgacaacgaccugaagcgccugcgggaccucaaccaggccgucaacaaccugguggagcucaagagcacccagcagaaguccauccugcgcgugggcacccugaccagcgacgaccugcucauccuggccgccgaccuggagaagcucaaguccaaggucauccggaccgagcgcccccugagcgccgggguguacaugggcaaccuguccagccagcagcucgaccagcggcgcgcgcugcugaacaugaucgggauguccggcggcaaccagggggcccgggccggccgcgacggggugguccgggugugggacgugaagaacgccgagcuccugaacaaccaguucggcaccaugccgagccugacgcucgcgugccugaccaagcaggggcaggucgaccugaacgacgccgugcaggcccucaccgaccugggccugaucuacaccgccaaguaccccaacacguccgaccucgaccgccugacccagagccaccccauccugaacaugaucgacaccaagaaguccagccucaacaucagcggcuacaacuucucccugggggccgcggugaaggccggcgccugcaugcuggacgggggcaacaugcucgagaccaucaaggucagcccccagacgauggacggcauccugaaguccauccugaaggugaagaaggcccucgggauguucaucagcgacaccccgggcgagcggaaccccuacgagaacauccuguacaagaucugccuguccggggacggcuggcccuacaucgccagccgcaccuccaucaccgggcgggcgugggagaacacgguggucgaccucgagagcgacggcaagccccagaaggccgacuccaacaacagcuccaagagccugcaguccgccggcuucaccgccgggcugaccuacagccagcucaugacccugaaggacgccaugcugcagcuggacccgaacgcgaagacguggauggacaucgagggccgccccgaggaccccguggagaucgcccucuaccagcccuccagcgggugcuacauccacuucuuccgggagccgaccgaccugaagcaguucaagcaggacgccaaguacucccacggcaucgacgugaccgaccuguucgccacccagcccgggcucacgagcgccgucaucgacgcgcugccccgcaacauggugaucacgugccagggcuccgacgacauccgcaagcugcucgagagccagggccggaaggacaucaagcugaucgacaucgcccugagcaagaccgacucccgcaaguacgagaacgccgugugggaccaguacaaggaccucugccacaugcacaccggggucguggucgagaagaagaagcggggcgggaaggaggagaucaccccgcacugcgcccugauggacugcaucauguucgacgcggccgugagcggcgggcugaacaccuccgugcuccgcgccguccugccccgggacaugguguuccgcaccagcacgccccgggugguccugugaggacuagucccuguucccagagcccacuuuuuuuucuuuuuuugaaauaaaauagccugucuuucagaucuaaaaaaaaaaaaaaaaaaaaaaaaaaaaaaaaaaaaaaaaaaaaaaaaaaaaaaaaaaaaaaaaaaaaaaaaaaaaaaaaaaaaaaaaaaaaaaaaaaaa

SEQ ID NO: 21030 - RNA, 2009 nt, Artificial Sequence
  mRNA product Design a-1 (A100) comprising derived and/or modified sequence from LASV(LP;Clade I)__AAF86702__SP-IgE_NP(2-569) (opt1)
aggagagucccgcagucggcguccagcggcucugcuuguucgugugugugucguugcaggccuuauucaagcuuaccauggacuggaccuggauccuguuccucguggccgccgcgacccgcguccacagcagcaacuccaaggagaucaagagcuuccuguggacccagucccuccgccgggagcugagcggcuacugcuccaacaucaagcuccagguggucaaggacgcccaggcccugcugcacgggcuggacuucagcgagguguccaacgugcagcgccucaugcggaagcagaagcgcgacgacgcggaccugaagcggcugcgcgaccucaaccaggccgucaacaaccugguggagcucaagagcacccagcagaagaacgugcugcgggucggcacgcuguccagcgacgaccugaucacccucgccgccgaccuggagaagcugaaguccaaggugauccgcaccgagcggccccucagcuccgggguguacaugggcaaccugagcucccagcagcuggaccagcgccgggcccuccugagcaugaucgggauguccggcggcccgcaggggaaccgcaccggcggggacggcgucgugcgggugugggacgucaagaacgcggagcugcucaacaaccaguucgggacgaugcccagccugacccuggccugccucaccaagcagggccagguggaccugaacgacgccgugcaggcccugaccgaccucggccugaucuacacggcgaaguaccccaacuccagcgaccuggacaugcucacccagagccaccccauccuggggauggucgacaccaagaaguccagccugaacaucuccggcuacaacuucagccucggggccgccgugaaggccggcgccugcaugcuggacggcgggaacaugcuggagaccaucaagguguccccgcagacgauggacggcauccucaagagcauccugaaggucaagcgcucccuggggauguucaucagcgacacccccggcgagcggaaccccuacgagaacauccucuacaagaucugccuguccggggagggcuggcccuacaucgcgagccgcaccuccaucaccggccgggccugggagaacacgcugguggaccucgagagcgacaacaagccgcccaagcugaacuccgccgggagcaacaagucccugcaggccgccggccucaacgcggggcugaccuacagccagcugaugacccugaaggacugcaugcuccagcuggaccccuccagcaagaccuggaucgacaucgagggccgccccgaggacccgguggagaucgcccuguuccagcccuccagcgggugcuacauccacuucuuccgggagcccacggaccucaagcaguucaagcaggacgccaaguacagccacggcaucgacgucaccgaccuguucuccacccagcccggccugaccagcgccgugaucgaggcccucccgcgcaacauggugcugacgugccagggguccgacgacaucaagaagcugcucgagagccagggccggcgcgacaucaagcugaucgacaucucccugagcaaggcggacucccgcaaguucgagaacgccgucugggaccaguacaaggaccucugccacaugcacaccgggguggucguggagaagaagaagcggggcgggaaggaggagaucacgccccacugcgcccugcuggacugcaucauguucgacgccgccaccaccggcagccucaacaucaccacccugcgcgcggugcugccccgggacauggucuuccgcaccuccacgcccaagguggugcucugaggacuagucccuguucccagagcccacuuuuuuuucuuuuuuugaaauaaaauagccugucuuucagaucuaaaaaaaaaaaaaaaaaaaaaaaaaaaaaaaaaaaaaaaaaaaaaaaaaaaaaaaaaaaaaaaaaaaaaaaaaaaaaaaaaaaaaaaaaaaaaaaaaaaa

SEQ ID NO: 21031 - RNA, 2009 nt, Artificial Sequence
  mRNA product Design a-1 (A100) comprising derived and/or modified sequence from LASV(803213;Clade II)__AAF86704__SP-IgE_NP(2-569) (opt1)
aggagagucccgcagucggcguccagcggcucugcuuguucgugugugugucguugcaggccuuauucaagcuuaccauggacuggaccuggauccuguuccucguggccgccgcgacccgcguccacagcagcgccuccaaggaggugaaguccuuccuguggacccagagccuccgccgggagcugagcggcuacugcuccaacaucaagcugcaggucgugaaggacgcccaggcgcuccugcacgggcuggacuucagcgaggugaacaacguccagcgccucaugcggaagcagaagcgcgacgacggcgaccugaagcggcugcgcgaccucaaccaggccgugaacaaccugguggagcugaaguccacccagcagaaguccauccuccgggucgggacgcugaccagcgacgaccugcucacccuggccgccgaccuggagaagcucaagagcaaggugauccgcaccgagcggccccuguccagcggcguguacauggggaaccuguccacgcagcagcucgagcagcgccgggcccugcugaacaugaucggcauggucggcggggcgcagggcacccagccggggcgcgacggcguggugcgggucugggacgugaagaaccccgaccuccugaacaaccaguucgggaccaugcccagccugacccucgccugccugacgaagcagggccagguggaccugaacgacgccguccucgcccugaccgaccugggccucaucuacaccgcgaaguaccccaacuccagcgaccuggaccgccugucccagagccacccgauccucaacaugguggacaccaagaaguccagccugaacaucagcggguacaacuucucccugggcgccgccgugaaggccggggccugcaugcucgacggcggcaacaugcuggagacgaucaaggucacgccccagaccauggacgggauccucaagagcauccugaaggugaagcggucccugggcauguucgugagcgacacccccggggagcgcaaccccuacgagaacauccuguacaagaucugccucuccggcgacggguggccguacaucgcgagccggaccuccaucgucggccgcgccugggagaacaccaccguggaccuggagagcgacggcaagccccagaagguggggaccgccggcuccaacaagagccugcaguccgccggguuccccacgggccucaccuacagccagcugaugacccugaaggacuccaugaugcagcuggaccccagcgccaagaccuggaucgacaucgaggggcggccggaggaccccgucgagaucgcgcucuaccagcccauguccggcugcuacauccacuucuuccgcgagcccacggaccugaagcaguucaagcaggacgccaaguacagccacggcaucgacguggccgaccuguucccggcccagcccgggcucaccuccgccgucaucgaggcgcugccccggaacauggugcugaccugccagggcagcgacgacaucaagaagcuccuggacucccaggggcgccgcgacaucaagcugaucgacaucagccucagcaagguggacucccggaaguucgagaacgccgucugggaccagugcaaggaccugugccacaugcacaccggcgugguggucgagaagaagaagcgcgggggcaaggaggagaucacgccccacugcgcccugauggacugcaucauguucgacgccgccgugagcggcgggcucaacaucccggugcugcgggcgguccugccccgcgacaugguguuccggaccuccagccccaaggugguccucugaggacuagucccuguucccagagcccacuuuuuuuucuuuuuuugaaauaaaauagccugucuuucagaucuaaaaaaaaaaaaaaaaaaaaaaaaaaaaaaaaaaaaaaaaaaaaaaaaaaaaaaaaaaaaaaaaaaaaaaaaaaaaaaaaaaaaaaaaaaaaaaaaaaaa

SEQ ID NO: 21032 - RNA, 2012 nt, Artificial Sequence
  mRNA product Design a-1 (A100) comprising derived and/or modified sequence from LASV(GA391;Clade III)__CAA36646__SP-IgE_NP(2-570) (opt1)
aggagagucccgcagucggcguccagcggcucugcuuguucgugugugugucguugcaggccuuauucaagcuuaccauggacuggaccuggauccuguuccucguggccgccgcgacccgcguccacagcagcgccuccaaggaggugcgcagcuuccuguggacccagucccuccggcgcgagcugagcggcuacugcuccaacaucaagcugcaggucgugaaggacgcccaggcgcuccugcacgggcuggacuucagcgagguguccaacguccagcggcucaugcgcaagcagaagcgggacgacggcgaccugaagcgccugcgggaccucaaccaggccgugaacaaccugguggagcucaagagcacccagcagaaguccguccugcgcguggggacccugagcuccgacgaccugcucauccuggccgccgaccuggagaagcucaagagcaaggugacccggaccgagcgcccccuguccagcggcgucuacauggggaaccuguccagccagcagcucgaccagcggcgcgcccugcugaacaugaucggcaugaccggcguguccgggggcgggaagggcgcgagcgacgggaucgugcgggucugggacgugaagaacgccgagcuccugaacaaccaguucggcacgaugccgucccugacccucgccugccugaccaagcagggccagguggaccugaacgacgccguccaggcgcucaccgaccuggggcugaucuacacggccaaguaccccaacagcagcgaccucgaccgccugucccagagccaccccauccugaacaugaucgacaccaagaaguccagccucaacaucuccggcuacaacuucagccugggggccgccgugaaggccggcgcgugcaugcuggacggcgggaacaugcucgagaccaucaaggugagcccccagaccauggacggcauccucaaguccauccugaaggucaagaagucccuggggauguucgugagcgacacgccgggcgagcggaaccccuacgagaacauccuguacaagaucugccuguccggggacggcuggcccuacaucgccagccgcaccuccaucgugggccgggccugggagaacaccgucguggaccucgagcaggacaacaagccccagaagaucgggaacggcgggagcaacaagucccugcagagcgccggcuucgccgcggggcugaccuacucccagcucaugacgcugaaggacuucaagugcuucaaccugaucccgaacgccaagaccuggauggacaucgagggccgccccgaggaccccguggagaucgcccuguaccagcccagcuccggcugcuacguccacuucuuccgggagccgaccgaccucaagcaguucaagcaggacgccaaguacagccacgggaucgacgugaccgaccuguucgccgcgcagcccggccugacgagcgccgucaucgaggcccucccccgcaacauggugaucacgugccagggguccgaggacauccggaagcugcuggagagccagggccgccgcgacaucaagcucaucgacaucacccuguccaaggccgacagccggaaguucgagaacgccgugugggaccaguucaaggaccugugccacaugcacaccggggucgugguggagaagaagaagcgcggcggcaaggaggagaucacgccccacugcgcgcucauggacugcaucauguucgacgccgccgucuccgggggccuggacgccaaggugcugcgggugguccucccgcgcgacaugguguuccggaccagcacccccaaggugguccugugaggacuagucccuguucccagagcccacuuuuuuuucuuuuuuugaaauaaaauagccugucuuucagaucuaaaaaaaaaaaaaaaaaaaaaaaaaaaaaaaaaaaaaaaaaaaaaaaaaaaaaaaaaaaaaaaaaaaaaaaaaaaaaaaaaaaaaaaaaaaaaaaaaaaa

SEQ ID NO: 21033 - RNA, 2009 nt, Artificial Sequence
  mRNA product Design a-1 (A100) comprising derived and/or modified sequence from LASV(AV;Clade V)__CCA30315__SP-IgE_NP(2-569) (opt1)
aggagagucccgcagucggcguccagcggcucugcuuguucgugugugugucguugcaggccuuauucaagcuuaccauggacuggaccuggauccuguuccucguggccgccgcgacccgcguccacagcagcgccuccaaggaggugaaguccuuccuguggacccagagccuccgccgggagcugagcggcuacugcuccaacaucaagcugcaggucgugaaggacgcccaggcgcuccugcacgggcuggacuucagcgagguguccaacguccagcgccucaugcggaagcagcgccgggacgacagcgaccugaagcgccugcgggaccucaaccaggccgugaacaaccugguggagcugaaguccacccagcagaaguccguccuccgcgugggcacgcugagcagcgacgaccugcucacccuggccgccgaccuggagaagcucaaguccaaggugacccggaccgagcgcccccugagcuccggggucuacaugggcaaccugagcucccagcagcucgaccagcggcgcgcccugcugaaccucaucgggaugacgaacggcagccagggcucccaggcggggcgggacggcguggugcgcgucugggacgugaagaacgccgagcugcugaacaaccaguucgggaccaugccgagccucacccuggccugccugaccaagcagggccagguggaccucaacgacgucgugcaggcccugacggaccuggggcucaucuacaccgcgaaguaccccaacaccagcgaccuggaccggcugacccagucccaccccauccucaacaugaucgacacgaagaaguccagccugaacaucagcggcuacaacuucucccugggcgccgccgugaaggccggggccugcaugcucgacggcgggaacaugcuggagaccaucaaggucagcccccaguccauggacggcauccucaagagcauccugaaggugaagcgcgcgcugggcauguucguguccgacaccccgggggagcggaaccccuacgagaacauccuguacaagaucugccucagcggcgacggguggcccuacaucgccucccgcaccagcaucgucggccgggccugggagaacacggugguggaccuggagaccgacgggaagccccagaagaucggcuccggcaacagcaacaagucccugcagagcgccggguucuccgccggccucaccuacagccagcugaugacccugaaggacgcgaugcugcagcucgacccgaacgccaagacguggauggacaucgaggggcgccccgaggaccccgucgagguggcccuguaccagcccaucuccggcugcuacauccacuucuuccgggagccgaccgaccugaagcaguucaagcaggacgccaaguacagccacgggaucgacaucgccgaccucuucgcggcccagcccggccugaccagcgccgucaucgaggcccugccccgcaacauggugaucacgugccagggcuccgaggacaucaagaagcuccuggagagccaggggcgcaaggacaucaagcugaucgacaucgcccucuccaagaucgacagccggaaguucgagaacgcggugugggaccaguacaaggaccugugccacaugcacaccggcgucgugguggagaagaagaagcgcgggggcaaggaggagaucaccccgcacugcgcccugauggacugcaucauguucgacgccgccgucuccgggggccucaacacccuggugcugcgggcggugcucccccgcgacauggucuuccggaccagcacgccccgcguggugcugugaggacuagucccuguucccagagcccacuuuuuuuucuuuuuuugaaauaaaauagccugucuuucagaucuaaaaaaaaaaaaaaaaaaaaaaaaaaaaaaaaaaaaaaaaaaaaaaaaaaaaaaaaaaaaaaaaaaaaaaaaaaaaaaaaaaaaaaaaaaaaaaaaaaaa

SEQ ID NO: 21034 - RNA, 2009 nt, Artificial Sequence
  mRNA product Design a-1 (A100) comprising derived and/or modified sequence from LASV(Togo/2016/7082;Clade VI)__AMR44578__SP-IgE_NP(2-569) (opt1)
aggagagucccgcagucggcguccagcggcucugcuuguucgugugugugucguugcaggccuuauucaagcuuaccauggacuggaccuggauccuguuccucguggccgccgcgacccgcguccacagcagcaacuccaaggaggugaaguccuuccuguggacccagagccuccgccgggagcugagcggcuacugcuccaacaucaagcugcaggucgugaaggacgcccaggcccuccugcacgggcuggacuucagcgagguguccaacguccagcgccucaugcggaagcagaagcgcgacgacggcgaccugaagcggcugcgcgaccucaaccaggcggugaacaaccugguggagcucaagagcguccagcagaaguccauccugcggguggggacccugaccagcgacgaccugcucacccuggccgccgaccuggagaagcucaaguccaaggugacccgcaccgagcggccccugagcuccggcgucuacauggggaaccugagcucccagcagcucgaccagcgccgggcccugcugagcaugaucggcauguccggcgggaaccagaacagccagccgaagggcgacgggguggugcgcgucugggacgugaagaacgccgaccuccugaacaaccaguucggcacgaugcccucccugacccucgcgugccugaccaagcagggccagguggaccugaacgacgccguccaggcccucaccgaccuggggcugaucuacacggccaaguaccccaacagcagcgaccucgaccggcugucccagagccaccccauccugaacaugaucgacaccaagaaguccagccucaacaucuccggcuacaacuucagccugggggcggccaucaagaccggcgccugcaugcuggacgggggcaacaugcucgagaccaucaaggugacgccgcagaccauggacggcauccugaaguccauccugaaggugaagcgcagccucgggauguucaucuccgacacccccggcgagcggaaccccuacgagaacauccuguacaagaucugccugagcggggacggcuggcccuacaucgccucccgcaccgccaucaucgggcgggcgugggagaacacggucguggaccucgagagcgacuccaagccgcagaagaucggcagcaacggcuccaacaagagccugcaguccgccggguucgcccccggccugaccuacagccagcucaugacccugaaggacuccaugcugcagcuggaccccaacgccaagaccuggaucgacaucgaggggcgccccgaggacccgguggaggucgcccucuuccagcccaucagcggcugcuacauccacuucuuccgggagcccacggaccugaagcaguucaagcaggacgcgaaguacagccacgggaucgacgugaccgaccuguucgccgcccagcccggccucaccuccgccgugaucgaggcccugccgcgcaacaugguccugaccugccagggcagcgacgacaucaagaagcuccuggacucccaggggcggcgcgacaucaagcugaucgacgugagccucaacaagaucgacucccgcaaguucgagaacgcggucugggaccaguacaaggaccugugccacaugcacacgggcgugguggucgagaagaagaagaagggcgggaaggaggagaucacgccccacugcgcccugcucgacugcaucauguucgacgccgccgugagcgggggccugaacgccaccgugcugcgggcgguccucccccgcgacaugguguuccggaccuccagccccaaggugguccugugaggacuagucccuguucccagagcccacuuuuuuuucuuuuuuugaaauaaaauagccugucuuucagaucuaaaaaaaaaaaaaaaaaaaaaaaaaaaaaaaaaaaaaaaaaaaaaaaaaaaaaaaaaaaaaaaaaaaaaaaaaaaaaaaaaaaaaaaaaaaaaaaaaaaa

SEQ ID NO: 21035 - RNA, 2009 nt, Artificial Sequence
  mRNA product Design a-1 (A100) comprising derived and/or modified sequence from LASV(KAK-428;Clade n.d. (VII))__ANH09741__SP-IgE_NP(2-569) (opt1)
aggagagucccgcagucggcguccagcggcucugcuuguucgugugugugucguugcaggccuuauucaagcuuaccauggacuggaccuggauccuguuccucguggccgccgcgacccgcguccacagcagcaacuccaaggaggugaaguccuuccuguggacccagagccuccgccgggagcugagcggcuacugcaccaacaucaagcugcaggucgugaaggacgcccaggcccuccugcacgggcuggacuucuccgaggugagcaacguccagcgccucaugcggaagcagaagcgcgacgacaacgaccugaagcggcugcgcgaccucaaccaggcggugaacaaccugguggagcugaaguccguccagcagaaguccgugcucaaggugggcacgcugaacagcgacgaccugcucacccuggccgccgaccuggagaagcucaagagcaaggucgugcggaccgagcgcccccuguccagcgggguguacaugggcaaccuguccagccagcagcucgaccagcggcgcgcccugcugaacaugaucgggauggccggcggcucccaggggaaccagccgagccgggacggcgucgugcgcgugugggacgucaagaacgcggaccuccugaacaaccaguucgggaccaugcccucccugacgcucgccugccugaccaagcagggccagguggaccugaacgacgugguccucgcccugaccgaccuggggcucaucuacaccgccaaguaccccaacagcuccgaccuggaccggcugagccagaaccaccccgugcucaacaugaucgacgugaacaagagcucccugaacaucagcggcuacaacuucucccugggcgcggccgucaaggccggggccugcaugcucgacggcgggaacaugcuggagacgaucaagaucagcccgcagaccguggacggcauccugaaguccauccucaaggugaagcgcgcccugggcauguucgucagcgacacccccggggagcggaaccccuacgagaacauccuguacaaggugugccucuccggcaacggguggcccuacaucgcgagccgcaccuccaucgucggccgggccugggagaacacggugguggaccuggagagcaacaagaaccagccgaaggucgggaacaacggcuccaacaagaugcugcagagcuccggcuucgccaccgggcucaccuacagccagcugaugacccugcgcgacuccaugcugcagcucgaccccacggccaagaccuggaucgacaucgagggccggcccgaggaccccguggagcuggcccuguuccagccgagcuccgggugcuacauccacuucuuccgcgagcccaccgaccucaagcaguucaagcaggacgcgaaguacagccacggcaucgacgugaacgaccuguucuccgcccagcccgggcugaccagcgccguccucgaggcccugccccggaacauggugcugacgugccagggcagcgacgacauccgcaagcuccuggacucccaggaccgcaaggacaucaagcugaucgacaucagccucuccaaggccgacgcgcggaaguucgagaacgacgugugggaccaguucaaggaccugugccacaugcacaccggcaucgucguggagaagaagaagaagggcgggaagcaggagaugaccccgcacugcgcccugcucgacugcaucauguucgacgccgccgugagcgggggccugaacguccccacccugcgcgccgugcuccccacggacaugguguuccggaccaucaccaccaaggucgugcugugaggacuagucccuguucccagagcccacuuuuuuuucuuuuuuugaaauaaaauagccugucuuucagaucuaaaaaaaaaaaaaaaaaaaaaaaaaaaaaaaaaaaaaaaaaaaaaaaaaaaaaaaaaaaaaaaaaaaaaaaaaaaaaaaaaaaaaaaaaaaaaaaaaaaa

SEQ ID NO: 21036 - RNA, 2009 nt, Artificial Sequence; identical to SEQ ID NO: 21030
  mRNA product Design a-1 (A100) comprising derived and/or modified sequence from LASV(Pinneo-NIG-1969;Clade I)__AIT17837__SP-IgE_NP(2-569) (opt1)

SEQ ID NO: 21037 - RNA, 2009 nt, Artificial Sequence
  mRNA product Design a-1 (A100) comprising derived and/or modified sequence from LASV(ISTH0009-NIG-2011;Clade II)__AIT17405__SP-IgE_NP(2-569) (opt1)
aggagagucccgcagucggcguccagcggcucugcuuguucgugugugugucguugcaggccuuauucaagcuuaccauggacuggaccuggauccuguuccucguggccgccgcgacccgcguccacagcagcguguccaaggaggucaagagcuuccuguggacccagucccuccgccgggagcugagcggcuacugcuccaacaucaagcuccagguggugaaggacgcccaggcccugcugcacgggcuggacuucagcgaggucuccaacgugcagcgccucaugcggaagcagaagcgcgacgacagcgaccugaagcggcugcgcgaccucaaccaggcggugaacaaccuggucgagcugaaguccacccagcagaaguccauccuccgggugggcacccugaccagcgacgaccugcucacccuggccgccgaccuggagaagcucaagagcaaggugauccgcaccgagcggccccuguccagcggggucuacaugggcaaccuguccacgcagcagcucgagcagcgccgggcccugcugaacaugaucgggauggugggcggcgcccaggggacccagccgggccgcgacggggugguccgggugugggacgugaagaaccccgaccuccugaacaaccaguucggcaccaugcccagccugacccucgcgugccugacgaagcaggggcaggucgaccugaacgacgccgugcucgcccugaccgaccugggccucaucuacaccgccaaguaccccaacuccagcgaccuggaccgccugucccagagccacccgauccucaacaugguggacaucaagaaguccagccugaacaucagcggcuacaacuucucccugggggcggccgucaaggccggcgccugcaugcucgacgggggcaacaugcuggagaccaucaaggugacgccccagaccauggacggcauccucaagagcauccugaaggugaagcggucccuggggauguucgucagcgacacccccggcgagcgcaaccccuacgagaacauccuguacaagaucugccucuccggggacggcuggccguacaucgccagccggaccuccaucguggggcgcgcgugggagaacacgaccguggaccuggagagcgacggcaagccccagaaggucggcuccgccgggagcaacaagucccugcagagcgccggcuuccccaccgggcucaccuacucccagcugaugacgcugaaggacagcaugaugcagcuggaccccuccgccaagaccuggaucgacaucgagggccggccggaggaccccguggagaucgcccucuaccagcccaugagcgggugcuacauccacuucuuccgcgagcccaccgaccugaagcaguucaagcaggacgcgaaguacucccacggcaucgacgucgccgaccuguucccggcccagcccggccucaccagcgccgugaucgaggcccugccccggaacauggugcugacgugccaggggagcgacgacaucaagcgccuccuggacucccagggccgccgggacaucaagcugaucgacaucgcgcucagcaaggccgacucccgccgguucgagaacgccgucugggaccagugcaaggaccugugccacaugcacaccggggugguggucgagaagaagaagcgcggcgggaaggaggagaucacgccccacugcgcccugauggacugcaucauguacgacgccgcggugagcggcggccucaacaucccggugcugcgggccguccugccccgcgacaugguguuccggaccuccagccccaaggugguccucugaggacuagucccuguucccagagcccacuuuuuuuucuuuuuuugaaauaaaauagccugucuuucagaucuaaaaaaaaaaaaaaaaaaaaaaaaaaaaaaaaaaaaaaaaaaaaaaaaaaaaaaaaaaaaaaaaaaaaaaaaaaaaaaaaaaaaaaaaaaaaaaaaaaaa

SEQ ID NO: 21038 - RNA, 2009 nt, Artificial Sequence
  mRNA product Design a-1 (A100) comprising derived and/or modified sequence from LASV(ISTH2010-NIG-2012;Clade II)__AIT17483__SP-IgE_NP(2-569) (opt1)
aggagagucccgcagucggcguccagcggcucugcuuguucgugugugugucguugcaggccuuauucaagcuuaccauggacuggaccuggauccuguuccucguggccgccgcgacccgcguccacagcagcgccuccaaggaggugaaguccuuccuguggacccagagccuccgccgggagcugagcggcuacugcuccaacaucaagcugcaggucgugaaggacgcccaggcgcuccugcacgggcuggacuucagcgagguguccaacguccagcgccucaugcggaagcagaagcgcgacgacagcgaccugaagcggcugcgcgaccucaaccaggccgugaacaaccugguggagcugaaguccacccagcagaaguccauccuccgggucggcacgcugaccagcgacgaccugcucacccuggccgccgaccuggagaagcucaagagcaaggugauccgcaccgagcggccccuguccagcgggguguacaugggcaaccuguccacgcagcagcucgagcagcgccgggcccugcugaaccucaucgggauggucggcggcgcgcaggggacccagccgggccgcgacgggguggugcgggucugggacgugaagaaccccgaccugcugaacaaccaguucggcaccaugcccagccucacccuggccugccugacgaagcagggccagguggaccucaacgacgccguccuggcccugaccgaccucgggcugaucuacaccgcgaaguaccccaacuccagcgaccuggaccgccucucccagagccacccgauccugaacaugguggacaccaagaaguccagccugaacaucagcggcuucaacuucucccucggggccgccgugaaggccggcgccugcaugcuggacgggggcaacaugcuggagacgaucaaggucacgccccagaccauggacggcauccucaagagcauccugaaggugaagaagucccuggggauguucgugagcgacacccccggcgagcggaaccccuacgagaacauccucuacaagaucugccuguccggggacggcuggccguacaucgcgagccgcaccuccaucgucgggcgggccugggagaacaccaccguggaccuggagagcgacggcaagccccacaaggugggcaccgccggguccaacaagagccuccaguccgccggcuuccccacggggcugaccuacagccagcugaugacccugaaggacuccaugaugcagcucgaccccagcgccaagaccuggaucgacaucgagggccgcccggaggaccccgucgagaucgcgcuguaccagcccauguccgggugcuacauccacuucuuccgggagcccacggaccugaagcaguucaagcaggacgccaaguacagccacggcaucgacguggccgaccucuucccggcccagcccggccugaccuccgccgucaucgaggcgcugccccgcaacauggugcugaccugccaggggagcgacgacaucaagcggcuccuggacagccagggccgccgcgacaucaagcucaucgacaucgcccuguccaaggccgacagccggcgcuucgagaacgccgugugggaccagugcaaggaccugugccacaugcacaccggggucgugguggagaagaagaagcggggcgggaaggaggagaucacgccccacugcgcccucauggacugcaucauguacgacgcggccgucuccggcggccugaacaucccggugcugcgcgccgugcucccccgggacauggucuuccgcaccagcucccccaagguggugcugugaggacuagucccuguucccagagcccacuuuuuuuucuuuuuuugaaauaaaauagccugucuuucagaucuaaaaaaaaaaaaaaaaaaaaaaaaaaaaaaaaaaaaaaaaaaaaaaaaaaaaaaaaaaaaaaaaaaaaaaaaaaaaaaaaaaaaaaaaaaaaaaaaaaaa

SEQ ID NO: 21039 - RNA, 2009 nt, Artificial Sequence
  mRNA product Design a-1 (A100) comprising derived and/or modified sequence from LASV(Lassa virus/H.sapiens-wt/NGA/2015/ISTH_0543;Clade II)__AVO03640__SP-IgE_NP(2-569) (opt1)
aggagagucccgcagucggcguccagcggcucugcuuguucgugugugugucguugcaggccuuauucaagcuuaccauggacuggaccuggauccuguuccucguggccgccgcgacccgcguccacagcagcgccuccaaggaggugaaguccuuccuguggacccagagccuccgccgggagcugagcggcuacugcuccaacaucaagcugcaggucgugaaggacgcccaggcgcuccugcacgggcuggacuucagcgagguguccaacguccagcgccucaugcggaagcagaagcgcgacgacagcgaccugaagcggcugcgcgaccucaaccaggccgugaacaaccugguggagcugaaguccacccagcagaaguccauccuccgggucggcacgcugaccagcgacgaccugcucacccuggccgccgaccuggagaagcucaagagcaaggugauccgcaccgagcggccccuguccagcgggguguacaugggcaaccuguccacgcagcagcucgagcagcgccgggcccugcugaacaugaucgggauggucggcggcgcgcaggggacccagccgggccgcgacgggguggugcgggucugggacgugaagaaccccgaccuccugaacaaccaguucggcaccaugcccagccugacccucgccugccugacgaagcagggccagguggaccugaacgacgccguccucgcccugaccgaccuggggcucaucuacaccgcgaaguaccccaacuccagcgaccuggaccgccugucccagagccacccgauccucaacaugguggacaccaagaaguccagccugaacaucagcggcuacaacuucucccugggggccgccgugaaggccggcgccugcaugcucgacgggggcaacaugcuggagacgaucaaggucacgccccagaccauggacggcauccucaagagcauccugaaggugaagaagucccuggggauguucgugagcgacacccccggcgagcggaaccccuacgagaacauccuguacaagaucugccucuccggggacggcuggccguacaucgcgagccgcaccuccaucgucgggcgggccugggagaacaccaccguggaccuggagagcgacggcaagccccagaaggugggcuccgccgggagcaacaagucccugcagagcgccggcuuccccaccgggcucacguacucccagcugaugacccugaaggacagcaugaugcagcuggaccccuccgccaagaccuggaucgacaucgagggccgcccggaggaccccgucgagaucgcgcucuaccagcccaugagcgggugcuacauccacuucuuccgggagcccaccgaccugaagcaguucaagcaggacgccaaguacucccacggcaucgacguggccgaccuguucccggcccagcccggccucacgagcgccgucaucgaggcgcugccccgcaacauggugcugaccugccaggggagcgacgacaucaagcggcuccuggacucccagggccgcaaggacaucaagcugaucgacaucgcccucagcaaggccgacucccgccgguucgagaacgccgugugggaccagugcaaggaccugugccacaugcacaccggggucgugguggagaagaagaagcgcggcgggaaggaggagaucacgccccacugcgcccugauggacugcaucauguacgacgcggccgucagcggcggccucaacaucccggugcugcgggccgugcugccccgcgacauggucuuccggaccuccagccccaagguggugcucugaggacuagucccuguucccagagcccacuuuuuuuucuuuuuuugaaauaaaauagccugucuuucagaucuaaaaaaaaaaaaaaaaaaaaaaaaaaaaaaaaaaaaaaaaaaaaaaaaaaaaaaaaaaaaaaaaaaaaaaaaaaaaaaaaaaaaaaaaaaaaaaaaaaaa

SEQ ID NO: 21040 - RNA, 2009 nt, Artificial Sequence
  mRNA product Design a-1 (A100) comprising derived and/or modified sequence from LASV(Lassa virus/H.sapiens-wt/NGA/2016/ISTH_0009;Clade II)__AVO03572__SP-IgE_NP(2-569) (opt1)
aggagagucccgcagucggcguccagcggcucugcuuguucgugugugugucguugcaggccuuauucaagcuuaccauggacuggaccuggauccuguuccucguggccgccgcgacccgcguccacagcagcgccuccaaggaggugaaguccuuccuguggacccagagccuccgccgggagcugagcggcuacugcuccaacaucaagcugcaggucgugaaggacgcccaggcgcuccugcacgggcuggacuucagcgagguguccaacguccagcgccucaugcggaagcagaagcgcgacgacagcgaccugaagcggcugcgcgaccucaaccaggccgugaacaaccugguggagcugaaguccacccagcagaaguccauccuccgggucggcacgcugaccagcgacgaccugcucacccuggccgccgaccuggagaagcucaagagcaaggugauccgcaccgagcggccccuguccagcgggguguacaugggcaaccuguccacgcagcagcucgagcagcgccgggcccugcugaacaugaucgggauggucggcggcgcgcaggggacccagccgggccgcgacgggguggugcgggucugggacgugaagaaccccgaccuccugaacaaccaguucggcaccaugcccagccugacccucgccugccugacgaagcagggccagguggaccugaacgacgccguccucgcccugaccgaccuggggcucaucuacaccgcgaaguaccccaacuccagcgaccuggaccgccugucccagagccacccgauccucaacaugguggacaccaagaaguccagccugaacaucagcggcuacaacuucucccugggggccgccgugaaggccggcgccugcaugcucgacgggggcaacaugcuggagacgaucaaggucacgccccagaccauggacggcauccucaagagcauccugaaggugaagaagucccuggggauguucgugagcgacacccccggcgagcggaaccccuacgagaacauccuguacaagaucugccucuccggggacggcuggccguacaucgcgagccgcaccuccaucgucgggcgggccugggagaacaccaccguggaccuggagagcgacggcaagccccagaaggugggcuccgccgggagcaacaagucccugcagagcgccggcuuccccaccgggcucacguacucccagcugaugacccugaaggacagcaugaugcagcuggaccccuccgccaagaccuggaucgacaucgagggccgcccggaggaccccgucgagaucgcgcucuaccagcccaugagcgggugcuacauccacuucuuccgggagcccaccgaccugaagcaguucaagcaggacgccaaguacucccacggcaucgacguggccgaccuguucccggcccagcccggccucacgagcgccgucaucgaggcgcugccccgcaacauggugcugaccugccaggggagcgacgacaucaagcggcuccuggacucccagggccgccgcgacaucaagcugaucgacaucgcccucagcaaggccgacucccggcgcuucgagaacgccgugugggaccagugcaaggaccugugccacaugcacaccggggucgugguggagaagaagaagcggggcgggaaggaggagaucacgccccacugcgcccugauggacugcaucauguacgacgcggccgucagcggcggccucaacaucccggugcugcgcgccgugcugccccgggacauggucuuccgcaccuccagccccaagguggugcucugaggacuagucccuguucccagagcccacuuuuuuuucuuuuuuugaaauaaaauagccugucuuucagaucuaaaaaaaaaaaaaaaaaaaaaaaaaaaaaaaaaaaaaaaaaaaaaaaaaaaaaaaaaaaaaaaaaaaaaaaaaaaaaaaaaaaaaaaaaaaaaaaaaaaa

SEQ ID NO: 21041 - RNA, 2009 nt, Artificial Sequence
  mRNA product Design a-1 (A100) comprising derived and/or modified sequence from LASV(Lassa virus/H.sapiens-wt/NGA/2016/ISTH_0017;Clade II)__AVO03568__SP-IgE_NP(2-569) (opt1)
aggagagucccgcagucggcguccagcggcucugcuuguucgugugugugucguugcaggccuuauucaagcuuaccauggacuggaccuggauccuguuccucguggccgccgcgacccgcguccacagcagcgccuccaaggaggugaaguccuuccuguggacccagagccuccgccgggagcugagcggcuacugcuccagcaucaagcugcaggucgugaaggacgcccaggcgcuccugcacgggcuggacuucuccgaggugagcaacguccagcgccucaugcggaagcagaagcgcgacgacuccgaccugaagcggcugcgcgaccucaaccaggccgugaacaaccugguggagcucaagagcacccagcagaaguccauccugcgggucggcacgcugaccagcgacgaccugcucacccuggccgccgaccuggagaagcucaaguccaaggugauccgcaccgagcggccccugagcuccgggguguacaugggcaaccugagcacgcagcagcucgagcagcgccgggcccugcugaacaugaucgggauggcgggcggcgcccaggggacccagccgggccgcgacggggucgugcgggugugggacgucaagaaccccgaccuccugaacaaccaguucggcaccaugcccucccugacccucgccugccugacgaagcagggccagguggaccugaacgacgccgugcucgcgcugaccgaccuggggcucaucuacaccgccaaguaccccaacagcuccgaccuggaccgccugagccagagccacccgauccucaacauggucgacaccaagaaguccagccugaacaucuccggcuacaacuucagccugggggccgccgugaaggccggcgcgugcaugcucgacgggggcaacaugcuggagacgaucaaggugacgccccagaccauggacggcauccugaaguccauccucaaggucaagcggagccuggggauguucguguccgacgcccccggcgagcgcaaccccuacgagaacauccuguacaagaucugccucagcggggacggcuggccguacaucgccucccggaccagcaucguggggcgcgccugggagaacaccaccgucgaccuggaguccgacggcaagccccagaaggugggcgccaccgggagcaacaagucccugcagagcgcgggcuuccccaccgggcucacguacucccagcugaugacccugaaggacagcaugaugcagcuggaccccuccgccaagaccuggaucgacaucgagggccggccggaggaccccguggaggucgcccucuaccagcccgugagcgggugcuacauccacuucuuccgcgagcccaccgaccugaagcaguucaagcaggacgccaaguacucccacggcaucgacgucgccgaccuguucccggcgcagcccggccucacgagcgccgugaucgaggcccugccccggaacauggugcugaccugccaggggagcgacgacaucaagaagcuccuggacucccagggccgcaaggacaucaagcugaucgacaucgcccucagcaaggccgacucccgccgguucgagaacgcggucugggaccagugcaaggaccugugccacaugcacaccggggugguggucgagaagaagaagcgcggcgggaaggaggagaucacgccccacugcgcccugauggacugcaucauguacgacgccgccgugagcggcggccucaacaucccggugcugcgggcgguccugccccgcgacaugguguuccggaccuccagccccaaggugguccucugaggacuagucccuguucccagagcccacuuuuuuuucuuuuuuugaaauaaaauagccugucuuucagaucuaaaaaaaaaaaaaaaaaaaaaaaaaaaaaaaaaaaaaaaaaaaaaaaaaaaaaaaaaaaaaaaaaaaaaaaaaaaaaaaaaaaaaaaaaaaaaaaaaaaa

SEQ ID NO: 21042 - RNA, 2009 nt, Artificial Sequence
  mRNA product Design a-1 (A100) comprising derived and/or modified sequence from LASV(Lassa virus/H.sapiens-wt/NGA/2018/ISTH_0959;Clade II)__AVV65100__SP-IgE_NP(2-569) (opt1)
aggagagucccgcagucggcguccagcggcucugcuuguucgugugugugucguugcaggccuuauucaagcuuaccauggacuggaccuggauccuguuccucguggccgccgcgacccgcguccacagcagcgccuccaaggaggugaaguccuuccuguggacccagagccuccgccgggagcugagcggcuacugcuccaacaucaagcugcaggucgugaaggacgcccaggcgcuccugcacgggcuggacuucagcgagguguccaacguccagcgccucaugcggaagcagaagcgcgacgacagcgaccugaagcggcugcgcgaccucaaccaggccgugaacaaccugguggagcugaaguccacccagcagaaguccauccuccgggucggcacccugaccagcgacgaccugcucacccuggccgccgaccuggagaagcucaagagcaaggugauccgcaccgagcggccccuguccagcgggguguacaugggcaaccuguccacgcagcagcucgagcagcgccgggcccugcugaaccucaucgggauggucggcggcgcgcaggggacccagccgggccgcgacgggguggugcgggucugggacgugaagaaccccgaccugcugaacaaccaguucggcaccaugcccagccucacccuggccugccugacgaagcagggccagguggaccucaacgacgucgugcuggcccugaccgaccucgggcugaucuacaccgccaaguaccccaacuccagcgaccuggaccgccucucccagagccacccgauccugaacaugguggacaccaagaaguccagccugaacaucagcggcuucaacuucucccucggggcggccgucaaggccggcgccugcaugcuggacgggggcaacaugcuggagacgaucaaggugacgccccagaccauggacggcauccucaagagcauccugaaggugaagaagucccuggggauguucgucagcgacacccccggcgagcggaaccccuacgagaacauccucuacaagaucugccuguccggggacggcuggccguacaucgccagccgcaccuccaucguggggcgggcgugggagaacaccaccguggaccuggagagcgacggcaagccccacaaggucggcaccgccggguccaacaagagccuccaguccgccggcuuccccacggggcugaccuacagccagcugaugacccugaaggacuccaugaugcagcucgaccccagcgccaagaccuggaucgacaucgagggccgcccggaggaccccguggagaucgcccuguaccagcccauguccgggugcuacauccacuucuuccgggagcccacggaccugaagcaguucaagcaggacgcgaaguacagccacggcaucgacgucgccgaccucuucccggcccagcccggccugaccuccgccgugaucgaggcccugccccgcaacauggugcugaccugccaggggagcgacgacaucaagcggcuccuggacagccagggccgcaaggacaucaagcucaucgacaucgcgcuguccaagaccgacagccgccgguucgagaacgccgucugggaccagugcaaggaccugugccacaugcacacgggggugguggucgagaagaagaagcgcggcgggaaggaggagaucacgccccacugcgcccucauggacugcaucauguacgacgccgccguguccggcggccugaacaucccggugcugcgggcgguccucccccgcgacaugguguuccggaccagcucccccaaggugguccugugaggacuagucccuguucccagagcccacuuuuuuuucuuuuuuugaaauaaaauagccugucuuucagaucuaaaaaaaaaaaaaaaaaaaaaaaaaaaaaaaaaaaaaaaaaaaaaaaaaaaaaaaaaaaaaaaaaaaaaaaaaaaaaaaaaaaaaaaaaaaaaaaaaaaa

SEQ ID NO: 21043 - RNA, 2009 nt, Artificial Sequence
  mRNA product Design a-1 (A100) comprising derived and/or modified sequence from LASV(LASV003-NIG-2008;Clade II)__AIT17581__SP-IgE_NP(2-569) (opt1)
aggagagucccgcagucggcguccagcggcucugcuuguucgugugugugucguugcaggccuuauucaagcuuaccauggacuggaccuggauccuguuccucguggccgccgcgacccgcguccacagcagcgccuccaaggaggugaaguccuuccuguggacccagagccuccgccgggagcugagcggcuacugcuccagcaucaagcugcaggucgugaaggacgcccaggcgcuccugcacgggcuggacuucuccgaggugagcaacguccagcgccucaugcggaagcagaagcgcgacgacuccgaccugaagcggcugcgcgaccucaaccaggccgugaacaaccugguggagcucaagagcacccagcagaaguccguccugcgggugggcacccugaccagcgacgaccugcucacccuggccgccgaccuggagaagcucaaguccaaggugauccgcaccgagcggccccugagcuccggggucuacaugggcaaccugagcgcccagcagcucgagcagcgccggacgcugcugaacaugaucgggauggugggcggcgcgcaggggacccagccgggccgcgacggggugguccgggugugggacgugaagaaccccgaccuccugaacaaccaguucggcaccaugcccucccugacccucgccugccugacgaagcaggggcaggucgaccugaacgacguggugcucgcccugaccgaccugggccucaucuacaccgccaaguaccccaacagcuccgaccuggaccgccugagccagagccacccgauccucuccauggucgacaccaagaaguccagccugaacaucagcggcuacaacuucucccugggggcggccgugaaggccggcgccugcaugcucgacgggggcaacaugcuggagacgaucaaggugacgccccagaccauggacggcauccucaagagcauccugaaggucaagaagucccuggggauguucgugagcgacacccccggcgagcggaaccccuacgagaacauccuguacaagaucugccucuccggggacggcuggccguacaucgccagccgcaccuccaucguggggcgggcgugggagaacaccaccgucgaccuggagagcgacggcaagccccagaaggugggcaccgccggguccaacaagagccugcaguccgccggcuuccccacggggcucaccuacagccagcugaugacccugaaggacuccaugaugcagcuggaccccagcgccaagaccuggaucgacaucgagggccgcccggaggaccccgucgagaucgcccucuaccagcccauguccgggugcuacauccacuucuuccgggagcccacggaccugaagcaguucaagcaggacgcgaaguacagccacggcaucgacgugaccgaccuguucccggcccagcccggccucaccagcgccgugaucgaggcccugccccgcaacaugguccugaccugccagggguccgacgacaucaagcggcuccuggacagccagggccgccgcgacaucaagcugaucgacaucgcccucuccaaggcggacagccggcgcuucgagaacgccgugugggaccagugcaaggaccugugccacaugcacacggggguggucguggagaagaagaagcggggcgggaaggaggagaucacgccccacugcgcccugauggacugcaucauguacgacgccgccguguccggcggccucaacaucccgguccugcgcgcggugcugccccgggacaugguguuccgcaccagcucccccaaggucgugcucugaggacuagucccuguucccagagcccacuuuuuuuucuuuuuuugaaauaaaauagccugucuuucagaucuaaaaaaaaaaaaaaaaaaaaaaaaaaaaaaaaaaaaaaaaaaaaaaaaaaaaaaaaaaaaaaaaaaaaaaaaaaaaaaaaaaaaaaaaaaaaaaaaaaaa

SEQ ID NO: 21044 - RNA, 2009 nt, Artificial Sequence
  mRNA product Design a-1 (A100) comprising derived and/or modified sequence from LASV(LASV035-NIG-2009;Clade II)__AIT17589__SP-IgE_NP(2-569) (opt1)
aggagagucccgcagucggcguccagcggcucugcuuguucgugugugugucguugcaggccuuauucaagcuuaccauggacuggaccuggauccuguuccucguggccgccgcgacccgcguccacagcagcgccuccaaggaggugaaguccuuccuguggacccagagccuccgccgggagcugagcggcuacugcuccagcaucaagcugcaggucgugaaggacgcccaggcgcuccugcacgggcuggacuucuccgaggugagcaacguccagcgccucaugcggaagcagaagcgcgacgacuccgaccugaagcggcugcgcgaccucaaccaggccgugaacaaccugguggagcucaagagcacccagcagaaguccauccugcgggucggcacgcugaccagcgacgaccugcucacccuggccgccgaccuggagaagcucaaguccaaggugauccgcaccgagcggccccugagcuccgggguguacaugggcaaccugagcgcccagcagcucgagcagcgccgggcgcugcugaacaugaucgggauggucggcggcgcccaggggacgcagccgggccgcgacgggguggugcgggucugggacgugaagaaccccgaccuccugaacaaccaguucggcaccaugcccucccugacccucgccugccugaccaagcagggccagguggaccugaacgacgccguccucgcgcugacggaccuggggcucaucuacaccgccaaguaccccaacagcuccgaccuggaccgccugagccagagccacccgauccucaacaugguggacaccaagaaguccagccugaacaucuccggcuacaacuucagccugggggccgccgugaaggccggcgcgugcaugcucgacgggggcaacaugcuggagaccaucaaggucacgccccagaccauggacggcauccugaaguccauccucaaggugaagcggagccuggggauguucguguccgacacccccggcgagcgcaaccccuacgagaacauccuguacaagaucugccucagcggggacggcuggccguacaucgccucccggaccagcaucgucgggcgcgccugggagaacacgaccguggaccuggaguccgacggcaagccccagaaggugggcaccaccgggagcaacaagucccugcagagcgccggcuuccccacggggcucaccuacucccagcugaugacccugaaggacagcaugaugcagcuggaccccuccgccaagaccuggaucgacaucgagggccggccggaggaccccgucgagaucgcgcucuaccagcccaugagcgggugcuacauccacuucuuccgcgagcccacggaccugaagcaguucaagcaggacgccaaguacucccacggcaucgacguggccgaccuguucccggcccagcccggccucaccagcgccgucaucgaggcgcugccccggaacauggugcugaccugccaggggagcgacgacaucaagaagcuccuggacucccagggccgccgcgacaucaagcugaucgacaucgcccucagcaaggccgacucccggaaguucgagaacgccgugugggaccagugcaaggaccugugccacaugcacaccggggucgugguggagaagaagaagcgcggcgggaaggaggagaucacgccccacugcgcccugauggacugcaucauguacgacgcggccgucagcggcggccucaacaucccggugcugcgggccgugcugccccgcgacauggucuuccggaccuccagccccaagguggugcucugaggacuagucccuguucccagagcccacuuuuuuuucuuuuuuugaaauaaaauagccugucuuucagaucuaaaaaaaaaaaaaaaaaaaaaaaaaaaaaaaaaaaaaaaaaaaaaaaaaaaaaaaaaaaaaaaaaaaaaaaaaaaaaaaaaaaaaaaaaaaaaaaaaaaa

SEQ ID NO: 21045 - RNA, 2009 nt, Artificial Sequence
  mRNA product Design a-1 (A100) comprising derived and/or modified sequence from LASV(LASV1000-NIG-2009;Clade II)__AIT17783__SP-IgE_NP(2-569) (opt1)
aggagagucccgcagucggcguccagcggcucugcuuguucgugugugugucguugcaggccuuauucaagcuuaccauggacuggaccuggauccuguuccucguggccgccgcgacccgcguccacagcagcgccuccaaggaggugaaguccuuccuguggacccagagccuccgccgggagcugagcggcuacugcuccaacaucaagcugcaggucgugaaggacgcccaggcgcuccugcacgggcuggacuucagcgagguguccaacguccagcgccucaugcggaagcagaagcgcgacgacagcgaccugaagcggcugcgcgaccucaaccaggccgugaacaaccugguggagcugaaguccacccagcagaaguccauccuccgggucggcacgcugaccagcgacgaccugcucacccuggccgccgaccuggagaagcucaagagcaaggugauccgcaccgagcggccccuguccagcgggguguacaugggcaaccuguccacgcagcagcucgagcagcgccgggcccugcugaacaugaucgggauggucggcggcgcgcaggggacccagccgggccgcgacgggguggugcgggucugggacgugaagaaccccgaccuccugaacaaccaguucggcaccaugcccagccugacccucgccugccugacgaagcagggccagguggaccugaacgacgucgugcucgcccugaccgaccuggggcucaucuacaccgccaaguaccccaacuccagcgaccuggaccgccugucccagagccacccgauccucaacaugguggacaccaagaaguccagccugaacaucagcggcuacaacuucucccugggggcggccgucaaggccggcgccugcaugcucgacgggggcaacaugcuggagacgaucaaggugacgccccagaccauggacggcauccucaagagcauccugaaggugaagaagucccuggggauguucgucagcgacacccccggcgagcggaaccccuacgagaacauccuguacaagaucugccucuccggggacggcuggccguacaucgccagccgcaccuccaucguggggcgggcgugggagaacaccaccguggaccuggagagcgacggcaagccccagaaggucggcaccgccggguccaacaagagccugcaguccgccggcuuccccacggggcucaccuacagccagcugaugacccugaaggacuccaugaugcagcuggaccccagcgccaagaccuggaucgacaucgagggccgcccggaggaccccguggagaucgcccucuaccagcccgucuccgggugcuacauccacuucuuccgggagcccacggaccugaagcaguucaagcaggacgcgaaguacagccacggcaucgacguggccgaccuguucccggcccagcccggccucaccuccgccgugaucgaggcccugccccgcaacaugguccugaccugccaggggagcgacgacaucaagcggcuccuggacagccagggccgccgcgacaucaagcugaucgacaucgcgcucuccaaggccgacagccggcgcuucgagaacgccgugugggaccagugcaaggaccugugccacaugcacaccgggguggucguggagaagaagaagcggggcgggaaggaggagaucacgccccacugcgcccugauggacugcaucauguacgacgccgcgguguccggcggccucaacaucccgguccugcgcgccgugcugccccgggacaugguguuccgcaccagcucccccaaggucgugcucugaggacuagucccuguucccagagcccacuuuuuuuucuuuuuuugaaauaaaauagccugucuuucagaucuaaaaaaaaaaaaaaaaaaaaaaaaaaaaaaaaaaaaaaaaaaaaaaaaaaaaaaaaaaaaaaaaaaaaaaaaaaaaaaaaaaaaaaaaaaaaaaaaaaaa

SEQ ID NO: 21046 - RNA, 2009 nt, Artificial Sequence
  mRNA product Design a-1 (A100) comprising derived and/or modified sequence from LASV(LASV221-NIG-2010;Clade II)__AIT17625__SP-IgE_NP(2-569) (opt1)
aggagagucccgcagucggcguccagcggcucugcuuguucgugugugugucguugcaggccuuauucaagcuuaccauggacuggaccuggauccuguuccucguggccgccgcgacccgcguccacagcagcgccuccaaggaggugaaguccuuccuguggacccagagccuccgccgggagcugagcggcuacugcuccagcaucaagcugcaggucgugaaggacgcccaggcgcuccugcacgggcuggacuucuccgaggugagcaacguccagcgccucaugcggaagcagcgccgggacgacuccgaccugaagcgccugcgggaccucaaccaggccgugaacaaccugguggagcucaagagcacccagcagaaguccauccugcgcgucggcacgcugaccagcgacgaccugcucacccuggccgccgaccuggagaagcucaaguccaaggugauccggaccgagcgcccccugagcuccgggguguacaugggcaaccugagcacgcagcagcucgagcagcggcgcgcccugcugaacaugaucgggauggucggcggcgcgcaggggacccagccgggccgggacgggguggugcgcgucugggacgugaagaaccccgaccuccugaacaaccaguucggcaccaugcccucccugacccucgccugccugacgaagcagggccagguggaccugaacgacgccguccucgcccugaccgaccuggggcucaucuacaccgcgaaguaccccaacagcuccgaccuggaccggcugagccagagccacccgauccucaacaugguggacaccaagaaguccagccugaacaucuccggcuacaacuucagccugggggccgccgugaaggccggcgccugcaugcucgacgggggcaacaugcuggagacgaucaaggucacgccccagaccguggacggcauccugaaguccauccucaaggugaagcgcagccuggggauguucgucuccgacacccccggcgagcggaaccccuacgagaacauccuguacaagaucugccucagcggggacggcuggccguacaucgcgucccgcaccagcaucguggggcgggccugggagaacaccaccguggaccuggaguccgacggcaagccccagaaggucggcaccgccgggagcaacaagucccugcagagcgccggcuuccccacggggcucaccuacucccagcugaugacccugaaggacagcaugaugcagcuggaccccuccgccaagaccuggaucgacaucgagggccgcccggaggaccccguggagaucgcgcucuaccagcccaugagcgggugcuacauccacuucuuccgggagcccacggaccugaagcaguucaagcaggacgccaaguacucccacggcaucgacgucgccgaccuguucccggcccagcccggccucaccagcgccgugaucgaggcgcugccccgcaacauggugcugaccugccaggggagcgacgacaucaagcgccuccuggacucccagggccggcgcgacaucaagcugaucgacaucgcccucagcaaggccgacucccggaaguucgagaacgccgucugggaccagugcaaggaccugugccacaugcacaccggggugguggucgagaagaagaagcgcggcgggaaggaggagaucacgccccacugcgcccugauggacugcaucauguacgacgcggccgugagcggcggccucaacaucccggugcugcgggccguccugccccgcgacaugguguuccggaccuccagccccaaggugguccucugaggacuagucccuguucccagagcccacuuuuuuuucuuuuuuugaaauaaaauagccugucuuucagaucuaaaaaaaaaaaaaaaaaaaaaaaaaaaaaaaaaaaaaaaaaaaaaaaaaaaaaaaaaaaaaaaaaaaaaaaaaaaaaaaaaaaaaaaaaaaaaaaaaaaa

SEQ ID NO: 21047 - RNA, 2009 nt, Artificial Sequence
  mRNA product Design a-1 (A100) comprising derived and/or modified sequence from LASV(LASV237-NIG-2010;Clade II)__AIT17639__SP-IgE_NP(2-569) (opt1)
aggagagucccgcagucggcguccagcggcucugcuuguucgugugugugucguugcaggccuuauucaagcuuaccauggacuggaccuggauccuguuccucguggccgccgcgacccgcguccacagcagcgccuccaaggaggugaaguccuuccuguggacccagagccuccgccgggagcugagcggcuacugcuccaacaucaagcugcaggucgugaaggacgcccaggcgcuccugcacgggcuggacuucagcgagguguccaacguccagcgccucaugcggaagcagaagcgcgacgacagcgaccugaagcggcugcgcgaccucaaccaggccgugaacaaccugguggagcugaaguccacccagcagaaguccauccuccgggucggcacccugaccagcgacgaccugcucacccuggccgccgaccuggagaagcucaagagcaaggugauccgcaccgagcggccccuguccagcgggguguacaugggcaaccuguccacgcagcagcucgagcagcgccgggcccugcugaacaugaucgggauggucggcggcgcgcaggggacccagccgggccgcgacgggguggugcgggucugggacgugaagaaccccgaccuccugaacaaccaguucggcaccaugcccagccugacccucgccugccugacgaagcagggccagguggaccugaacgacgccguccucgcccugaccgaccuggggcucaucuacaccgcgaaguaccccaacuccagcgaccuggaccgccugucccagagccacccgauccucaacaugguggacaucaagaaguccagccugaacaucagcggcuacaacuucucccugggggccgccgugaaggccggcgccugcaugcucgacgggggcaacaugcuggagaccaucaaggucacgccccagaccauggacggcauccucaagagcauccugaaggugaagcggucccuggggauguucgugagcgacacccccggcgagcgcaaccccuacgagaacauccuguacaagaucugccucuccggggacggcuggccguacaucgcgagccggaccuccaucgucgggcgcgccugggagaacacgaccguggaccuggagagcgacggcaagccccagaaggugggcuccgccgggagcaacaagucccugcagagcgccggcuuccccaccgggcucaccuacucccagcugaugacgcugaaggacagcaugaugcagcuggaccccuccgccaagaccuggaucgacaucgagggccggccggaggaccccgucgagaucgcgcucuaccagcccaugagcgggugcuacauccacuucuuccgcgagcccaccgaccugaagcaguucaagcaggacgccaaguacucccacggcaucgacguggccgaccuguucccggcccagcccggccucaccagcgccgucaucgaggcgcugccccggaacauggugcugacgugccaggggagcgacgacaucaagcgccuccuggacucccagggccgccgggacaucaagcugaucgacaucgcccucagcaaggccgacucccgccgguucgagaacgccgugugggaccagugcaaggaccugugccacaugcacaccggggucgugguggagaagaagaagcgcggcgggaaggaggagaucacgccccacugcgcccugauggacugcaucauguacgacgcggccgucagcggcggccucaacaucccggugcugcgggccgugcugccccgcgacauggucuuccggaccuccagccccaagguggugcucugaggacuagucccuguucccagagcccacuuuuuuuucuuuuuuugaaauaaaauagccugucuuucagaucuaaaaaaaaaaaaaaaaaaaaaaaaaaaaaaaaaaaaaaaaaaaaaaaaaaaaaaaaaaaaaaaaaaaaaaaaaaaaaaaaaaaaaaaaaaaaaaaaaaaa

SEQ ID NO: 21048 - RNA, 2009 nt, Artificial Sequence
  mRNA product Design a-1 (A100) comprising derived and/or modified sequence from LASV(LASV253-NIG-2011;Clade II)__AIT17671__SP-IgE_NP(2-569) (opt1)
aggagagucccgcagucggcguccagcggcucugcuuguucgugugugugucguugcaggccuuauucaagcuuaccauggacuggaccuggauccuguuccucguggccgccgcgacccgcguccacagcagcgccuccaaggaggugaaguccuuccuguggacccagagccuccgccgggagcugagcggcuacugcuccagcaucaagcugcaggucgugaaggacgcccaggcgcuccugcacgggcuggacuucuccgaggugagcaacguccagcgccucaugcggaagcagaagcgcgacgacuccgaccugaagcggcugcgcgaccucaaccaggccgugaacaaccugguggagcucaagagcacccagcagaaguccguccugcgggugggcacccugaccagcgacgaccugcucacccuggccgccgaccuggagaagcucaaguccaaggugauccgcaccgagcggccccugagcuccggggucuacaugggcaaccugagcacgcagcagcucgagcagcgccgggcccugcugaacaugaucgggauggugggcggcgcgcaggggacccagccgggccgcgacggggugguccgggugugggacgugaagaaccccgaccuccugaacaaccaguucggcaccaugcccucccugacccucgccugccugacgaagcaggggcaggucgaccugaacgacguggugcucgcccugaccgaccugggccucaucuacaccgccaaguaccccaacagcuccgaccuggaccgccugagccagagccacccgauccucaacauggucgacaccaagaaguccagccugaacaucuccggcuacaacuucagccugggggcggccgugaaggccggcgccugcaugcucgacgggggcaacaugcuggagacgaucaaggugacgccccagaccauggacggcauccugaaguccauccucaaggucaagaagucccuggggauguucgugagcgacacccccggcgagcggaaccccuacgagaacauccuguacaagaucugccucagcggggacggcuggccguacaucgccucccgcaccagcaucguggggcgggcgugggagaacaccaccgucgaccuggaguccgacggcaagccccagaaggugggcaccgccgggagcaacaagucccugcagagcgccggcuuccccacggggcucaccuacucccagcugaugacccugaaggacagcaugaugcagcuggaccccuccgccaagaccuggaucgacaucgagggccgcccggaggaccccgucgagaucgcccucuaccagcccaugagcgggugcuacauccacuucuuccgggagcccacggaccugaagcaguucaagcaggacgcgaaguacucccacggcaucgacgugaccgaccuguucccggcccagcccggccucaccagcgccgugaucgaggcccugccccgcaacaugguccugaccugccaggggagcgacgacaucaagcggcuccuggacucccagggccgccgcgacaucaagcugaucgacaucgcccucagcaaggcggacucccggcgcuucgagaacgccgugugggaccagugcaaggaccugugccacaugcacacggggguggucguggagaagaagaagcggggcgggaaggaggagaucacgccccacugcgcccugauggacugcaucauguacgacgccgccgugagcggcggccucaacaucccgguccugcgcgcggugcugccccgggacaugguguuccgcaccuccagccccaaggucgugcucugaggacuagucccuguucccagagcccacuuuuuuuucuuuuuuugaaauaaaauagccugucuuucagaucuaaaaaaaaaaaaaaaaaaaaaaaaaaaaaaaaaaaaaaaaaaaaaaaaaaaaaaaaaaaaaaaaaaaaaaaaaaaaaaaaaaaaaaaaaaaaaaaaaaaa

SEQ ID NO: 21049 - RNA, 2009 nt, Artificial Sequence
  mRNA product Design a-1 (A100) comprising derived and/or modified sequence from LASV(LASV254-NIG-2011;Clade II)__AIT17675__SP-IgE_NP(2-569) (opt1)
aggagagucccgcagucggcguccagcggcucugcuuguucgugugugugucguugcaggccuuauucaagcuuaccauggacuggaccuggauccuguuccucguggccgccgcgacccgcguccacagcagcgccuccaaggaggugaaguccuuccuguggacccagagccuccgccgggagcugagcggcuacugcuccagcaucaagcugcaggucgugaaggacgcccaggcgcuccugcacgggcuggacuucuccgaggugagcaacguccagcgccucaugcggaagcagaagcgcgacgacuccgaccugaagcggcugcgcgaccucaaccaggccgugaacaaccugguggagcucaagagcacccagcagaaguccguccugcgggugggcacgcugaccagcgacgaccugcucacccuggccgccgaccuggagaagcucaaguccaaggugauccgcaccgagcggccccugagcuccggggucuacaugggcaaccugagcacgcagcagcucgagcagcgccgggcccugcugaacaugaucgggauggugggcggcgcgcaggggacccagccgggccgcgacggggugguccgggugugggacgugaagaaccccgaccuccugaacaaccaguucggcaccaugcccucccugacccucgccugccugacgaagcaggggcaggucgaccugaacgacgccgugcucgcccugaccgaccugggccucaucuacaccgcgaaguaccccaacagcuccgaccuggaccgccugagccagagccacccgauccucaacaugguggacaccaagaaguccagccugaacaucuccggcuacaacuucagccugggggccgccgucaaggccggcgccugcaugcucgacgggggcaacaugcuggagacgaucaaggugacgccccagaccauggacggcauccugaaguccauccucaaggugaagaagucccuggggauguucgucagcgacacccccggcgagcggaaccccuacgagaacauccuguacaagaucugccucagcggggacggcuggccguacaucgcgucccgcaccagcaucguggggcgggccugggagaacaccaucguggaccuggaguccgacggcaagccccagaaggucggcaccgccgggagcaacaagucccugcagagcgccggcuuccccaccgggcucacguacucccagcugaugacccugaaggacagcaugaugcagcuggaccccuccgccaagaccuggaucgacaucgagggccgcccggaggaccccguggagaucgcgcucuaccagcccaugagcgggugcuacauccacuucuuccgggagcccaccgaccugaagcaguucaagcaggacgccaaguacucccacggcaucgacgucgccgaccuguucccggcccagcccggccucacgagcgccgugaucgaggcgcugccccgcaacauggugcugaccugccaggggagcgacgacaucaagcggcuccuggacucccagggccgccgcgacaucaagcugaucgacaucgcccucagcaaggccgacucccggcgcuucgagaacgccgucugggaccagugcaaggaccugugccacaugcacaccggggugguggucgagaagaagaagcggggcgggaaggaggagaucacgccccacugcgcccugauggacugcaucauguacgacgcggccgugagcggcggccucaacaucccggugcugcgcgccguccugccccgggacaugguguuccgcaccuccagccccaaggugguccucugaggacuagucccuguucccagagcccacuuuuuuuucuuuuuuugaaauaaaauagccugucuuucagaucuaaaaaaaaaaaaaaaaaaaaaaaaaaaaaaaaaaaaaaaaaaaaaaaaaaaaaaaaaaaaaaaaaaaaaaaaaaaaaaaaaaaaaaaaaaaaaaaaaaaa

SEQ ID NO: 21050 - RNA, 2009 nt, Artificial Sequence
  mRNA product Design a-1 (A100) comprising derived and/or modified sequence from LASV(Nig08-04;Clade II)__ADU56611__SP-IgE_NP(2-569) (opt1)
aggagagucccgcagucggcguccagcggcucugcuuguucgugugugugucguugcaggccuuauucaagcuuaccauggacuggaccuggauccuguuccucguggccgccgcgacccgcguccacagcagcgccuccaaggaggugaaguccuuccuguggacccagagccuccgccgggagcugagcggcuacugcuccaacaucaagcugcaggucgugaaggacgcccaggcgcuccugcacgggcuggacuucagcgagguguccaacguccagcgccucaugcggaagcagaagcgcgacgacggcgaccugaagcggcugcgcgaccucaaccaggccgugaacaaccugguggagcucaagagcacccagcagaaguccguccugcggguggggacccugaccagcgacgaccugcucacccuggccgccgaccuggagaagcucaaguccaaggugauccgcaccgagcggccccugagcuccggcgucuacauggggaaccugagcacgcagcagcucgagcagcgcaaggcccugcuguccaugaucggcauggugggcggggcgcagggcacccagccggggcgggacggcgugguccgcgugugggacgugaagaaccccgaccuccugaacaaccaguucgggaccaugcccagccugacccucgccugccugacgaagcagggccaggucgaccugaacgacgccgugcucgcccugaccgaccugggccucaucuacaccgcgaaguaccccaacuccagcgaccuggaccggcugucccagagccacccgauccucaacaugguggacaccaagaaguccagccugaacaucagcggguacaacuucucccugggcgccgccgucaaggccggggccugcaugcucgacggcggcaacaugcuggagacgaucaaggugacgccccagaccauggacgggauccucaagagcauccugaaggugaagcgcucccugggcauguucgucagcgacacccccggggagcggaaccccuacgagaacauccuguacaagaucugccucuccggcgacggguggccguacaucgcgagccgcaccuccaucgugggccgggccugggagaacaccaccguggaccuggagagcgacggcaagccccagaaggucgggaccgccggcuccaacaagagccugcaguccgccggguuccccacgggccucaccuacagccagcugaugacccugaaggacuccaugaugcagcuggaccccagcgccaagaccuggaucgacaucgaggggcgcccggaggaccccguggagaucgcgcucuaccagcccauguccggcugcuacauccacuucuuccgggagcccacggaccugaagcaguucaagcaggacgccaaguacagccacggcaucgacgucaccgaccuguucuccgcccagccggggcucaccagcgccgugaucgaggcccugccccgcaacauggugcugaccugccagggcagcgacgacaucaagaagcuccuggacucccaggggcggcgcgacaucaagcugaucgacaucagccucaacaaggcggacucccgccgguucgagaacgccgucugggaccagugcaaggaccugugccacaugcacacgggcgugguggucgagaagaagaagcgcgggggcaaggaggagaucacgccccacugcgcccugauggacugcaucauguucgacgccgccgugagcggcgggcucaacauccccauccugcgggcggugcugccgcgcgacauggucuuccggaccuccagccccaagguggugcucugaggacuagucccuguucccagagcccacuuuuuuuucuuuuuuugaaauaaaauagccugucuuucagaucuaaaaaaaaaaaaaaaaaaaaaaaaaaaaaaaaaaaaaaaaaaaaaaaaaaaaaaaaaaaaaaaaaaaaaaaaaaaaaaaaaaaaaaaaaaaaaaaaaaaa

SEQ ID NO: 21051 - RNA, 2012 nt, Artificial Sequence
  mRNA product Design a-1 (A100) comprising derived and/or modified sequence from LASV(GA391;Clade III)__AAA46284__SP-IgE_NP(2-570) (opt1)
aggagagucccgcagucggcguccagcggcucugcuuguucgugugugugucguugcaggccuuauucaagcuuaccauggacuggaccuggauccuguuccucguggccgccgcgacccgcguccacagcagcgccuccaaggaggugcgcagcugccuguggacccagucccuccggcgcgagcugagcggcuacugcuccaacaucaagcugcaggucgugaaggacgcccaggcgcuccugcacgggcuggacuucagcgagguguccaacguccagcggcucaugcgcaagcagaagcgggacgacggcgaccugaagcgccugcgggaccucaaccaggccgugaacaaccugguggagcugaaguccacccagcagaaguccguccuccgcguggggacgcugagcuccgacgaccugcucauccuggccgccgaccuggagaagcucaagagcaaggugacccggaccgagcgcccccuguccagcggcgucuacauggggaaccuguccagccagcagcucgaccagcggcgcgcccugcugaacaugaucggcaugaccggcguguccgggggcgggaagggcgcgagcaacgggaucgugcgggucugggacgugaagaacgccgagcuccugaacaaccaguucggcacgaugccgucccugacccucgccugccugaccaagcagggccagguggaccugaacgacgccguccaggcgcucaccgaccuggggcugaucuacacggccaaguaccccaacagcagcgaccucgaccgccugucccagagccaccccauccugaacaugaucgacaccaagaaguccagccucaacaucuccggcuacaacuucagccugggggccgccgugaaggccggcgcgugcaugcuggacggcgggaacaugcucgagaccaucaaggugagcccccagaccauggacggcauccucaagagcauccugaaggucaagaagucccuggggauguucgugagcgacacgccgggcgagcggaaccccuacgagaacauccuguacaagaucugccuguccggggacggcuggagcuacaucgccucccgcaccagcaucgugggccgggccugggagaacaccgucguggaccucgagcaggacaacaagccccagaagaucgggaacggcggguccaacaagagccugcaguccgccggcuucgccgcggggcugaucuacagccagcucaugacccugaaggacuucaagugcuucaaccugauccccaacgccaagacguggauggacaucgagggccgcccggaggaccccguggagaucgcccuguaccagcccuccagcggcugcuacguccacuucuuccgggagcccaccgaccucaagcaguucaagcaggacgccaaguacagccacgggcgcgacgugaccgaccuguucgccgcgcagccgggccugaccuccgccgucaucgaggcccucccccggaacauggugaucacgugccaggggagcgaggacauccgcaagcugcuggagucccagggccgccgggacaucaagcucaucgacaucacccugagcaaggccgacucccgcaaguucgagaacgccgugugggaccaguucaaggaccugugccacaugcacaccggggucgugguggagaagaagaagcggggcggcaaggaggagaucacgccccacugcgcgcucauggacugcaucauguucgacgccgccgucagcgggggccuggacgccaaggugcugcgcgugguccucccccgggacaugguguuccgcaccuccaccccgaaggugguccugugaggacuagucccuguucccagagcccacuuuuuuuucuuuuuuugaaauaaaauagccugucuuucagaucuaaaaaaaaaaaaaaaaaaaaaaaaaaaaaaaaaaaaaaaaaaaaaaaaaaaaaaaaaaaaaaaaaaaaaaaaaaaaaaaaaaaaaaaaaaaaaaaaaaaa

SEQ ID NO: 21052 - RNA, 2009 nt, Artificial Sequence
  mRNA product Design a-1 (A100) comprising derived and/or modified sequence from LASV(Nig08-A19;Clade III)__ADU56619__SP-IgE_NP(2-569) (opt1)
aggagagucccgcagucggcguccagcggcucugcuuguucgugugugugucguugcaggccuuauucaagcuuaccauggacuggaccuggauccuguuccucguggccgccgcgacccgcguccacagcagcgccuccaaggaggugaaguccuuccuguggacccagucccuccgccgggagcugagcggcuacugcuccaacaucaagcugcaggucgugaaggacgcccaggcgcuccugcacgggcuggacuucagcgagguguccaacguccagcgccucaugcggaagcagaagcgcgacgacggcgaccugaagcggcugcgcgaccucaaccaggccgugaacaaccugguggagcucaagagcacccagcagaaguccguccugcggguggggacccugagcuccgacgaccugcucgugcuggccgccgaccuggagaagcucaagagcaaggucgugcgcaccgagcggccccuguccagcggcaucuacauggggaaccuguccagccagcagcucgaccagcgcaaggcccugcugaacaugaucggcaugaccggcgggaacggcgggcggaacaccacguccgacggcaucgugcgcgucugggacgugaagaacgcggagcuccugaacaaccaguucgggaccaugccgagccugacccucgccugccugaccaagcagggccagguggaccugaacgacgccguccaggcccucacggaccugggccugaucuacaccgcgaaguaccccaacuccagcgaccucgaccggcuggcccagagccaccccauccugaacaugaucgacaccaagaaguccagccucaacaucuccggguacaacuucagccugggcgccgccgugaaggccggggcgugcaugcuggacggcggcaacaugcucgagaccaucaaggugagcccccagacgauggacgggauccucaagagcauccugaaggucaagcgcucccugggcauguucaucagcgacaccccgggggagcggaaccccuacgagaacauccuguacaagaucugccuguccggcgacggguggcccuacaucgccagccgcaccuccaucgugggccgggccugggagaacaccguggucgaccucgagagcgacaacaagccccagaagacgggcaacgggggcuccaacaagagccugcaguccgccggguucgccgcgggccugaccuacagccagcucaugacccugaaggacuccaugcugcagcuggacccgaacgccaagaccuggauggacaucgaggggcgccccgaggaccccguggagaucgcccucuaccagcccagcuccggcugcuacauccacuucuuccgggagccgacggaccugaagcaguucaagcaggacgccaaguacagccacggcaucgacgugaccgaccuguucgccgcgcagcccgggcucaccagcgccgucaucgaggcccugccccgcaacauggugaucacgugccagggcuccgaggacauccggaagcugcucgagagccaggggcgccgcgacaucaagcugaucgacaucucccugagcaaggucgacucccggaaguucgagaacgccgugugggaccaguucaaggaccucugccacaugcacaccggcaucguggucgagaagaagaagcgcgggggcaaggaggagaucacgccccacugcgcccugauggacugcaucauguucgacgcggccgugagcggcgggguggacgccaagguccugcgggccgugcucccgcgcgacaugguguuccggaccuccacccccaaggucgugcugugaggacuagucccuguucccagagcccacuuuuuuuucuuuuuuugaaauaaaauagccugucuuucagaucuaaaaaaaaaaaaaaaaaaaaaaaaaaaaaaaaaaaaaaaaaaaaaaaaaaaaaaaaaaaaaaaaaaaaaaaaaaaaaaaaaaaaaaaaaaaaaaaaaaaa

SEQ ID NO: 21053 - RNA, 2009 nt, Artificial Sequence
  mRNA product Design a-1 (A100) comprising derived and/or modified sequence from LASV(G1180-SLE-2010;Clade IV)__AIT17169__SP-IgE_NP(2-569) (opt1)
aggagagucccgcagucggcguccagcggcucugcuuguucgugugugugucguugcaggccuuauucaagcuuaccauggacuggaccuggauccuguuccucguggccgccgcgacccgcguccacagcagcgccuccaaggagaucaagagcuuccuguggacccagucccuccgccgggagcugagcggcuacugcuccaacaucaagcuccagguggucaaggacgcccaggcgcugcugcacgggcuggacuucagcgagguguccaacgugcagcgccucaugcggaaggagcgccgggacgacaacgaccugaagcgccugcgggaccucaaccaggccgucaacaaccugguggagcucaagagcacccagcagaaguccauccugcgcgugggcacccugaccagcgacgaccugcucauccuggccgccgaccuggagaagcucaaguccaaggucauccggaccgagcgcccccugagcgccgggguguacaugggcaaccuguccagccagcagcucgaccagcggcgcgcgcugcuguccaugaucgggaugagcuccggcaaccagcgggcccaggccggccgcgacggggugguccgggugugggacgugaagaacgucgagcuccugaacaaccaguucggcaccaugccgagccugacgcucgccugccugaccaagcagggccagguggaccugaacgacgcggugcaggcccucaccgaccuggggcugaucuacaccgccaaguaccccaacacguccgaccucgaccgccugacccagagccaccccauccugaacaugaucgacaccaagaaguccagccucaacaucagcggguacaacuucucccugggcgccgccgucaaggcgggcgccugcaugcuggacgggggcaacaugcucgagaccaucaaggugagcccccagacgauggacgggauccugaaguccauccugaaggugaagaaggcccucggcauguucaucagcgacaccccgggcgagcggaaccccuacgagaacauccuguacaagaucugccuguccggggacggcuggcccuacaucgccagccgcaccuccaucaccgggcgggccugggagaacacggucguggaccucgagagcgacggcaagccccagaaggcgggguccaacaacagcaacaagucccugcagagcgugggcuucaccgccggccugaccuacucccagcucaugacccugaaggacgccaugcugcagcuggacccgaacgccaagacguggauggacaucgaggggcgccccgaggaccccgucgagaucgcccucuaccagcccagcuccggcugcuacauccacuucuuccgggagccgaccgaccugaagcaguucaagcaggacgcgaaguacagccacgggaucgacgugaccgaccuguucgccgcccagcccggccucaccuccgccgugaucgacgcccugccccgcaacauggucaucacgugccaggggagcgacgacauccgcaagcugcucgagagccagggccggaaggacaucaagcugaucgacaucgcgcuguccaagaccgacagccgcaaguacgagaacgccgugugggaccaguacaaggaccucugccacaugcacaccggcgucgugguggagaagaagaagcgcgggggcaaggaggagaucacgccccacugcgcccugauggacugcaucauguucgacgccgcggucuccgggggccugaacaccagcgugcuccgggccgugcugccgcgggacauggucuuccgcaccuccacgccccggguggugcugugaggacuagucccuguucccagagcccacuuuuuuuucuuuuuuugaaauaaaauagccugucuuucagaucuaaaaaaaaaaaaaaaaaaaaaaaaaaaaaaaaaaaaaaaaaaaaaaaaaaaaaaaaaaaaaaaaaaaaaaaaaaaaaaaaaaaaaaaaaaaaaaaaaaaa

SEQ ID NO: 21054 - RNA, 2009 nt, Artificial Sequence
  mRNA product Design a-1 (A100) comprising derived and/or modified sequence from LASV(G1442-SLE-2011;Clade IV)__AIT17181__SP-IgE_NP(2-569) (opt1)
aggagagucccgcagucggcguccagcggcucugcuuguucgugugugugucguugcaggccuuauucaagcuuaccauggacuggaccuggauccuguuccucguggccgccgcgacccgcguccacagcagcgccuccaaggaggugaaguccuuccuguggacccagagccuccgccgggagcugagcggcuacugcuccaacaucaagcugcaggucgugaaggacgcccaggcgcuccugcacgggcuggacuucagcgagguguccaacguccagcgccucaugcggaagcagcgccgggacgacaacgaccugaagcgccugcgggaccucaaccaggccgugaacaaccugguggagcucaagagcacccagcagaaguccguccugcgcgugggcacccugaccagcgacgaccugcucgugcuggccgccgaccuggagaagcucaaguccaaggucauccggaccgagcgcccccugagcgccgggguguacaugggcaaccuguccagccagcagcucgaccagcggcgcgcgcugcugaacaugaucgggauguccggcggcauccaggggacccggacgggccgcgacggggugguccgggugugggacgugaagaacgccgaccuccugaacaaccaguucggcaccaugccgagccugacccucgccugccugaccaagcaggggcaggucgaccugaacgacguggugcaggcccucacggaccugggccugaucuacaccgcgaaguaccccaacgccuccgaccucgaccgccugacccagagccaccccauccugaacaugaucgacaccaagaaguccagccucaacaucagcggcuacaacuucucccugggggccgccgucaaggccggcgcgugcaugcuggacgggggcaacaugcucgagacgaucaaggugagcccccagaccauggacggcauccugaaguccauccugaaggugaagaagacccucgggauguucaucagcgacaccccgggcgagcggaaccccuacgagaacauccuguacaagaucugccuguccggggacggcuggcccuacaucgccagccgcacguccaucaccgggcgggccugggagaacaccgucguggaccucgagagcgacggcaagccccagaaggccggcuccaacaacagcaacaagucccugcagagcgccggguucgcggccggccugaccuacucccagcucaugacgcugaaggacgccaugcugcagcuggacccgaacgccaagaccuggauggacaucgaggggcgccccgaggaccccguggagaucgcccucuaccagcccagcuccggcugcuacauccacuucuuccgggagccgaccgaccugaagcaguucaagcaggacgcgaaguacagccacgggaucgacgucaccgaccuguucgccgcccagcccggccucacguccgccgugaucgaggcccugccccgcaacauggucaucacgugccagggcagcgacgacaucaagaagcugcucgagucccaggggcgcaaggacaucaagcugaucgacaucgcgcugagcaagaccgacagccggaaguacgagaacgccgugugggaccaguacaaggaccucugccacaugcacaccggcguggucguggagaagaagaagcgcgggggcaaggaggagaucaccccgcacugcgcccugauggacugcaucauguucgacgccgcgguguccgggggccugaacacccucguccugcgggccgugcugccccgcgacaugguguuccggaccagcacgccccgcgucgugcucugaggacuagucccuguucccagagcccacuuuuuuuucuuuuuuugaaauaaaauagccugucuuucagaucuaaaaaaaaaaaaaaaaaaaaaaaaaaaaaaaaaaaaaaaaaaaaaaaaaaaaaaaaaaaaaaaaaaaaaaaaaaaaaaaaaaaaaaaaaaaaaaaaaaaa

SEQ ID NO: 21055 - RNA, 2009 nt, Artificial Sequence
  mRNA product Design a-1 (A100) comprising derived and/or modified sequence from LASV(G3010-SLE-2013;Clade IV)__AIT17345__SP-IgE_NP(2-569) (opt1)
aggagagucccgcagucggcguccagcggcucugcuuguucgugugugugucguugcaggccuuauucaagcuuaccauggacuggaccuggauccuguuccucguggccgccgcgacccgcguccacagcagcgccuccaaggagaucaagagcuuccuguggacccagucccuccgccgggagcugagcggcuacugcuccaacaucaagcuccagguggucaaggacgcccaggcgcugcugcacgggcuggacuucagcgagguguccaacgugcagcgccucaugcggaaggagcgccgggacgacaacgaccugaagcgccugcgggaccucaaccaggccgucaacaaccugguggagcucaagagcacccagcagaaguccauccugcgcgugggcacccugaccagcgacgaccugcucauccuggccgccgaccuggagaagcucaaguccaaggucacccggaccgagcgcccccugagcgccgggguguacaugggcaaccuguccagccagcagcucgaccagcggcgcgcgcugcuguccaugaucgggaugagcuccggcgugcagggcgcccgggccgggcgcgacggcgucgugcgggugugggacgucaagaacgccgagcuccugaacaaccaguucgggacgaugccgagccugacccucgcgugccugaccaagcagggccagguggaccugaacgacgugguccaggcccucaccgaccuggggcugaucuacacggccaaguaccccaacaccuccgaccucgaccgccugacccagagccaccccauccugaacaugaucgacaccaagaaguccagccucaacaucagcggcuacaacuucucccugggcgccgccgugaaggcgggggccugcaugcuggacggcgggaacaugcucgagacgaucaaggugagcccccagaccauggacggcauccugaaguccauccugaaggucaagaaggcccucggcauguucaucagcgagaccccgggggagcggaaccccuacgagaacauccuguacaagaucugccuguccggcgacggguggcccuacaucgccagccgcaccuccaucacgggccgggccugggagaacaccgugguggaccucgagagcgacgggaagccccagaaggcgggcuccaacaacagcaacaagucccugcagagcgccggcuucaccgccgggcugaccuacucccagcucaugacgcugaaggacgccaugcugcagcuggacccgaacgccaagaccuggauggacaucgagggccgccccgaggaccccgucgagguggcgcucuaccagcccagcuccgggugcuacauccacuucuuccgggagccgaccgaccugaagcaguucaagcaggacgccaaguacagccacggcaucgacgugaccgaccuguucgccgcccagcccgggcucacguccgccgucaucgacgcgcugccccgcaacauggugaucacgugccagggcagcgacgacaucaagaagcugcucgagagccagggccgcaaggacaucaagcugaucgacaucgcccuguccaagaccgacagccggaaguacgagaacgccgucugggaccaguacaaggaccucugccacaugcacaccggggugguggucgagaagaagaagcgcggcgggaaggaggagaucaccccgcacugcgcccugauggacugcaucauguucgacgcggccguguccggcgggcugaacaccagcgugcuccgggccguccugccccgcgacaugguguuccggaccuccacgccccgcgugguccugugaggacuagucccuguucccagagcccacuuuuuuuucuuuuuuugaaauaaaauagccugucuuucagaucuaaaaaaaaaaaaaaaaaaaaaaaaaaaaaaaaaaaaaaaaaaaaaaaaaaaaaaaaaaaaaaaaaaaaaaaaaaaaaaaaaaaaaaaaaaaaaaaaaaaa

SEQ ID NO: 21056 - RNA, 2009 nt, Artificial Sequence
  mRNA product Design a-1 (A100) comprising derived and/or modified sequence from LASV(G502-SLE-2009;Clade IV)__AIT17127__SP-IgE_NP(2-569) (opt1)
aggagagucccgcagucggcguccagcggcucugcuuguucgugugugugucguugcaggccuuauucaagcuuaccauggacuggaccuggauccuguuccucguggccgccgcgacccgcguccacagcagcgccuccaaggagaucaagagcuuccuguggacccagucccuccgccgggagcugagcggcuacugcuccaacaucaagcuccagguggucaaggacgcccaggcgcugcugcacgggcuggacuucagcgagguguccaacgugcagcgccucaugcggaaggagcgccgggacgacaacgaccugaagcgccugcgggaccucaaccaggccgucaacaaccugguggagcucaagagcacccagcagaaguccauccugcgcgugggcacccugaccagcgacgaccugcucauccuggccgccgaccuggagaagcucaaguccaaggucauccggaccgagcgcccccugagcgccgggguguacaugggcaaccuguccagccagcagcucgaccagcggcgcgcgcugcuguccaugaucgggaugagcggcggcaaccagggggugcgggccggcaaggacggggucgugcgcgugugggacgucaagaacgccgagcuccugaacaaccaguucggcaccaugccgucccugacgcucgccugccugaccaagcagggccagguggaccugaacgacgcggugcaggcccucaccgaccuggggcugaucuacaccgccaaguaccccaacacgagcgaccucgaccggcugacccagucccaccccauccugaacaugaucgacaccaagaaguccagccucaacaucuccggcuacaacuucagccugggggccgccgucaaggcgggcgccugcaugcuggacgggggcaacaugcucgagaccaucaaggugagcccccagacgauggacggcauccucaagagcauccugaaggugaagaaggcccuggggauguucaucuccgacaccccgggcgagcgcaaccccuacgagaacauccuguacaagaucugccugagcggggacggcuggcccuacaucgccucccggaccagcaucaccgggcgcgccugggagaacacggucguggaccucgaguccgacggcaagccccagaaggcgggcagcaacaacuccaacaagagccugcaguccgccggguucaccgccggccugaccuacagccagcucaugacccugaaggacgccaugcugcagcuggacccgaacacgaagaccuggauggacaucgaggggcggcccgaggaccccguggagaucgcccucuaccagcccuccagcggcugcuacauccacuucuuccgcgagccgaccgaccugaagcaguucaagcaggacgcgaaguacucccacgggaucgacgucaccgaccuguucgccgcccagcccggccucacgagcgccgugaucgacgcccugccccggaacauggugaucacgugccagggcuccgacgacauccgcaagcugcucgagagccaggggcgcaaggacaucaagcugaucgacaucgcgcugaacaagaccgacagccggaaguacgagaacgccgucugggaccaguacaaggaccucugccacaugcacaccggcguggucguggagaagaagaagcgcgggggcaaggaggagaucaccccgcacugcgcccugauggacugcaucauguucgacgccgcgguguccgggggccugaacaccagcguccuccgggccgugcugccccgcgacaugguguuccggaccuccacgccccgcgucgugcugugaggacuagucccuguucccagagcccacuuuuuuuucuuuuuuugaaauaaaauagccugucuuucagaucuaaaaaaaaaaaaaaaaaaaaaaaaaaaaaaaaaaaaaaaaaaaaaaaaaaaaaaaaaaaaaaaaaaaaaaaaaaaaaaaaaaaaaaaaaaaaaaaaaaaa

SEQ ID NO: 21057 - RNA, 2009 nt, Artificial Sequence
  mRNA product Design a-1 (A100) comprising derived and/or modified sequence from LASV(G733-SLE-2010;Clade IV)__AIT17155__SP-IgE_NP(2-569) (opt1)
aggagagucccgcagucggcguccagcggcucugcuuguucgugugugugucguugcaggccuuauucaagcuuaccauggacuggaccuggauccuguuccucguggccgccgcgacccgcguccacagcagcgccuccaaggagaucaagagcuuccuguggacccagucccuccgccgggagcugagcggcuacugcuccaacaucaagcuccagguggucaaggacgcccaggcgcugcugcacgggcuggacuucagcgagguguccaacgugcagcgccucaugcggaaggagcgccgggacgacaacgaccugaagcgccugcgggaccucaaccaggccgucaacaaccugguggagcucaagagcacccagcagaaguccgugcugcgcgucggcacccugaccagcgacgagcugcucgugcuggccgccgaccuggagaagcucaaguccaaggugauccggaccgagcgcccccugagcgccggggucuacaugggcaaccuguccagccagcagcucgaccagcggcgcgcgcugcuguccaugaucgggaugagcggcggcaaccagggggcccggaccggccgcgacgggguggugcgggucugggacgugaagaacgccgagcuccugaacaaccaguucggcaccaugccgucccugacccucgccugccugaccaagcagggccagguggaccugaacgacgcgguccaggcccucaccgaccuggggcugaucuacacggccaaguaccccaacaccagcgaccucgaccgccugacccagucccaccccauccugaacaugaucgacaccaagaaguccagccucaacaucuccggcuacaacuucagccugggggccgccgugaaggcgggcgccugcaugcuggacgggggcaacaugcucgagacgaucaaggugagcccccagaccauggacggcauccucaagagcauccugaaggucaagaaggcccuggggauguucaucuccgacaccccgggcgagcggaaccccuacgagaacauccuguacaagaucugccugagcggggacggcuggcccuacaucgccucccgcaccagcaucacggggcgggccugggagaacaccgugguggaccucgaguccgacggcaagccccagaaggcgggcagcaacaacuccaacaagagccugcaguccgccggguucaccgccggccugaccuacagccagcucaugacgcugaaggacgccaugcugcagcuggacccgaacgccaagaccuggauggacaucgaggggcgccccgaggaccccgucgagaucgcgcucuaccagcccuccagcggcugcuacauccacuucuuccgggagccgaccgaccugaagcaguucaagcaggacgccaaguacucccacgggaucgacgugaccgaccuguucgccgcccagcccggccucacgagcgccgugaucgacgcgcugccccgcaacauggucaucacgugccagggcuccgacgacauccgcaagcugcucgagagccaggggcggaaggacaucaagcugaucgacaucgcccugagcaagaucgacucccgcaaguacgagaacgccgugugggaccaguacaaggaccucugccacaugcacaccggcgucgugguggagaagaagaagcgcgggggcaaggaggagaucacgccccacugcgcccugauggacugcaucauguucgacgcggccgucagcgggggccugaacucccucgugcugcgggccgugcugccgcgggacauggucuuccgcaccagcacgccccggguggugcucugaggacuagucccuguucccagagcccacuuuuuuuucuuuuuuugaaauaaaauagccugucuuucagaucuaaaaaaaaaaaaaaaaaaaaaaaaaaaaaaaaaaaaaaaaaaaaaaaaaaaaaaaaaaaaaaaaaaaaaaaaaaaaaaaaaaaaaaaaaaaaaaaaaaaa

SEQ ID NO: 21058 - RNA, 2009 nt, Artificial Sequence
  mRNA product Design a-1 (A100) comprising derived and/or modified sequence from MOPV/LASV reassortant(IGS-1;Clade IV)__AFY05578__SP-IgE_NP(2-569) (opt1)
aggagagucccgcagucggcguccagcggcucugcuuguucgugugugugucguugcaggccuuauucaagcuuaccauggacuggaccuggauccuguuccucguggccgccgcgacccgcguccacagcagcgccuccaaggagaucaagagcuuccuguggacccagucccuccgccgggagcugagcggcuacugcuccaacaucaagcuccagguggucaaggacgcccaggcgcugcugcacgggcuggacuucagcgagguguccaacgugcagcgccucaugcggaaggagcgccgggacgacaacgaccugaagcgccugcgggaccucaaccaggccgucaacaaccugguggagcucaagagcacccagcagaaguccauccugcgcgugggcacccugaccagcgacgaccugcucauccuggccgccgaccuggagaagcuccgguccaaggucauccgcaccgagcggccccugagcgccgggguguacaugggcaaccuguccagccagcagcucgaccagcgccgggcgcugcugaacaugaucgggauguccggcggcaaccagggggcccgcgccggccgggacggggugguccgcgugugggacgugaagaacgccgagcuccugagcaaccaguucggcaccaugccgucccugacgcucgcgugccugaccaagcaggggcaggucgaccugaacgacgccgugcaggcccucaccgaccugggccugaucuacaccgccaaguaccccaacacgagcgaccucgaccggcugacccagucccaccccauccugaacaugaucgacaccaagaaguccagccucaacaucuccggcuacaacuucagccugggggccgcggugaaggccggcgccugcaugcuggacgggggcaacaugcucgagaccaucaaggucagcccccagacgauggacggcauccucaagagcauccugaaggugaagaaggcccuggggauguucaucuccgacaccccgggcgagcgcaaccccuacgagaacauccuguacaagaucugccugagcggggacggcuggcccuacaucgccucccggaccagcaucaccgggcgcgcgugggagaacacgguggucgaccucgaguccgacggcaagccccagaaggccgacagcaacaacuccagcaagucccugcagagcgccggcuucaccgccgggcugaccuacucccagcucaugacccugaaggacgccaugcugcagcuggacccgaacgcgaagacguggauggacaucgagggccggcccgaggaccccguggagaucgcccucuaccagcccagcuccgggugcuacauccacuucuuccgcgagccgaccgaccugaagcaguucaagcaggacgccaaguacagccacggcaucgacgugaccgaccuguucgccacccagcccgggcucacguccgccgucaucgacgcgcugccccgcaacauggugaucacgugccagggcagcgacgacauccggaagcugcucgagagccagggccgcaaggacaucaagcugaucgacaucgaccuguccaagaccgacagccggaaguacgagaacgccgugugggaccaguacaaggaccucugccacaugcacaccggggucguggucgagaagaagaagcgcggcgggaaggaggagaucaccccgcacugcgcccugauggacugcaucauguucgacgccgcgguguccggcgggcugaacaccagcgugcuccgggccguccugccccgcgacaugguguuccggaccuccacgccccgcgugguccugugaggacuagucccuguucccagagcccacuuuuuuuucuuuuuuugaaauaaaauagccugucuuucagaucuaaaaaaaaaaaaaaaaaaaaaaaaaaaaaaaaaaaaaaaaaaaaaaaaaaaaaaaaaaaaaaaaaaaaaaaaaaaaaaaaaaaaaaaaaaaaaaaaaaaa

SEQ ID NO: 21059 - RNA, 2009 nt, Artificial Sequence
  mRNA product Design a-1 (A100) comprising derived and/or modified sequence from LASV(LM765-SLE-2012;Clade IV)__AIT17815__SP-IgE_NP(2-569) (opt1)
aggagagucccgcagucggcguccagcggcucugcuuguucgugugugugucguugcaggccuuauucaagcuuaccauggacuggaccuggauccuguuccucguggccgccgcgacccgcguccacagcagcgccuccaaggagaucaagagcuuccuguggacccagucccuccgccgggagcugagcggcuacugcuccaacaucaagcuccagguggucaaggacgcccaggcgcugcugcacgggcuggacuucagcgagguguccaacgugcagcgccucaugcggaaggagcgccgggacgacaacgaccugaagcgccugcgggaccucaaccaggccgucaacaaccugguggagcucaagagcacccagcagaaguccauccugcgcgugggcacccugaccagcgacgaccugcucauccuggccgccgaccuggagaagcucaaguccaaggucacccggaccgagcgcccccugagcgccgggguguacaugggcaaccuguccagccagcagcucgaccagcggcgcgcgcugcuggacaugaucgggauguccggcagcaaccagggcgcccgggccgggcgcgacggcgugguccgggugugggacgugaagaacgccgagcuccugaacaaccaguucgggacgaugccgucccugacccucgcgugccugaccaagcagggccaggucgaccugaacgacgccgugcaggcccucaccgaccuggggcugaucuacacggccaaguaccccaacaccagcgaccucgaccgccugacccagucccaccccauccugaacaugaucgacaccaagaaguccagccucaacaucuccggcuacaacuucagccugggcgccgcggugaaggccggggccugcaugcuggacggcgggaacaugcucgagacgaucaaggucagcccccagaccauggacggcauccucaagagcauccugaaggugaagaaggcccugggcauguucaucuccgacgccccgggggagcggaaccccuacgagaacauccuguacaagaucugccugagcggcgacggguggcccuacaucgcgucccgcaccagcaucaccggccgggccugggagaacacgguggucgaccucgaguccgacgggaagccccagaaggccggcagcaacggcuccaacaagagccugcaguccgccggguucaccgccggccugaccuacagccagcucaugacccugaaggacgcgaugcugcagcuggacccgaacgccaagacguggauggacaucgaggggcgccccgaggaccccguggagaucgcccucuaccagcccuccagcggcugcuacauccacuucuuccgggagccgaccgaccugaagcaguucaagcaggacgccaaguacucccacgggaucgacgugaccgaccuguucgccgcgcagcccggccucaccagcgccgucaucgacgcccugccccgcaacauggugaucacgugccagggcuccgacgacauccgcaagcuguucgagagccaggggcggaaggacaucaagcucaucgacaucgcccugagcaagaccgacucccgcaaguacgagaacgcggugugggaccaguacaaggaccugugccacaugcacaccggcaucgucguggagaagaagaagcgcgggggcaaggaggagaucacgccccacugcgcccucauggacugcaucauguucgacgccgccgucagcgggggccugaacaccuccgugcugcgggccgugcucccgcgggacauggucuuccgcaccagcacgccccggguggugcugugaggacuagucccuguucccagagcccacuuuuuuuucuuuuuuugaaauaaaauagccugucuuucagaucuaaaaaaaaaaaaaaaaaaaaaaaaaaaaaaaaaaaaaaaaaaaaaaaaaaaaaaaaaaaaaaaaaaaaaaaaaaaaaaaaaaaaaaaaaaaaaaaaaaaa

SEQ ID NO: 21060 - RNA, 2009 nt, Artificial Sequence
  mRNA product Design a-1 (A100) comprising derived and/or modified sequence from LASV(LM776-SLE-2012;Clade IV)__AIT17825__SP-IgE_NP(2-569) (opt1)
aggagagucccgcagucggcguccagcggcucugcuuguucgugugugugucguugcaggccuuauucaagcuuaccauggacuggaccuggauccuguuccucguggccgccgcgacccgcguccacagcagcgccuccaaggagaucaagagcuuccuguggacccagucccuccgccgggagcugagcuccuacugcagcaacaucaagcuccagguggucaaggacgcccaggcgcugcugcacggccuggacuucuccgaggugagcaacgugcagcgccucaugcggaaggagcgccgggacgacaacgaccugaagcgccugcgggaccucaaccaggccgucaacaaccugguggagcugaaguccacccagcagaaguccauccuccgcguggggacccugaccuccgacgaccugcucauccuggccgccgaccuggagaagcucaagagcaaggucacccggaccgagcgcccccuguccgccggcguguacauggggaaccugagcucccagcagcucgaccagcggcgcgcgcugcugagcaugaucggcauguccgggagcaaccagggcgcccgggccggccgcgacggggugguccgggugugggacgugaagaacgccgagcuccugaacaaccaguucggcacgaugccgucccugacccucgcgugccugaccaagcaggggcaggucgaccugaacgacgccgugcaggcccucaccgaccugggccugaucuacacggccaaguaccccaacaccagcgaccucgaccgccugacccagagccaccccauccugaacaugaucgacaccaagaaguccagccucaacaucuccggguacaacuucagccugggcgccgcggugaaggccggcgccugcaugcuggacgggggcaacaugcucgagacgaucaaggucagcccccagaccauggacgggauccucaagagcauccugaaggugaagaaggcccugggcauguucaucuccgacaccccgggcgagcggaaccccuacgagaacauccuguacaagaucugccugagcggggacggcuggcccuacaucgccucccgcaccagcaucacggggcgggcgugggagaacaccguggucgaccucgaguccgacggcaagccccagaaggccgggagcaacaacuccaacaagagccugcaguccgccggcuucaccgccggccugaccuacagccagcucaugacgcugaaggacgccaugcugcagcuggacccgaacgcgaagaccuggauggacaucgaggggcgccccgaggaccccguggagguggcccucuaccagcccuccagcggcugcuacauccacuucuuccgggagccgaccgaccugaagcaguucaagcaggacgccaaguacucccacgggaucgacgucaccgaccuguucgccgcccagcccggccucacgagcgcggugaucgacgcccugccccgcaacauggugaucacgugccaggggagcgacgacauccgcaagcugcucgagucccagggccggaaggacaucaagcugaucgacaucgcccugagcaagaccgacucccgcaaguacgagaacgccgucugggaccaguacaaggaccucugccacaugcacaccggcguggucguggagaagaagaagcgcgggggcaaggaggagaucaccccgcacugcgcgcugauggacugcaucauguucgacgccgccgugagcgggggccugaacaccuccguccuccgggccgugcugccccgggacaugguguuccgcaccagcacgccccgggucgugcugugaggacuagucccuguucccagagcccacuuuuuuuucuuuuuuugaaauaaaauagccugucuuucagaucuaaaaaaaaaaaaaaaaaaaaaaaaaaaaaaaaaaaaaaaaaaaaaaaaaaaaaaaaaaaaaaaaaaaaaaaaaaaaaaaaaaaaaaaaaaaaaaaaaaaa

SEQ ID NO: 21061 - RNA, 2009 nt, Artificial Sequence
  mRNA product Design a-1 (A100) comprising derived and/or modified sequence from LASV(Mad39;Clade IV)__ANH09723__SP-IgE_NP(2-569) (opt1)
aggagagucccgcagucggcguccagcggcucugcuuguucgugugugugucguugcaggccuuauucaagcuuaccauggacuggaccuggauccuguuccucguggccgccgcgacccgcguccacagcagcgccuccaaggagaucaagagcuuccuguggacccagucccuccgccgggagcugagcggcuacugcuccaacaucaagcuccagguggucaaggacgcccaggcgcugcugcacgggcuggacuucagcgagguguccaacgugcagcgccucaugcggaagcagcgccgggacgacaacgaccugaagcgccugcgggaccucaaccaggccgucaacaaccugguggagcugaaguccacccagcagaaguccgugcuccgcgucggcacgcugaccagcgacgaccugcucacccuggccgccgaccuggagaagcucaaguccaaggugacccggacggagcgcccccugaccgccgggguguacaugggcaaccugagcucccagcagcucgaccagcggcgcgcgcugcugaacaugaucgggaugagcggcggcaaccagggggcccggaccggccgcgacggggucgugcgggugugggacgucaagaacgccgagcuccugaacaaccaguucggcaccaugccgucccugacgcucgccugccugaccaagcagggccagguggaccugaacgacgugguccaggcgcucaccgaccuggggcugaucuacaccgccaaguaccccaacacgagcgaccucgaccgccugacccagucccaccccauccugaacaugaucgacaccaacaagagcucccucaacaucagcggcuacaacuucagccugggggccgccgugaaggccggcgcgugcaugcuggacgggggcaacaugcucgagaccaucaaggugagcccccagacgauggacggcauccucaagagcauccugaaggucaagaagucccuggggauguucaucagcgacaccccgggcgagcggaaccccuacgagaacauccuguacaagaucugccuguccggggacggcuggcccuacaucgccagccgcaccuccaucaccgggcgggccugggagaacacggugguggaccucgagagcggcggcaagccccagaaggccggguccaacaacagcaacaagucccugcagagcgccggcuucgcggccgggcugaccuacucccagcucaugacccugaaggacgccaugcugcagcuggacccgaacgccaagaccuggauggacaucgagggccgccccgaggaccccgucgagaucgcccucuaccagcccaucagcgggugcuacauccacuucuuccgggagccgacggaccugaagcaguucaagcaggacgcgaaguacucccacggcaucgacgugaccgaccuguucgccgcccagcccggccucaccagcgccgugaucgaggcccugccccgcaacauggucaucacgugccagggguccgacgacauccgcaagcuguucgagagccagggccggaaggacaucaagcucaucgacaucgcgcuguccaagaccgacagccgcaaguacgagaacgccgugugggaccaguacaaggaccugugccacaugcacaccggggucgugguggagaagaagaagaagggcgggaaggaggagaucacgccccacugcgcccucauggacugcaucauguucgacgccgcggucagcggcggccugaacacccuggugcuccgggccgugcugccgcgcgacauggucuuccggaccuccacccccaagguggugcugugaggacuagucccuguucccagagcccacuuuuuuuucuuuuuuugaaauaaaauagccugucuuucagaucuaaaaaaaaaaaaaaaaaaaaaaaaaaaaaaaaaaaaaaaaaaaaaaaaaaaaaaaaaaaaaaaaaaaaaaaaaaaaaaaaaaaaaaaaaaaaaaaaaaaa

SEQ ID NO: 21062 - RNA, 2009 nt, Artificial Sequence
  mRNA product Design a-1 (A100) comprising derived and/or modified sequence from LASV(Z0947-SLE-2011;Clade IV)__AIT17841__SP-IgE_NP(2-569) (opt1)
aggagagucccgcagucggcguccagcggcucugcuuguucgugugugugucguugcaggccuuauucaagcuuaccauggacuggaccuggauccuguuccucguggccgccgcgacccgcguccacagcagcgccuccaaggagaucaagagcuuccuguggacccagucccuccgccgggagcugagcggcuacugcuccaacaucaagcuccagguggucaaggacgcccaggcgcugcugcacgggcuggacuucagcgagguguccaacgugcagcgccucaugcggaaggagcgccgggacgacaacgaccugaagcgccugcgggaccucaaccaggccgucaacaaccugguggagcucaagagcacccagcagaaguccauccugcgcgugggcacccugaccagcgacgaccugcucauccuggccgccgaccuggagaagcucaaguccaaggucacccggaccgagcgcccccugagcgccgggguguacaugggcaaccuguccagccagcagcucgaccagcggcgcgcgcugcugaacaugaucgggauguccggcagcaaccagggcgcccggacggggcgcgacggcgugguccgggugugggacgugaagaacgccgagcuccugaacaaccaguucgggaccaugccgucccugacccucgccugccugaccaagcagggccaggucgaccugaacgacgcggugcaggcccucacggaccuggggcugaucuacaccgccaaguaccccaacaccagcgaccucgaccgccugacccagucccaccccauccugaacaugaucgacacgaagaaguccagccucaacaucuccggcuacaacuucagccugggcgccgccgugaaggcgggggccugcaugcuggacggcgggaacaugcucgagaccaucaaggucagcccccagaccauggacggcauccucaagagcauccugaaggugaagaaggcccugggcauguucaucuccgacgccccgggggagcggaaccccuacgagaacauccuguacaagaucugccugagcggcgacggguggcccuacaucgccucccgcaccagcaucacgggccgggcgugggagaacaccguggucgaccucgaguccgacgggaagccccagaaggccggcagcaacggcuccaacaagagccugcaguccgccggguucaccgccggccugaccuacagccagcucaugacgcugaaggacgccaugcugcagcuggacccgaacgcgaagaccuggauggacaucgaggggcgccccgaggaccccguggagaucgcccucuaccagcccuccagcggcugcuacauccacuucuuccgggagccgaccgaccugaagcaguucaagcaggacgccaaguacucccacgggaucgacgugaccgaccuguucgccgcccagcccggccucacgagcgcggucaucgacgcccugccccgcaacauggugaucacgugccagggcuccgacgacauccgcaagcuguucgagagccaggggcggaaggacaucaagcucaucgacaucgcccugagcaagaccgacucccgcaaguacgagaacgccgugugggaccaguacaaggaccugugccacaugcacaccggcaucgucguggagaagaagaagcgcgggggcaaggaggagaucaccccgcacugcgcgcucauggacugcaucauguucgacgccgccgucagcgggggccugaacaccuccgugcugcgggccgugcucccccgggacauggucuuccgcaccagcacgccccggguggugcugugaggacuagucccuguucccagagcccacuuuuuuuucuuuuuuugaaauaaaauagccugucuuucagaucuaaaaaaaaaaaaaaaaaaaaaaaaaaaaaaaaaaaaaaaaaaaaaaaaaaaaaaaaaaaaaaaaaaaaaaaaaaaaaaaaaaaaaaaaaaaaaaaaaaaa

SEQ ID NO: 21063 - RNA, 2009 nt, Artificial Sequence
  mRNA product Design a-1 (A100) comprising derived and/or modified sequence from LASV(Josiah;Clade IV)__NP_694869__SP-IgE_NP(2-569) (opt4)
aggagagucccgcagucggcguccagcggcucugcuuguucgugugugugucguugcaggccuuauucaagcuuaccauggacuggaccuggauccuguuccugguggccgccgccaccagagugcacagcagcgccagcaaggagaucaagagcuuccuguggacccagagccugagaagagagcugagcggcuacugcagcaacaucaagcugcagguggugaaggacgcccaggcccugcugcacggccuggacuucagcgaggugagcaacgugcagagacugaugagaaaggagagaagagacgacaacgaccugaagagacugagagaccugaaccaggccgugaacaaccugguggagcugaagagcacccagcagaagagcauccugagagugggcacccugaccagcgacgaccugcugauccuggccgccgaccuggagaagcugaagagcaaggugaucagaaccgagagaccccugagcgccggcguguacaugggcaaccugagcagccagcagcuggaccagagaagagcccugcugaacaugaucggcaugagcggcggcaaccagggcgccagagccggcagagacggcguggugagagugugggacgugaagaacgccgagcugcugaacaaccaguucggcaccaugcccagccugacccuggccugccugaccaagcagggccagguggaccugaacgacgccgugcaggcccugaccgaccugggccugaucuacaccgccaaguaccccaacaccagcgaccuggacagacugacccagagccaccccauccugaacaugaucgacaccaagaagagcagccugaacaucagcggcuacaacuucagccugggcgccgccgugaaggccggcgccugcaugcuggacggcggcaacaugcuggagaccaucaaggugagcccccagaccauggacggcauccugaagagcauccugaaggugaagaaggcccugggcauguucaucagcgacacccccggcgagagaaaccccuacgagaacauccuguacaagaucugccugagcggcgacggcuggcccuacaucgccagcagaaccagcaucaccggcagagccugggagaacaccgugguggaccuggagagcgacggcaagccccagaaggccgacagcaacaacagcagcaagagccugcagagcgccggcuucaccgccggccugaccuacagccagcugaugacccugaaggacgccaugcugcagcuggaccccaacgccaagaccuggauggacaucgagggcagacccgaggaccccguggagaucgcccuguaccagcccagcagcggcugcuacauccacuucuucagagagcccaccgaccugaagcaguucaagcaggacgccaaguacagccacggcaucgacgugaccgaccuguucgccacccagcccggccugaccagcgccgugaucgacgcccugcccagaaacauggugaucaccugccagggcagcgacgacaucagaaagcugcuggagagccagggcagaaaggacaucaagcugaucgacaucgcccugagcaagaccgacagcagaaaguacgagaacgccgugugggaccaguacaaggaccugugccacaugcacaccggcguggugguggagaagaagaagagaggcggcaaggaggagaucaccccccacugcgcccugauggacugcaucauguucgacgccgccgugagcggcggccugaacaccagcgugcugagagccgugcugcccagagacaugguguucagaaccagcacccccagaguggugcugugaggacuagucccuguucccagagcccacuuuuuuuucuuuuuuugaaauaaaauagccugucuuucagaucuaaaaaaaaaaaaaaaaaaaaaaaaaaaaaaaaaaaaaaaaaaaaaaaaaaaaaaaaaaaaaaaaaaaaaaaaaaaaaaaaaaaaaaaaaaaaaaaaaaaa

SEQ ID NO: 21064 - RNA, 2009 nt, Artificial Sequence
  mRNA product Design a-1 (A100) comprising derived and/or modified sequence from LASV(LP;Clade I)__AAF86702__SP-IgE_NP(2-569) (opt4)
aggagagucccgcagucggcguccagcggcucugcuuguucgugugugugucguugcaggccuuauucaagcuuaccauggacuggaccuggauccuguuccugguggccgccgccaccagagugcacagcagcaacagcaaggagaucaagagcuuccuguggacccagagccugagaagagagcugagcggcuacugcagcaacaucaagcugcagguggugaaggacgcccaggcccugcugcacggccuggacuucagcgaggugagcaacgugcagagacugaugagaaagcagaagagagacgacgccgaccugaagagacugagagaccugaaccaggccgugaacaaccugguggagcugaagagcacccagcagaagaacgugcugagagugggcacccugagcagcgacgaccugaucacccuggccgccgaccuggagaagcugaagagcaaggugaucagaaccgagagaccccugagcagcggcguguacaugggcaaccugagcagccagcagcuggaccagagaagagcccugcugagcaugaucggcaugagcggcggcccccagggcaacagaaccggcggcgacggcguggugagagugugggacgugaagaacgccgagcugcugaacaaccaguucggcaccaugcccagccugacccuggccugccugaccaagcagggccagguggaccugaacgacgccgugcaggcccugaccgaccugggccugaucuacaccgccaaguaccccaacagcagcgaccuggacaugcugacccagagccaccccauccugggcaugguggacaccaagaagagcagccugaacaucagcggcuacaacuucagccugggcgccgccgugaaggccggcgccugcaugcuggacggcggcaacaugcuggagaccaucaaggugagcccccagaccauggacggcauccugaagagcauccugaaggugaagagaagccugggcauguucaucagcgacacccccggcgagagaaaccccuacgagaacauccuguacaagaucugccugagcggcgagggcuggcccuacaucgccagcagaaccagcaucaccggcagagccugggagaacacccugguggaccuggagagcgacaacaagccccccaagcugaacagcgccggcagcaacaagagccugcaggccgccggccugaacgccggccugaccuacagccagcugaugacccugaaggacugcaugcugcagcuggaccccagcagcaagaccuggaucgacaucgagggcagacccgaggaccccguggagaucgcccuguuccagcccagcagcggcugcuacauccacuucuucagagagcccaccgaccugaagcaguucaagcaggacgccaaguacagccacggcaucgacgugaccgaccuguucagcacccagcccggccugaccagcgccgugaucgaggcccugcccagaaacauggugcugaccugccagggcagcgacgacaucaagaagcugcuggagagccagggcagaagagacaucaagcugaucgacaucagccugagcaaggccgacagcagaaaguucgagaacgccgugugggaccaguacaaggaccugugccacaugcacaccggcguggugguggagaagaagaagagaggcggcaaggaggagaucaccccccacugcgcccugcuggacugcaucauguucgacgccgccaccaccggcagccugaacaucaccacccugagagccgugcugcccagagacaugguguucagaaccagcacccccaagguggugcugugaggacuagucccuguucccagagcccacuuuuuuuucuuuuuuugaaauaaaauagccugucuuucagaucuaaaaaaaaaaaaaaaaaaaaaaaaaaaaaaaaaaaaaaaaaaaaaaaaaaaaaaaaaaaaaaaaaaaaaaaaaaaaaaaaaaaaaaaaaaaaaaaaaaaa

SEQ ID NO: 21065 - RNA, 2009 nt, Artificial Sequence
  mRNA product Design a-1 (A100) comprising derived and/or modified sequence from LASV(803213;Clade II)__AAF86704__SP-IgE_NP(2-569) (opt4)
aggagagucccgcagucggcguccagcggcucugcuuguucgugugugugucguugcaggccuuauucaagcuuaccauggacuggaccuggauccuguuccugguggccgccgccaccagagugcacagcagcgccagcaaggaggugaagagcuuccuguggacccagagccugagaagagagcugagcggcuacugcagcaacaucaagcugcagguggugaaggacgcccaggcccugcugcacggccuggacuucagcgaggugaacaacgugcagagacugaugagaaagcagaagagagacgacggcgaccugaagagacugagagaccugaaccaggccgugaacaaccugguggagcugaagagcacccagcagaagagcauccugagagugggcacccugaccagcgacgaccugcugacccuggccgccgaccuggagaagcugaagagcaaggugaucagaaccgagagaccccugagcagcggcguguacaugggcaaccugagcacccagcagcuggagcagagaagagcccugcugaacaugaucggcauggugggcggcgcccagggcacccagcccggcagagacggcguggugagagugugggacgugaagaaccccgaccugcugaacaaccaguucggcaccaugcccagccugacccuggccugccugaccaagcagggccagguggaccugaacgacgccgugcuggcccugaccgaccugggccugaucuacaccgccaaguaccccaacagcagcgaccuggacagacugagccagagccaccccauccugaacaugguggacaccaagaagagcagccugaacaucagcggcuacaacuucagccugggcgccgccgugaaggccggcgccugcaugcuggacggcggcaacaugcuggagaccaucaaggugaccccccagaccauggacggcauccugaagagcauccugaaggugaagagaagccugggcauguucgugagcgacacccccggcgagagaaaccccuacgagaacauccuguacaagaucugccugagcggcgacggcuggcccuacaucgccagcagaaccagcaucgugggcagagccugggagaacaccaccguggaccuggagagcgacggcaagccccagaaggugggcaccgccggcagcaacaagagccugcagagcgccggcuuccccaccggccugaccuacagccagcugaugacccugaaggacagcaugaugcagcuggaccccagcgccaagaccuggaucgacaucgagggcagacccgaggaccccguggagaucgcccuguaccagcccaugagcggcugcuacauccacuucuucagagagcccaccgaccugaagcaguucaagcaggacgccaaguacagccacggcaucgacguggccgaccuguuccccgcccagcccggccugaccagcgccgugaucgaggcccugcccagaaacauggugcugaccugccagggcagcgacgacaucaagaagcugcuggacagccagggcagaagagacaucaagcugaucgacaucagccugagcaagguggacagcagaaaguucgagaacgccgugugggaccagugcaaggaccugugccacaugcacaccggcguggugguggagaagaagaagagaggcggcaaggaggagaucaccccccacugcgcccugauggacugcaucauguucgacgccgccgugagcggcggccugaacauccccgugcugagagccgugcugcccagagacaugguguucagaaccagcagccccaagguggugcugugaggacuagucccuguucccagagcccacuuuuuuuucuuuuuuugaaauaaaauagccugucuuucagaucuaaaaaaaaaaaaaaaaaaaaaaaaaaaaaaaaaaaaaaaaaaaaaaaaaaaaaaaaaaaaaaaaaaaaaaaaaaaaaaaaaaaaaaaaaaaaaaaaaaaa

SEQ ID NO: 21066 - RNA, 2012 nt, Artificial Sequence
  mRNA product Design a-1 (A100) comprising derived and/or modified sequence from LASV(GA391;Clade III)__CAA36646__SP-IgE_NP(2-570) (opt4)
aggagagucccgcagucggcguccagcggcucugcuuguucgugugugugucguugcaggccuuauucaagcuuaccauggacuggaccuggauccuguuccugguggccgccgccaccagagugcacagcagcgccagcaaggaggugagaagcuuccuguggacccagagccugagaagagagcugagcggcuacugcagcaacaucaagcugcagguggugaaggacgcccaggcccugcugcacggccuggacuucagcgaggugagcaacgugcagagacugaugagaaagcagaagagagacgacggcgaccugaagagacugagagaccugaaccaggccgugaacaaccugguggagcugaagagcacccagcagaagagcgugcugagagugggcacccugagcagcgacgaccugcugauccuggccgccgaccuggagaagcugaagagcaaggugaccagaaccgagagaccccugagcagcggcguguacaugggcaaccugagcagccagcagcuggaccagagaagagcccugcugaacaugaucggcaugaccggcgugagcggcggcggcaagggcgccagcgacggcaucgugagagugugggacgugaagaacgccgagcugcugaacaaccaguucggcaccaugcccagccugacccuggccugccugaccaagcagggccagguggaccugaacgacgccgugcaggcccugaccgaccugggccugaucuacaccgccaaguaccccaacagcagcgaccuggacagacugagccagagccaccccauccugaacaugaucgacaccaagaagagcagccugaacaucagcggcuacaacuucagccugggcgccgccgugaaggccggcgccugcaugcuggacggcggcaacaugcuggagaccaucaaggugagcccccagaccauggacggcauccugaagagcauccugaaggugaagaagagccugggcauguucgugagcgacacccccggcgagagaaaccccuacgagaacauccuguacaagaucugccugagcggcgacggcuggcccuacaucgccagcagaaccagcaucgugggcagagccugggagaacaccgugguggaccuggagcaggacaacaagccccagaagaucggcaacggcggcagcaacaagagccugcagagcgccggcuucgccgccggccugaccuacagccagcugaugacccugaaggacuucaagugcuucaaccugauccccaacgccaagaccuggauggacaucgagggcagacccgaggaccccguggagaucgcccuguaccagcccagcagcggcugcuacgugcacuucuucagagagcccaccgaccugaagcaguucaagcaggacgccaaguacagccacggcaucgacgugaccgaccuguucgccgcccagcccggccugaccagcgccgugaucgaggcccugcccagaaacauggugaucaccugccagggcagcgaggacaucagaaagcugcuggagagccagggcagaagagacaucaagcugaucgacaucacccugagcaaggccgacagcagaaaguucgagaacgccgugugggaccaguucaaggaccugugccacaugcacaccggcguggugguggagaagaagaagagaggcggcaaggaggagaucaccccccacugcgcccugauggacugcaucauguucgacgccgccgugagcggcggccuggacgccaaggugcugagaguggugcugcccagagacaugguguucagaaccagcacccccaagguggugcugugaggacuagucccuguucccagagcccacuuuuuuuucuuuuuuugaaauaaaauagccugucuuucagaucuaaaaaaaaaaaaaaaaaaaaaaaaaaaaaaaaaaaaaaaaaaaaaaaaaaaaaaaaaaaaaaaaaaaaaaaaaaaaaaaaaaaaaaaaaaaaaaaaaaaa

SEQ ID NO: 21067 - RNA, 2009 nt, Artificial Sequence
  mRNA product Design a-1 (A100) comprising derived and/or modified sequence from LASV(AV;Clade V)__CCA30315__SP-IgE_NP(2-569) (opt4)
aggagagucccgcagucggcguccagcggcucugcuuguucgugugugugucguugcaggccuuauucaagcuuaccauggacuggaccuggauccuguuccugguggccgccgccaccagagugcacagcagcgccagcaaggaggugaagagcuuccuguggacccagagccugagaagagagcugagcggcuacugcagcaacaucaagcugcagguggugaaggacgcccaggcccugcugcacggccuggacuucagcgaggugagcaacgugcagagacugaugagaaagcagagaagagacgacagcgaccugaagagacugagagaccugaaccaggccgugaacaaccugguggagcugaagagcacccagcagaagagcgugcugagagugggcacccugagcagcgacgaccugcugacccuggccgccgaccuggagaagcugaagagcaaggugaccagaaccgagagaccccugagcagcggcguguacaugggcaaccugagcagccagcagcuggaccagagaagagcccugcugaaccugaucggcaugaccaacggcagccagggcagccaggccggcagagacggcguggugagagugugggacgugaagaacgccgagcugcugaacaaccaguucggcaccaugcccagccugacccuggccugccugaccaagcagggccagguggaccugaacgacguggugcaggcccugaccgaccugggccugaucuacaccgccaaguaccccaacaccagcgaccuggacagacugacccagagccaccccauccugaacaugaucgacaccaagaagagcagccugaacaucagcggcuacaacuucagccugggcgccgccgugaaggccggcgccugcaugcuggacggcggcaacaugcuggagaccaucaaggugagcccccagagcauggacggcauccugaagagcauccugaaggugaagagagcccugggcauguucgugagcgacacccccggcgagagaaaccccuacgagaacauccuguacaagaucugccugagcggcgacggcuggcccuacaucgccagcagaaccagcaucgugggcagagccugggagaacaccgugguggaccuggagaccgacggcaagccccagaagaucggcagcggcaacagcaacaagagccugcagagcgccggcuucagcgccggccugaccuacagccagcugaugacccugaaggacgccaugcugcagcuggaccccaacgccaagaccuggauggacaucgagggcagacccgaggaccccguggagguggcccuguaccagcccaucagcggcugcuacauccacuucuucagagagcccaccgaccugaagcaguucaagcaggacgccaaguacagccacggcaucgacaucgccgaccuguucgccgcccagcccggccugaccagcgccgugaucgaggcccugcccagaaacauggugaucaccugccagggcagcgaggacaucaagaagcugcuggagagccagggcagaaaggacaucaagcugaucgacaucgcccugagcaagaucgacagcagaaaguucgagaacgccgugugggaccaguacaaggaccugugccacaugcacaccggcguggugguggagaagaagaagagaggcggcaaggaggagaucaccccccacugcgcccugauggacugcaucauguucgacgccgccgugagcggcggccugaacacccuggugcugagagccgugcugcccagagacaugguguucagaaccagcacccccagaguggugcugugaggacuagucccuguucccagagcccacuuuuuuuucuuuuuuugaaauaaaauagccugucuuucagaucuaaaaaaaaaaaaaaaaaaaaaaaaaaaaaaaaaaaaaaaaaaaaaaaaaaaaaaaaaaaaaaaaaaaaaaaaaaaaaaaaaaaaaaaaaaaaaaaaaaaa

SEQ ID NO: 21068 - RNA, 2009 nt, Artificial Sequence
  mRNA product Design a-1 (A100) comprising derived and/or modified sequence from LASV(Togo/2016/7082;Clade VI)__AMR44578__SP-IgE_NP(2-569) (opt4)
aggagagucccgcagucggcguccagcggcucugcuuguucgugugugugucguugcaggccuuauucaagcuuaccauggacuggaccuggauccuguuccugguggccgccgccaccagagugcacagcagcaacagcaaggaggugaagagcuuccuguggacccagagccugagaagagagcugagcggcuacugcagcaacaucaagcugcagguggugaaggacgcccaggcccugcugcacggccuggacuucagcgaggugagcaacgugcagagacugaugagaaagcagaagagagacgacggcgaccugaagagacugagagaccugaaccaggccgugaacaaccugguggagcugaagagcgugcagcagaagagcauccugagagugggcacccugaccagcgacgaccugcugacccuggccgccgaccuggagaagcugaagagcaaggugaccagaaccgagagaccccugagcagcggcguguacaugggcaaccugagcagccagcagcuggaccagagaagagcccugcugagcaugaucggcaugagcggcggcaaccagaacagccagcccaagggcgacggcguggugagagugugggacgugaagaacgccgaccugcugaacaaccaguucggcaccaugcccagccugacccuggccugccugaccaagcagggccagguggaccugaacgacgccgugcaggcccugaccgaccugggccugaucuacaccgccaaguaccccaacagcagcgaccuggacagacugagccagagccaccccauccugaacaugaucgacaccaagaagagcagccugaacaucagcggcuacaacuucagccugggcgccgccaucaagaccggcgccugcaugcuggacggcggcaacaugcuggagaccaucaaggugaccccccagaccauggacggcauccugaagagcauccugaaggugaagagaagccugggcauguucaucagcgacacccccggcgagagaaaccccuacgagaacauccuguacaagaucugccugagcggcgacggcuggcccuacaucgccagcagaaccgccaucaucggcagagccugggagaacaccgugguggaccuggagagcgacagcaagccccagaagaucggcagcaacggcagcaacaagagccugcagagcgccggcuucgcccccggccugaccuacagccagcugaugacccugaaggacagcaugcugcagcuggaccccaacgccaagaccuggaucgacaucgagggcagacccgaggaccccguggagguggcccuguuccagcccaucagcggcugcuacauccacuucuucagagagcccaccgaccugaagcaguucaagcaggacgccaaguacagccacggcaucgacgugaccgaccuguucgccgcccagcccggccugaccagcgccgugaucgaggcccugcccagaaacauggugcugaccugccagggcagcgacgacaucaagaagcugcuggacagccagggcagaagagacaucaagcugaucgacgugagccugaacaagaucgacagcagaaaguucgagaacgccgugugggaccaguacaaggaccugugccacaugcacaccggcguggugguggagaagaagaagaagggcggcaaggaggagaucaccccccacugcgcccugcuggacugcaucauguucgacgccgccgugagcggcggccugaacgccaccgugcugagagccgugcugcccagagacaugguguucagaaccagcagccccaagguggugcugugaggacuagucccuguucccagagcccacuuuuuuuucuuuuuuugaaauaaaauagccugucuuucagaucuaaaaaaaaaaaaaaaaaaaaaaaaaaaaaaaaaaaaaaaaaaaaaaaaaaaaaaaaaaaaaaaaaaaaaaaaaaaaaaaaaaaaaaaaaaaaaaaaaaaa

SEQ ID NO: 21069 - RNA, 2009 nt, Artificial Sequence
  mRNA product Design a-1 (A100) comprising derived and/or modified sequence from LASV(KAK-428;Clade n.d. (VII))__ANH09741__SP-IgE_NP(2-569) (opt4)
aggagagucccgcagucggcguccagcggcucugcuuguucgugugugugucguugcaggccuuauucaagcuuaccauggacuggaccuggauccuguuccugguggccgccgccaccagagugcacagcagcaacagcaaggaggugaagagcuuccuguggacccagagccugagaagagagcugagcggcuacugcaccaacaucaagcugcagguggugaaggacgcccaggcccugcugcacggccuggacuucagcgaggugagcaacgugcagagacugaugagaaagcagaagagagacgacaacgaccugaagagacugagagaccugaaccaggccgugaacaaccugguggagcugaagagcgugcagcagaagagcgugcugaaggugggcacccugaacagcgacgaccugcugacccuggccgccgaccuggagaagcugaagagcaagguggugagaaccgagagaccccugagcagcggcguguacaugggcaaccugagcagccagcagcuggaccagagaagagcccugcugaacaugaucggcauggccggcggcagccagggcaaccagcccagcagagacggcguggugagagugugggacgugaagaacgccgaccugcugaacaaccaguucggcaccaugcccagccugacccuggccugccugaccaagcagggccagguggaccugaacgacguggugcuggcccugaccgaccugggccugaucuacaccgccaaguaccccaacagcagcgaccuggacagacugagccagaaccaccccgugcugaacaugaucgacgugaacaagagcagccugaacaucagcggcuacaacuucagccugggcgccgccgugaaggccggcgccugcaugcuggacggcggcaacaugcuggagaccaucaagaucagcccccagaccguggacggcauccugaagagcauccugaaggugaagagagcccugggcauguucgugagcgacacccccggcgagagaaaccccuacgagaacauccuguacaaggugugccugagcggcaacggcuggcccuacaucgccagcagaaccagcaucgugggcagagccugggagaacaccgugguggaccuggagagcaacaagaaccagcccaaggugggcaacaacggcagcaacaagaugcugcagagcagcggcuucgccaccggccugaccuacagccagcugaugacccugagagacagcaugcugcagcuggaccccaccgccaagaccuggaucgacaucgagggcagacccgaggaccccguggagcuggcccuguuccagcccagcagcggcugcuacauccacuucuucagagagcccaccgaccugaagcaguucaagcaggacgccaaguacagccacggcaucgacgugaacgaccuguucagcgcccagcccggccugaccagcgccgugcuggaggcccugcccagaaacauggugcugaccugccagggcagcgacgacaucagaaagcugcuggacagccaggacagaaaggacaucaagcugaucgacaucagccugagcaaggccgacgccagaaaguucgagaacgacgugugggaccaguucaaggaccugugccacaugcacaccggcaucgugguggagaagaagaagaagggcggcaagcaggagaugaccccccacugcgcccugcuggacugcaucauguucgacgccgccgugagcggcggccugaacgugcccacccugagagccgugcugcccaccgacaugguguucagaaccaucaccaccaagguggugcugugaggacuagucccuguucccagagcccacuuuuuuuucuuuuuuugaaauaaaauagccugucuuucagaucuaaaaaaaaaaaaaaaaaaaaaaaaaaaaaaaaaaaaaaaaaaaaaaaaaaaaaaaaaaaaaaaaaaaaaaaaaaaaaaaaaaaaaaaaaaaaaaaaaaaa

SEQ ID NO: 21070 - RNA, 2009 nt, Artificial Sequence; identical to SEQ ID NO: 21064
  mRNA product Design a-1 (A100) comprising derived and/or modified sequence from LASV(Pinneo-NIG-1969;Clade I)__AIT17837__SP-IgE_NP(2-569) (opt4)

SEQ ID NO: 21071 - RNA, 2009 nt, Artificial Sequence
  mRNA product Design a-1 (A100) comprising derived and/or modified sequence from LASV(ISTH0009-NIG-2011;Clade II)__AIT17405__SP-IgE_NP(2-569) (opt4)
aggagagucccgcagucggcguccagcggcucugcuuguucgugugugugucguugcaggccuuauucaagcuuaccauggacuggaccuggauccuguuccugguggccgccgccaccagagugcacagcagcgugagcaaggaggugaagagcuuccuguggacccagagccugagaagagagcugagcggcuacugcagcaacaucaagcugcagguggugaaggacgcccaggcccugcugcacggccuggacuucagcgaggugagcaacgugcagagacugaugagaaagcagaagagagacgacagcgaccugaagagacugagagaccugaaccaggccgugaacaaccugguggagcugaagagcacccagcagaagagcauccugagagugggcacccugaccagcgacgaccugcugacccuggccgccgaccuggagaagcugaagagcaaggugaucagaaccgagagaccccugagcagcggcguguacaugggcaaccugagcacccagcagcuggagcagagaagagcccugcugaacaugaucggcauggugggcggcgcccagggcacccagcccggcagagacggcguggugagagugugggacgugaagaaccccgaccugcugaacaaccaguucggcaccaugcccagccugacccuggccugccugaccaagcagggccagguggaccugaacgacgccgugcuggcccugaccgaccugggccugaucuacaccgccaaguaccccaacagcagcgaccuggacagacugagccagagccaccccauccugaacaugguggacaucaagaagagcagccugaacaucagcggcuacaacuucagccugggcgccgccgugaaggccggcgccugcaugcuggacggcggcaacaugcuggagaccaucaaggugaccccccagaccauggacggcauccugaagagcauccugaaggugaagagaagccugggcauguucgugagcgacacccccggcgagagaaaccccuacgagaacauccuguacaagaucugccugagcggcgacggcuggcccuacaucgccagcagaaccagcaucgugggcagagccugggagaacaccaccguggaccuggagagcgacggcaagccccagaaggugggcagcgccggcagcaacaagagccugcagagcgccggcuuccccaccggccugaccuacagccagcugaugacccugaaggacagcaugaugcagcuggaccccagcgccaagaccuggaucgacaucgagggcagacccgaggaccccguggagaucgcccuguaccagcccaugagcggcugcuacauccacuucuucagagagcccaccgaccugaagcaguucaagcaggacgccaaguacagccacggcaucgacguggccgaccuguuccccgcccagcccggccugaccagcgccgugaucgaggcccugcccagaaacauggugcugaccugccagggcagcgacgacaucaagagacugcuggacagccagggcagaagagacaucaagcugaucgacaucgcccugagcaaggccgacagcagaagauucgagaacgccgugugggaccagugcaaggaccugugccacaugcacaccggcguggugguggagaagaagaagagaggcggcaaggaggagaucaccccccacugcgcccugauggacugcaucauguacgacgccgccgugagcggcggccugaacauccccgugcugagagccgugcugcccagagacaugguguucagaaccagcagccccaagguggugcugugaggacuagucccuguucccagagcccacuuuuuuuucuuuuuuugaaauaaaauagccugucuuucagaucuaaaaaaaaaaaaaaaaaaaaaaaaaaaaaaaaaaaaaaaaaaaaaaaaaaaaaaaaaaaaaaaaaaaaaaaaaaaaaaaaaaaaaaaaaaaaaaaaaaaa

SEQ ID NO: 21072 - RNA, 2009 nt, Artificial Sequence
  mRNA product Design a-1 (A100) comprising derived and/or modified sequence from LASV(ISTH2010-NIG-2012;Clade II)__AIT17483__SP-IgE_NP(2-569) (opt4)
aggagagucccgcagucggcguccagcggcucugcuuguucgugugugugucguugcaggccuuauucaagcuuaccauggacuggaccuggauccuguuccugguggccgccgccaccagagugcacagcagcgccagcaaggaggugaagagcuuccuguggacccagagccugagaagagagcugagcggcuacugcagcaacaucaagcugcagguggugaaggacgcccaggcccugcugcacggccuggacuucagcgaggugagcaacgugcagagacugaugagaaagcagaagagagacgacagcgaccugaagagacugagagaccugaaccaggccgugaacaaccugguggagcugaagagcacccagcagaagagcauccugagagugggcacccugaccagcgacgaccugcugacccuggccgccgaccuggagaagcugaagagcaaggugaucagaaccgagagaccccugagcagcggcguguacaugggcaaccugagcacccagcagcuggagcagagaagagcccugcugaaccugaucggcauggugggcggcgcccagggcacccagcccggcagagacggcguggugagagugugggacgugaagaaccccgaccugcugaacaaccaguucggcaccaugcccagccugacccuggccugccugaccaagcagggccagguggaccugaacgacgccgugcuggcccugaccgaccugggccugaucuacaccgccaaguaccccaacagcagcgaccuggacagacugagccagagccaccccauccugaacaugguggacaccaagaagagcagccugaacaucagcggcuucaacuucagccugggcgccgccgugaaggccggcgccugcaugcuggacggcggcaacaugcuggagaccaucaaggugaccccccagaccauggacggcauccugaagagcauccugaaggugaagaagagccugggcauguucgugagcgacacccccggcgagagaaaccccuacgagaacauccuguacaagaucugccugagcggcgacggcuggcccuacaucgccagcagaaccagcaucgugggcagagccugggagaacaccaccguggaccuggagagcgacggcaagccccacaaggugggcaccgccggcagcaacaagagccugcagagcgccggcuuccccaccggccugaccuacagccagcugaugacccugaaggacagcaugaugcagcuggaccccagcgccaagaccuggaucgacaucgagggcagacccgaggaccccguggagaucgcccuguaccagcccaugagcggcugcuacauccacuucuucagagagcccaccgaccugaagcaguucaagcaggacgccaaguacagccacggcaucgacguggccgaccuguuccccgcccagcccggccugaccagcgccgugaucgaggcccugcccagaaacauggugcugaccugccagggcagcgacgacaucaagagacugcuggacagccagggcagaagagacaucaagcugaucgacaucgcccugagcaaggccgacagcagaagauucgagaacgccgugugggaccagugcaaggaccugugccacaugcacaccggcguggugguggagaagaagaagagaggcggcaaggaggagaucaccccccacugcgcccugauggacugcaucauguacgacgccgccgugagcggcggccugaacauccccgugcugagagccgugcugcccagagacaugguguucagaaccagcagccccaagguggugcugugaggacuagucccuguucccagagcccacuuuuuuuucuuuuuuugaaauaaaauagccugucuuucagaucuaaaaaaaaaaaaaaaaaaaaaaaaaaaaaaaaaaaaaaaaaaaaaaaaaaaaaaaaaaaaaaaaaaaaaaaaaaaaaaaaaaaaaaaaaaaaaaaaaaaa

SEQ ID NO: 21073 - RNA, 2009 nt, Artificial Sequence
  mRNA product Design a-1 (A100) comprising derived and/or modified sequence from LASV(Lassa virus/H.sapiens-wt/NGA/2015/ISTH_0543;Clade II)__AVO03640__SP-IgE_NP(2-569) (opt4)
aggagagucccgcagucggcguccagcggcucugcuuguucgugugugugucguugcaggccuuauucaagcuuaccauggacuggaccuggauccuguuccugguggccgccgccaccagagugcacagcagcgccagcaaggaggugaagagcuuccuguggacccagagccugagaagagagcugagcggcuacugcagcaacaucaagcugcagguggugaaggacgcccaggcccugcugcacggccuggacuucagcgaggugagcaacgugcagagacugaugagaaagcagaagagagacgacagcgaccugaagagacugagagaccugaaccaggccgugaacaaccugguggagcugaagagcacccagcagaagagcauccugagagugggcacccugaccagcgacgaccugcugacccuggccgccgaccuggagaagcugaagagcaaggugaucagaaccgagagaccccugagcagcggcguguacaugggcaaccugagcacccagcagcuggagcagagaagagcccugcugaacaugaucggcauggugggcggcgcccagggcacccagcccggcagagacggcguggugagagugugggacgugaagaaccccgaccugcugaacaaccaguucggcaccaugcccagccugacccuggccugccugaccaagcagggccagguggaccugaacgacgccgugcuggcccugaccgaccugggccugaucuacaccgccaaguaccccaacagcagcgaccuggacagacugagccagagccaccccauccugaacaugguggacaccaagaagagcagccugaacaucagcggcuacaacuucagccugggcgccgccgugaaggccggcgccugcaugcuggacggcggcaacaugcuggagaccaucaaggugaccccccagaccauggacggcauccugaagagcauccugaaggugaagaagagccugggcauguucgugagcgacacccccggcgagagaaaccccuacgagaacauccuguacaagaucugccugagcggcgacggcuggcccuacaucgccagcagaaccagcaucgugggcagagccugggagaacaccaccguggaccuggagagcgacggcaagccccagaaggugggcagcgccggcagcaacaagagccugcagagcgccggcuuccccaccggccugaccuacagccagcugaugacccugaaggacagcaugaugcagcuggaccccagcgccaagaccuggaucgacaucgagggcagacccgaggaccccguggagaucgcccuguaccagcccaugagcggcugcuacauccacuucuucagagagcccaccgaccugaagcaguucaagcaggacgccaaguacagccacggcaucgacguggccgaccuguuccccgcccagcccggccugaccagcgccgugaucgaggcccugcccagaaacauggugcugaccugccagggcagcgacgacaucaagagacugcuggacagccagggcagaaaggacaucaagcugaucgacaucgcccugagcaaggccgacagcagaagauucgagaacgccgugugggaccagugcaaggaccugugccacaugcacaccggcguggugguggagaagaagaagagaggcggcaaggaggagaucaccccccacugcgcccugauggacugcaucauguacgacgccgccgugagcggcggccugaacauccccgugcugagagccgugcugcccagagacaugguguucagaaccagcagccccaagguggugcugugaggacuagucccuguucccagagcccacuuuuuuuucuuuuuuugaaauaaaauagccugucuuucagaucuaaaaaaaaaaaaaaaaaaaaaaaaaaaaaaaaaaaaaaaaaaaaaaaaaaaaaaaaaaaaaaaaaaaaaaaaaaaaaaaaaaaaaaaaaaaaaaaaaaaa

SEQ ID NO: 21074 - RNA, 2009 nt, Artificial Sequence
  mRNA product Design a-1 (A100) comprising derived and/or modified sequence from LASV(Lassa virus/H.sapiens-wt/NGA/2016/ISTH_0009;Clade II)__AVO03572__SP-IgE_NP(2-569) (opt4)
aggagagucccgcagucggcguccagcggcucugcuuguucgugugugugucguugcaggccuuauucaagcuuaccauggacuggaccuggauccuguuccugguggccgccgccaccagagugcacagcagcgccagcaaggaggugaagagcuuccuguggacccagagccugagaagagagcugagcggcuacugcagcaacaucaagcugcagguggugaaggacgcccaggcccugcugcacggccuggacuucagcgaggugagcaacgugcagagacugaugagaaagcagaagagagacgacagcgaccugaagagacugagagaccugaaccaggccgugaacaaccugguggagcugaagagcacccagcagaagagcauccugagagugggcacccugaccagcgacgaccugcugacccuggccgccgaccuggagaagcugaagagcaaggugaucagaaccgagagaccccugagcagcggcguguacaugggcaaccugagcacccagcagcuggagcagagaagagcccugcugaacaugaucggcauggugggcggcgcccagggcacccagcccggcagagacggcguggugagagugugggacgugaagaaccccgaccugcugaacaaccaguucggcaccaugcccagccugacccuggccugccugaccaagcagggccagguggaccugaacgacgccgugcuggcccugaccgaccugggccugaucuacaccgccaaguaccccaacagcagcgaccuggacagacugagccagagccaccccauccugaacaugguggacaccaagaagagcagccugaacaucagcggcuacaacuucagccugggcgccgccgugaaggccggcgccugcaugcuggacggcggcaacaugcuggagaccaucaaggugaccccccagaccauggacggcauccugaagagcauccugaaggugaagaagagccugggcauguucgugagcgacacccccggcgagagaaaccccuacgagaacauccuguacaagaucugccugagcggcgacggcuggcccuacaucgccagcagaaccagcaucgugggcagagccugggagaacaccaccguggaccuggagagcgacggcaagccccagaaggugggcagcgccggcagcaacaagagccugcagagcgccggcuuccccaccggccugaccuacagccagcugaugacccugaaggacagcaugaugcagcuggaccccagcgccaagaccuggaucgacaucgagggcagacccgaggaccccguggagaucgcccuguaccagcccaugagcggcugcuacauccacuucuucagagagcccaccgaccugaagcaguucaagcaggacgccaaguacagccacggcaucgacguggccgaccuguuccccgcccagcccggccugaccagcgccgugaucgaggcccugcccagaaacauggugcugaccugccagggcagcgacgacaucaagagacugcuggacagccagggcagaagagacaucaagcugaucgacaucgcccugagcaaggccgacagcagaagauucgagaacgccgugugggaccagugcaaggaccugugccacaugcacaccggcguggugguggagaagaagaagagaggcggcaaggaggagaucaccccccacugcgcccugauggacugcaucauguacgacgccgccgugagcggcggccugaacauccccgugcugagagccgugcugcccagagacaugguguucagaaccagcagccccaagguggugcugugaggacuagucccuguucccagagcccacuuuuuuuucuuuuuuugaaauaaaauagccugucuuucagaucuaaaaaaaaaaaaaaaaaaaaaaaaaaaaaaaaaaaaaaaaaaaaaaaaaaaaaaaaaaaaaaaaaaaaaaaaaaaaaaaaaaaaaaaaaaaaaaaaaaaa

SEQ ID NO: 21075 - RNA, 2009 nt, Artificial Sequence
  mRNA product Design a-1 (A100) comprising derived and/or modified sequence from LASV(Lassa virus/H.sapiens-wt/NGA/2016/ISTH_0017;Clade II)__AVO03568__SP-IgE_NP(2-569) (opt4)
aggagagucccgcagucggcguccagcggcucugcuuguucgugugugugucguugcaggccuuauucaagcuuaccauggacuggaccuggauccuguuccugguggccgccgccaccagagugcacagcagcgccagcaaggaggugaagagcuuccuguggacccagagccugagaagagagcugagcggcuacugcagcagcaucaagcugcagguggugaaggacgcccaggcccugcugcacggccuggacuucagcgaggugagcaacgugcagagacugaugagaaagcagaagagagacgacagcgaccugaagagacugagagaccugaaccaggccgugaacaaccugguggagcugaagagcacccagcagaagagcauccugagagugggcacccugaccagcgacgaccugcugacccuggccgccgaccuggagaagcugaagagcaaggugaucagaaccgagagaccccugagcagcggcguguacaugggcaaccugagcacccagcagcuggagcagagaagagcccugcugaacaugaucggcauggccggcggcgcccagggcacccagcccggcagagacggcguggugagagugugggacgugaagaaccccgaccugcugaacaaccaguucggcaccaugcccagccugacccuggccugccugaccaagcagggccagguggaccugaacgacgccgugcuggcccugaccgaccugggccugaucuacaccgccaaguaccccaacagcagcgaccuggacagacugagccagagccaccccauccugaacaugguggacaccaagaagagcagccugaacaucagcggcuacaacuucagccugggcgccgccgugaaggccggcgccugcaugcuggacggcggcaacaugcuggagaccaucaaggugaccccccagaccauggacggcauccugaagagcauccugaaggugaagagaagccugggcauguucgugagcgacgcccccggcgagagaaaccccuacgagaacauccuguacaagaucugccugagcggcgacggcuggcccuacaucgccagcagaaccagcaucgugggcagagccugggagaacaccaccguggaccuggagagcgacggcaagccccagaaggugggcgccaccggcagcaacaagagccugcagagcgccggcuuccccaccggccugaccuacagccagcugaugacccugaaggacagcaugaugcagcuggaccccagcgccaagaccuggaucgacaucgagggcagacccgaggaccccguggagguggcccuguaccagcccgugagcggcugcuacauccacuucuucagagagcccaccgaccugaagcaguucaagcaggacgccaaguacagccacggcaucgacguggccgaccuguuccccgcccagcccggccugaccagcgccgugaucgaggcccugcccagaaacauggugcugaccugccagggcagcgacgacaucaagaagcugcuggacagccagggcagaaaggacaucaagcugaucgacaucgcccugagcaaggccgacagcagaagauucgagaacgccgugugggaccagugcaaggaccugugccacaugcacaccggcguggugguggagaagaagaagagaggcggcaaggaggagaucaccccccacugcgcccugauggacugcaucauguacgacgccgccgugagcggcggccugaacauccccgugcugagagccgugcugcccagagacaugguguucagaaccagcagccccaagguggugcugugaggacuagucccuguucccagagcccacuuuuuuuucuuuuuuugaaauaaaauagccugucuuucagaucuaaaaaaaaaaaaaaaaaaaaaaaaaaaaaaaaaaaaaaaaaaaaaaaaaaaaaaaaaaaaaaaaaaaaaaaaaaaaaaaaaaaaaaaaaaaaaaaaaaaa

SEQ ID NO: 21076 - RNA, 2009 nt, Artificial Sequence
  mRNA product Design a-1 (A100) comprising derived and/or modified sequence from LASV(Lassa virus/H.sapiens-wt/NGA/2018/ISTH_0959;Clade II)__AVV65100__SP-IgE_NP(2-569) (opt4)
aggagagucccgcagucggcguccagcggcucugcuuguucgugugugugucguugcaggccuuauucaagcuuaccauggacuggaccuggauccuguuccugguggccgccgccaccagagugcacagcagcgccagcaaggaggugaagagcuuccuguggacccagagccugagaagagagcugagcggcuacugcagcaacaucaagcugcagguggugaaggacgcccaggcccugcugcacggccuggacuucagcgaggugagcaacgugcagagacugaugagaaagcagaagagagacgacagcgaccugaagagacugagagaccugaaccaggccgugaacaaccugguggagcugaagagcacccagcagaagagcauccugagagugggcacccugaccagcgacgaccugcugacccuggccgccgaccuggagaagcugaagagcaaggugaucagaaccgagagaccccugagcagcggcguguacaugggcaaccugagcacccagcagcuggagcagagaagagcccugcugaaccugaucggcauggugggcggcgcccagggcacccagcccggcagagacggcguggugagagugugggacgugaagaaccccgaccugcugaacaaccaguucggcaccaugcccagccugacccuggccugccugaccaagcagggccagguggaccugaacgacguggugcuggcccugaccgaccugggccugaucuacaccgccaaguaccccaacagcagcgaccuggacagacugagccagagccaccccauccugaacaugguggacaccaagaagagcagccugaacaucagcggcuucaacuucagccugggcgccgccgugaaggccggcgccugcaugcuggacggcggcaacaugcuggagaccaucaaggugaccccccagaccauggacggcauccugaagagcauccugaaggugaagaagagccugggcauguucgugagcgacacccccggcgagagaaaccccuacgagaacauccuguacaagaucugccugagcggcgacggcuggcccuacaucgccagcagaaccagcaucgugggcagagccugggagaacaccaccguggaccuggagagcgacggcaagccccacaaggugggcaccgccggcagcaacaagagccugcagagcgccggcuuccccaccggccugaccuacagccagcugaugacccugaaggacagcaugaugcagcuggaccccagcgccaagaccuggaucgacaucgagggcagacccgaggaccccguggagaucgcccuguaccagcccaugagcggcugcuacauccacuucuucagagagcccaccgaccugaagcaguucaagcaggacgccaaguacagccacggcaucgacguggccgaccuguuccccgcccagcccggccugaccagcgccgugaucgaggcccugcccagaaacauggugcugaccugccagggcagcgacgacaucaagagacugcuggacagccagggcagaaaggacaucaagcugaucgacaucgcccugagcaagaccgacagcagaagauucgagaacgccgugugggaccagugcaaggaccugugccacaugcacaccggcguggugguggagaagaagaagagaggcggcaaggaggagaucaccccccacugcgcccugauggacugcaucauguacgacgccgccgugagcggcggccugaacauccccgugcugagagccgugcugcccagagacaugguguucagaaccagcagccccaagguggugcugugaggacuagucccuguucccagagcccacuuuuuuuucuuuuuuugaaauaaaauagccugucuuucagaucuaaaaaaaaaaaaaaaaaaaaaaaaaaaaaaaaaaaaaaaaaaaaaaaaaaaaaaaaaaaaaaaaaaaaaaaaaaaaaaaaaaaaaaaaaaaaaaaaaaaa

SEQ ID NO: 21077 - RNA, 2009 nt, Artificial Sequence
  mRNA product Design a-1 (A100) comprising derived and/or modified sequence from LASV(LASV003-NIG-2008;Clade II)__AIT17581__SP-IgE_NP(2-569) (opt4)
aggagagucccgcagucggcguccagcggcucugcuuguucgugugugugucguugcaggccuuauucaagcuuaccauggacuggaccuggauccuguuccugguggccgccgccaccagagugcacagcagcgccagcaaggaggugaagagcuuccuguggacccagagccugagaagagagcugagcggcuacugcagcagcaucaagcugcagguggugaaggacgcccaggcccugcugcacggccuggacuucagcgaggugagcaacgugcagagacugaugagaaagcagaagagagacgacagcgaccugaagagacugagagaccugaaccaggccgugaacaaccugguggagcugaagagcacccagcagaagagcgugcugagagugggcacccugaccagcgacgaccugcugacccuggccgccgaccuggagaagcugaagagcaaggugaucagaaccgagagaccccugagcagcggcguguacaugggcaaccugagcgcccagcagcuggagcagagaagaacccugcugaacaugaucggcauggugggcggcgcccagggcacccagcccggcagagacggcguggugagagugugggacgugaagaaccccgaccugcugaacaaccaguucggcaccaugcccagccugacccuggccugccugaccaagcagggccagguggaccugaacgacguggugcuggcccugaccgaccugggccugaucuacaccgccaaguaccccaacagcagcgaccuggacagacugagccagagccaccccauccugagcaugguggacaccaagaagagcagccugaacaucagcggcuacaacuucagccugggcgccgccgugaaggccggcgccugcaugcuggacggcggcaacaugcuggagaccaucaaggugaccccccagaccauggacggcauccugaagagcauccugaaggugaagaagagccugggcauguucgugagcgacacccccggcgagagaaaccccuacgagaacauccuguacaagaucugccugagcggcgacggcuggcccuacaucgccagcagaaccagcaucgugggcagagccugggagaacaccaccguggaccuggagagcgacggcaagccccagaaggugggcaccgccggcagcaacaagagccugcagagcgccggcuuccccaccggccugaccuacagccagcugaugacccugaaggacagcaugaugcagcuggaccccagcgccaagaccuggaucgacaucgagggcagacccgaggaccccguggagaucgcccuguaccagcccaugagcggcugcuacauccacuucuucagagagcccaccgaccugaagcaguucaagcaggacgccaaguacagccacggcaucgacgugaccgaccuguuccccgcccagcccggccugaccagcgccgugaucgaggcccugcccagaaacauggugcugaccugccagggcagcgacgacaucaagagacugcuggacagccagggcagaagagacaucaagcugaucgacaucgcccugagcaaggccgacagcagaagauucgagaacgccgugugggaccagugcaaggaccugugccacaugcacaccggcguggugguggagaagaagaagagaggcggcaaggaggagaucaccccccacugcgcccugauggacugcaucauguacgacgccgccgugagcggcggccugaacauccccgugcugagagccgugcugcccagagacaugguguucagaaccagcagccccaagguggugcugugaggacuagucccuguucccagagcccacuuuuuuuucuuuuuuugaaauaaaauagccugucuuucagaucuaaaaaaaaaaaaaaaaaaaaaaaaaaaaaaaaaaaaaaaaaaaaaaaaaaaaaaaaaaaaaaaaaaaaaaaaaaaaaaaaaaaaaaaaaaaaaaaaaaaa

SEQ ID NO: 21078 - RNA, 2009 nt, Artificial Sequence
  mRNA product Design a-1 (A100) comprising derived and/or modified sequence from LASV(LASV035-NIG-2009;Clade II)__AIT17589__SP-IgE_NP(2-569) (opt4)
aggagagucccgcagucggcguccagcggcucugcuuguucgugugugugucguugcaggccuuauucaagcuuaccauggacuggaccuggauccuguuccugguggccgccgccaccagagugcacagcagcgccagcaaggaggugaagagcuuccuguggacccagagccugagaagagagcugagcggcuacugcagcagcaucaagcugcagguggugaaggacgcccaggcccugcugcacggccuggacuucagcgaggugagcaacgugcagagacugaugagaaagcagaagagagacgacagcgaccugaagagacugagagaccugaaccaggccgugaacaaccugguggagcugaagagcacccagcagaagagcauccugagagugggcacccugaccagcgacgaccugcugacccuggccgccgaccuggagaagcugaagagcaaggugaucagaaccgagagaccccugagcagcggcguguacaugggcaaccugagcgcccagcagcuggagcagagaagagcccugcugaacaugaucggcauggugggcggcgcccagggcacccagcccggcagagacggcguggugagagugugggacgugaagaaccccgaccugcugaacaaccaguucggcaccaugcccagccugacccuggccugccugaccaagcagggccagguggaccugaacgacgccgugcuggcccugaccgaccugggccugaucuacaccgccaaguaccccaacagcagcgaccuggacagacugagccagagccaccccauccugaacaugguggacaccaagaagagcagccugaacaucagcggcuacaacuucagccugggcgccgccgugaaggccggcgccugcaugcuggacggcggcaacaugcuggagaccaucaaggugaccccccagaccauggacggcauccugaagagcauccugaaggugaagagaagccugggcauguucgugagcgacacccccggcgagagaaaccccuacgagaacauccuguacaagaucugccugagcggcgacggcuggcccuacaucgccagcagaaccagcaucgugggcagagccugggagaacaccaccguggaccuggagagcgacggcaagccccagaaggugggcaccaccggcagcaacaagagccugcagagcgccggcuuccccaccggccugaccuacagccagcugaugacccugaaggacagcaugaugcagcuggaccccagcgccaagaccuggaucgacaucgagggcagacccgaggaccccguggagaucgcccuguaccagcccaugagcggcugcuacauccacuucuucagagagcccaccgaccugaagcaguucaagcaggacgccaaguacagccacggcaucgacguggccgaccuguuccccgcccagcccggccugaccagcgccgugaucgaggcccugcccagaaacauggugcugaccugccagggcagcgacgacaucaagaagcugcuggacagccagggcagaagagacaucaagcugaucgacaucgcccugagcaaggccgacagcagaaaguucgagaacgccgugugggaccagugcaaggaccugugccacaugcacaccggcguggugguggagaagaagaagagaggcggcaaggaggagaucaccccccacugcgcccugauggacugcaucauguacgacgccgccgugagcggcggccugaacauccccgugcugagagccgugcugcccagagacaugguguucagaaccagcagccccaagguggugcugugaggacuagucccuguucccagagcccacuuuuuuuucuuuuuuugaaauaaaauagccugucuuucagaucuaaaaaaaaaaaaaaaaaaaaaaaaaaaaaaaaaaaaaaaaaaaaaaaaaaaaaaaaaaaaaaaaaaaaaaaaaaaaaaaaaaaaaaaaaaaaaaaaaaaa

SEQ ID NO: 21079 - RNA, 2009 nt, Artificial Sequence
  mRNA product Design a-1 (A100) comprising derived and/or modified sequence from LASV(LASV1000-NIG-2009;Clade II)__AIT17783__SP-IgE_NP(2-569) (opt4)
aggagagucccgcagucggcguccagcggcucugcuuguucgugugugugucguugcaggccuuauucaagcuuaccauggacuggaccuggauccuguuccugguggccgccgccaccagagugcacagcagcgccagcaaggaggugaagagcuuccuguggacccagagccugagaagagagcugagcggcuacugcagcaacaucaagcugcagguggugaaggacgcccaggcccugcugcacggccuggacuucagcgaggugagcaacgugcagagacugaugagaaagcagaagagagacgacagcgaccugaagagacugagagaccugaaccaggccgugaacaaccugguggagcugaagagcacccagcagaagagcauccugagagugggcacccugaccagcgacgaccugcugacccuggccgccgaccuggagaagcugaagagcaaggugaucagaaccgagagaccccugagcagcggcguguacaugggcaaccugagcacccagcagcuggagcagagaagagcccugcugaacaugaucggcauggugggcggcgcccagggcacccagcccggcagagacggcguggugagagugugggacgugaagaaccccgaccugcugaacaaccaguucggcaccaugcccagccugacccuggccugccugaccaagcagggccagguggaccugaacgacguggugcuggcccugaccgaccugggccugaucuacaccgccaaguaccccaacagcagcgaccuggacagacugagccagagccaccccauccugaacaugguggacaccaagaagagcagccugaacaucagcggcuacaacuucagccugggcgccgccgugaaggccggcgccugcaugcuggacggcggcaacaugcuggagaccaucaaggugaccccccagaccauggacggcauccugaagagcauccugaaggugaagaagagccugggcauguucgugagcgacacccccggcgagagaaaccccuacgagaacauccuguacaagaucugccugagcggcgacggcuggcccuacaucgccagcagaaccagcaucgugggcagagccugggagaacaccaccguggaccuggagagcgacggcaagccccagaaggugggcaccgccggcagcaacaagagccugcagagcgccggcuuccccaccggccugaccuacagccagcugaugacccugaaggacagcaugaugcagcuggaccccagcgccaagaccuggaucgacaucgagggcagacccgaggaccccguggagaucgcccuguaccagcccgugagcggcugcuacauccacuucuucagagagcccaccgaccugaagcaguucaagcaggacgccaaguacagccacggcaucgacguggccgaccuguuccccgcccagcccggccugaccagcgccgugaucgaggcccugcccagaaacauggugcugaccugccagggcagcgacgacaucaagagacugcuggacagccagggcagaagagacaucaagcugaucgacaucgcccugagcaaggccgacagcagaagauucgagaacgccgugugggaccagugcaaggaccugugccacaugcacaccggcguggugguggagaagaagaagagaggcggcaaggaggagaucaccccccacugcgcccugauggacugcaucauguacgacgccgccgugagcggcggccugaacauccccgugcugagagccgugcugcccagagacaugguguucagaaccagcagccccaagguggugcugugaggacuagucccuguucccagagcccacuuuuuuuucuuuuuuugaaauaaaauagccugucuuucagaucuaaaaaaaaaaaaaaaaaaaaaaaaaaaaaaaaaaaaaaaaaaaaaaaaaaaaaaaaaaaaaaaaaaaaaaaaaaaaaaaaaaaaaaaaaaaaaaaaaaaa

SEQ ID NO: 21080 - RNA, 2009 nt, Artificial Sequence
  mRNA product Design a-1 (A100) comprising derived and/or modified sequence from LASV(LASV221-NIG-2010;Clade II)__AIT17625__SP-IgE_NP(2-569) (opt4)
aggagagucccgcagucggcguccagcggcucugcuuguucgugugugugucguugcaggccuuauucaagcuuaccauggacuggaccuggauccuguuccugguggccgccgccaccagagugcacagcagcgccagcaaggaggugaagagcuuccuguggacccagagccugagaagagagcugagcggcuacugcagcagcaucaagcugcagguggugaaggacgcccaggcccugcugcacggccuggacuucagcgaggugagcaacgugcagagacugaugagaaagcagagaagagacgacagcgaccugaagagacugagagaccugaaccaggccgugaacaaccugguggagcugaagagcacccagcagaagagcauccugagagugggcacccugaccagcgacgaccugcugacccuggccgccgaccuggagaagcugaagagcaaggugaucagaaccgagagaccccugagcagcggcguguacaugggcaaccugagcacccagcagcuggagcagagaagagcccugcugaacaugaucggcauggugggcggcgcccagggcacccagcccggcagagacggcguggugagagugugggacgugaagaaccccgaccugcugaacaaccaguucggcaccaugcccagccugacccuggccugccugaccaagcagggccagguggaccugaacgacgccgugcuggcccugaccgaccugggccugaucuacaccgccaaguaccccaacagcagcgaccuggacagacugagccagagccaccccauccugaacaugguggacaccaagaagagcagccugaacaucagcggcuacaacuucagccugggcgccgccgugaaggccggcgccugcaugcuggacggcggcaacaugcuggagaccaucaaggugaccccccagaccguggacggcauccugaagagcauccugaaggugaagagaagccugggcauguucgugagcgacacccccggcgagagaaaccccuacgagaacauccuguacaagaucugccugagcggcgacggcuggcccuacaucgccagcagaaccagcaucgugggcagagccugggagaacaccaccguggaccuggagagcgacggcaagccccagaaggugggcaccgccggcagcaacaagagccugcagagcgccggcuuccccaccggccugaccuacagccagcugaugacccugaaggacagcaugaugcagcuggaccccagcgccaagaccuggaucgacaucgagggcagacccgaggaccccguggagaucgcccuguaccagcccaugagcggcugcuacauccacuucuucagagagcccaccgaccugaagcaguucaagcaggacgccaaguacagccacggcaucgacguggccgaccuguuccccgcccagcccggccugaccagcgccgugaucgaggcccugcccagaaacauggugcugaccugccagggcagcgacgacaucaagagacugcuggacagccagggcagaagagacaucaagcugaucgacaucgcccugagcaaggccgacagcagaaaguucgagaacgccgugugggaccagugcaaggaccugugccacaugcacaccggcguggugguggagaagaagaagagaggcggcaaggaggagaucaccccccacugcgcccugauggacugcaucauguacgacgccgccgugagcggcggccugaacauccccgugcugagagccgugcugcccagagacaugguguucagaaccagcagccccaagguggugcugugaggacuagucccuguucccagagcccacuuuuuuuucuuuuuuugaaauaaaauagccugucuuucagaucuaaaaaaaaaaaaaaaaaaaaaaaaaaaaaaaaaaaaaaaaaaaaaaaaaaaaaaaaaaaaaaaaaaaaaaaaaaaaaaaaaaaaaaaaaaaaaaaaaaaa

SEQ ID NO: 21081 - RNA, 2009 nt, Artificial Sequence
  mRNA product Design a-1 (A100) comprising derived and/or modified sequence from LASV(LASV237-NIG-2010;Clade II)__AIT17639__SP-IgE_NP(2-569) (opt4)
aggagagucccgcagucggcguccagcggcucugcuuguucgugugugugucguugcaggccuuauucaagcuuaccauggacuggaccuggauccuguuccugguggccgccgccaccagagugcacagcagcgccagcaaggaggugaagagcuuccuguggacccagagccugagaagagagcugagcggcuacugcagcaacaucaagcugcagguggugaaggacgcccaggcccugcugcacggccuggacuucagcgaggugagcaacgugcagagacugaugagaaagcagaagagagacgacagcgaccugaagagacugagagaccugaaccaggccgugaacaaccugguggagcugaagagcacccagcagaagagcauccugagagugggcacccugaccagcgacgaccugcugacccuggccgccgaccuggagaagcugaagagcaaggugaucagaaccgagagaccccugagcagcggcguguacaugggcaaccugagcacccagcagcuggagcagagaagagcccugcugaacaugaucggcauggugggcggcgcccagggcacccagcccggcagagacggcguggugagagugugggacgugaagaaccccgaccugcugaacaaccaguucggcaccaugcccagccugacccuggccugccugaccaagcagggccagguggaccugaacgacgccgugcuggcccugaccgaccugggccugaucuacaccgccaaguaccccaacagcagcgaccuggacagacugagccagagccaccccauccugaacaugguggacaucaagaagagcagccugaacaucagcggcuacaacuucagccugggcgccgccgugaaggccggcgccugcaugcuggacggcggcaacaugcuggagaccaucaaggugaccccccagaccauggacggcauccugaagagcauccugaaggugaagagaagccugggcauguucgugagcgacacccccggcgagagaaaccccuacgagaacauccuguacaagaucugccugagcggcgacggcuggcccuacaucgccagcagaaccagcaucgugggcagagccugggagaacaccaccguggaccuggagagcgacggcaagccccagaaggugggcagcgccggcagcaacaagagccugcagagcgccggcuuccccaccggccugaccuacagccagcugaugacccugaaggacagcaugaugcagcuggaccccagcgccaagaccuggaucgacaucgagggcagacccgaggaccccguggagaucgcccuguaccagcccaugagcggcugcuacauccacuucuucagagagcccaccgaccugaagcaguucaagcaggacgccaaguacagccacggcaucgacguggccgaccuguuccccgcccagcccggccugaccagcgccgugaucgaggcccugcccagaaacauggugcugaccugccagggcagcgacgacaucaagagacugcuggacagccagggcagaagagacaucaagcugaucgacaucgcccugagcaaggccgacagcagaagauucgagaacgccgugugggaccagugcaaggaccugugccacaugcacaccggcguggugguggagaagaagaagagaggcggcaaggaggagaucaccccccacugcgcccugauggacugcaucauguacgacgccgccgugagcggcggccugaacauccccgugcugagagccgugcugcccagagacaugguguucagaaccagcagccccaagguggugcugugaggacuagucccuguucccagagcccacuuuuuuuucuuuuuuugaaauaaaauagccugucuuucagaucuaaaaaaaaaaaaaaaaaaaaaaaaaaaaaaaaaaaaaaaaaaaaaaaaaaaaaaaaaaaaaaaaaaaaaaaaaaaaaaaaaaaaaaaaaaaaaaaaaaaa

SEQ ID NO: 21082 - RNA, 2009 nt, Artificial Sequence
  mRNA product Design a-1 (A100) comprising derived and/or modified sequence from LASV(LASV253-NIG-2011;Clade II)__AIT17671__SP-IgE_NP(2-569) (opt4)
aggagagucccgcagucggcguccagcggcucugcuuguucgugugugugucguugcaggccuuauucaagcuuaccauggacuggaccuggauccuguuccugguggccgccgccaccagagugcacagcagcgccagcaaggaggugaagagcuuccuguggacccagagccugagaagagagcugagcggcuacugcagcagcaucaagcugcagguggugaaggacgcccaggcccugcugcacggccuggacuucagcgaggugagcaacgugcagagacugaugagaaagcagaagagagacgacagcgaccugaagagacugagagaccugaaccaggccgugaacaaccugguggagcugaagagcacccagcagaagagcgugcugagagugggcacccugaccagcgacgaccugcugacccuggccgccgaccuggagaagcugaagagcaaggugaucagaaccgagagaccccugagcagcggcguguacaugggcaaccugagcacccagcagcuggagcagagaagagcccugcugaacaugaucggcauggugggcggcgcccagggcacccagcccggcagagacggcguggugagagugugggacgugaagaaccccgaccugcugaacaaccaguucggcaccaugcccagccugacccuggccugccugaccaagcagggccagguggaccugaacgacguggugcuggcccugaccgaccugggccugaucuacaccgccaaguaccccaacagcagcgaccuggacagacugagccagagccaccccauccugaacaugguggacaccaagaagagcagccugaacaucagcggcuacaacuucagccugggcgccgccgugaaggccggcgccugcaugcuggacggcggcaacaugcuggagaccaucaaggugaccccccagaccauggacggcauccugaagagcauccugaaggugaagaagagccugggcauguucgugagcgacacccccggcgagagaaaccccuacgagaacauccuguacaagaucugccugagcggcgacggcuggcccuacaucgccagcagaaccagcaucgugggcagagccugggagaacaccaccguggaccuggagagcgacggcaagccccagaaggugggcaccgccggcagcaacaagagccugcagagcgccggcuuccccaccggccugaccuacagccagcugaugacccugaaggacagcaugaugcagcuggaccccagcgccaagaccuggaucgacaucgagggcagacccgaggaccccguggagaucgcccuguaccagcccaugagcggcugcuacauccacuucuucagagagcccaccgaccugaagcaguucaagcaggacgccaaguacagccacggcaucgacgugaccgaccuguuccccgcccagcccggccugaccagcgccgugaucgaggcccugcccagaaacauggugcugaccugccagggcagcgacgacaucaagagacugcuggacagccagggcagaagagacaucaagcugaucgacaucgcccugagcaaggccgacagcagaagauucgagaacgccgugugggaccagugcaaggaccugugccacaugcacaccggcguggugguggagaagaagaagagaggcggcaaggaggagaucaccccccacugcgcccugauggacugcaucauguacgacgccgccgugagcggcggccugaacauccccgugcugagagccgugcugcccagagacaugguguucagaaccagcagccccaagguggugcugugaggacuagucccuguucccagagcccacuuuuuuuucuuuuuuugaaauaaaauagccugucuuucagaucuaaaaaaaaaaaaaaaaaaaaaaaaaaaaaaaaaaaaaaaaaaaaaaaaaaaaaaaaaaaaaaaaaaaaaaaaaaaaaaaaaaaaaaaaaaaaaaaaaaaa

SEQ ID NO: 21083 - RNA, 2009 nt, Artificial Sequence
  mRNA product Design a-1 (A100) comprising derived and/or modified sequence from LASV(LASV254-NIG-2011;Clade II)__AIT17675__SP-IgE_NP(2-569) (opt4)
aggagagucccgcagucggcguccagcggcucugcuuguucgugugugugucguugcaggccuuauucaagcuuaccauggacuggaccuggauccuguuccugguggccgccgccaccagagugcacagcagcgccagcaaggaggugaagagcuuccuguggacccagagccugagaagagagcugagcggcuacugcagcagcaucaagcugcagguggugaaggacgcccaggcccugcugcacggccuggacuucagcgaggugagcaacgugcagagacugaugagaaagcagaagagagacgacagcgaccugaagagacugagagaccugaaccaggccgugaacaaccugguggagcugaagagcacccagcagaagagcgugcugagagugggcacccugaccagcgacgaccugcugacccuggccgccgaccuggagaagcugaagagcaaggugaucagaaccgagagaccccugagcagcggcguguacaugggcaaccugagcacccagcagcuggagcagagaagagcccugcugaacaugaucggcauggugggcggcgcccagggcacccagcccggcagagacggcguggugagagugugggacgugaagaaccccgaccugcugaacaaccaguucggcaccaugcccagccugacccuggccugccugaccaagcagggccagguggaccugaacgacgccgugcuggcccugaccgaccugggccugaucuacaccgccaaguaccccaacagcagcgaccuggacagacugagccagagccaccccauccugaacaugguggacaccaagaagagcagccugaacaucagcggcuacaacuucagccugggcgccgccgugaaggccggcgccugcaugcuggacggcggcaacaugcuggagaccaucaaggugaccccccagaccauggacggcauccugaagagcauccugaaggugaagaagagccugggcauguucgugagcgacacccccggcgagagaaaccccuacgagaacauccuguacaagaucugccugagcggcgacggcuggcccuacaucgccagcagaaccagcaucgugggcagagccugggagaacaccaucguggaccuggagagcgacggcaagccccagaaggugggcaccgccggcagcaacaagagccugcagagcgccggcuuccccaccggccugaccuacagccagcugaugacccugaaggacagcaugaugcagcuggaccccagcgccaagaccuggaucgacaucgagggcagacccgaggaccccguggagaucgcccuguaccagcccaugagcggcugcuacauccacuucuucagagagcccaccgaccugaagcaguucaagcaggacgccaaguacagccacggcaucgacguggccgaccuguuccccgcccagcccggccugaccagcgccgugaucgaggcccugcccagaaacauggugcugaccugccagggcagcgacgacaucaagagacugcuggacagccagggcagaagagacaucaagcugaucgacaucgcccugagcaaggccgacagcagaagauucgagaacgccgugugggaccagugcaaggaccugugccacaugcacaccggcguggugguggagaagaagaagagaggcggcaaggaggagaucaccccccacugcgcccugauggacugcaucauguacgacgccgccgugagcggcggccugaacauccccgugcugagagccgugcugcccagagacaugguguucagaaccagcagccccaagguggugcugugaggacuagucccuguucccagagcccacuuuuuuuucuuuuuuugaaauaaaauagccugucuuucagaucuaaaaaaaaaaaaaaaaaaaaaaaaaaaaaaaaaaaaaaaaaaaaaaaaaaaaaaaaaaaaaaaaaaaaaaaaaaaaaaaaaaaaaaaaaaaaaaaaaaaa

SEQ ID NO: 21084 - RNA, 2009 nt, Artificial Sequence
  mRNA product Design a-1 (A100) comprising derived and/or modified sequence from LASV(Nig08-04;Clade II)__ADU56611__SP-IgE_NP(2-569) (opt4)
aggagagucccgcagucggcguccagcggcucugcuuguucgugugugugucguugcaggccuuauucaagcuuaccauggacuggaccuggauccuguuccugguggccgccgccaccagagugcacagcagcgccagcaaggaggugaagagcuuccuguggacccagagccugagaagagagcugagcggcuacugcagcaacaucaagcugcagguggugaaggacgcccaggcccugcugcacggccuggacuucagcgaggugagcaacgugcagagacugaugagaaagcagaagagagacgacggcgaccugaagagacugagagaccugaaccaggccgugaacaaccugguggagcugaagagcacccagcagaagagcgugcugagagugggcacccugaccagcgacgaccugcugacccuggccgccgaccuggagaagcugaagagcaaggugaucagaaccgagagaccccugagcagcggcguguacaugggcaaccugagcacccagcagcuggagcagagaaaggcccugcugagcaugaucggcauggugggcggcgcccagggcacccagcccggcagagacggcguggugagagugugggacgugaagaaccccgaccugcugaacaaccaguucggcaccaugcccagccugacccuggccugccugaccaagcagggccagguggaccugaacgacgccgugcuggcccugaccgaccugggccugaucuacaccgccaaguaccccaacagcagcgaccuggacagacugagccagagccaccccauccugaacaugguggacaccaagaagagcagccugaacaucagcggcuacaacuucagccugggcgccgccgugaaggccggcgccugcaugcuggacggcggcaacaugcuggagaccaucaaggugaccccccagaccauggacggcauccugaagagcauccugaaggugaagagaagccugggcauguucgugagcgacacccccggcgagagaaaccccuacgagaacauccuguacaagaucugccugagcggcgacggcuggcccuacaucgccagcagaaccagcaucgugggcagagccugggagaacaccaccguggaccuggagagcgacggcaagccccagaaggugggcaccgccggcagcaacaagagccugcagagcgccggcuuccccaccggccugaccuacagccagcugaugacccugaaggacagcaugaugcagcuggaccccagcgccaagaccuggaucgacaucgagggcagacccgaggaccccguggagaucgcccuguaccagcccaugagcggcugcuacauccacuucuucagagagcccaccgaccugaagcaguucaagcaggacgccaaguacagccacggcaucgacgugaccgaccuguucagcgcccagcccggccugaccagcgccgugaucgaggcccugcccagaaacauggugcugaccugccagggcagcgacgacaucaagaagcugcuggacagccagggcagaagagacaucaagcugaucgacaucagccugaacaaggccgacagcagaagauucgagaacgccgugugggaccagugcaaggaccugugccacaugcacaccggcguggugguggagaagaagaagagaggcggcaaggaggagaucaccccccacugcgcccugauggacugcaucauguucgacgccgccgugagcggcggccugaacauccccauccugagagccgugcugcccagagacaugguguucagaaccagcagccccaagguggugcugugaggacuagucccuguucccagagcccacuuuuuuuucuuuuuuugaaauaaaauagccugucuuucagaucuaaaaaaaaaaaaaaaaaaaaaaaaaaaaaaaaaaaaaaaaaaaaaaaaaaaaaaaaaaaaaaaaaaaaaaaaaaaaaaaaaaaaaaaaaaaaaaaaaaaa

SEQ ID NO: 21085 - RNA, 2012 nt, Artificial Sequence
  mRNA product Design a-1 (A100) comprising derived and/or modified sequence from LASV(GA391;Clade III)__AAA46284__SP-IgE_NP(2-570) (opt4)
aggagagucccgcagucggcguccagcggcucugcuuguucgugugugugucguugcaggccuuauucaagcuuaccauggacuggaccuggauccuguuccugguggccgccgccaccagagugcacagcagcgccagcaaggaggugagaagcugccuguggacccagagccugagaagagagcugagcggcuacugcagcaacaucaagcugcagguggugaaggacgcccaggcccugcugcacggccuggacuucagcgaggugagcaacgugcagagacugaugagaaagcagaagagagacgacggcgaccugaagagacugagagaccugaaccaggccgugaacaaccugguggagcugaagagcacccagcagaagagcgugcugagagugggcacccugagcagcgacgaccugcugauccuggccgccgaccuggagaagcugaagagcaaggugaccagaaccgagagaccccugagcagcggcguguacaugggcaaccugagcagccagcagcuggaccagagaagagcccugcugaacaugaucggcaugaccggcgugagcggcggcggcaagggcgccagcaacggcaucgugagagugugggacgugaagaacgccgagcugcugaacaaccaguucggcaccaugcccagccugacccuggccugccugaccaagcagggccagguggaccugaacgacgccgugcaggcccugaccgaccugggccugaucuacaccgccaaguaccccaacagcagcgaccuggacagacugagccagagccaccccauccugaacaugaucgacaccaagaagagcagccugaacaucagcggcuacaacuucagccugggcgccgccgugaaggccggcgccugcaugcuggacggcggcaacaugcuggagaccaucaaggugagcccccagaccauggacggcauccugaagagcauccugaaggugaagaagagccugggcauguucgugagcgacacccccggcgagagaaaccccuacgagaacauccuguacaagaucugccugagcggcgacggcuggagcuacaucgccagcagaaccagcaucgugggcagagccugggagaacaccgugguggaccuggagcaggacaacaagccccagaagaucggcaacggcggcagcaacaagagccugcagagcgccggcuucgccgccggccugaucuacagccagcugaugacccugaaggacuucaagugcuucaaccugauccccaacgccaagaccuggauggacaucgagggcagacccgaggaccccguggagaucgcccuguaccagcccagcagcggcugcuacgugcacuucuucagagagcccaccgaccugaagcaguucaagcaggacgccaaguacagccacggcagagacgugaccgaccuguucgccgcccagcccggccugaccagcgccgugaucgaggcccugcccagaaacauggugaucaccugccagggcagcgaggacaucagaaagcugcuggagagccagggcagaagagacaucaagcugaucgacaucacccugagcaaggccgacagcagaaaguucgagaacgccgugugggaccaguucaaggaccugugccacaugcacaccggcguggugguggagaagaagaagagaggcggcaaggaggagaucaccccccacugcgcccugauggacugcaucauguucgacgccgccgugagcggcggccuggacgccaaggugcugagaguggugcugcccagagacaugguguucagaaccagcacccccaagguggugcugugaggacuagucccuguucccagagcccacuuuuuuuucuuuuuuugaaauaaaauagccugucuuucagaucuaaaaaaaaaaaaaaaaaaaaaaaaaaaaaaaaaaaaaaaaaaaaaaaaaaaaaaaaaaaaaaaaaaaaaaaaaaaaaaaaaaaaaaaaaaaaaaaaaaaa

SEQ ID NO: 21086 - RNA, 2009 nt, Artificial Sequence
  mRNA product Design a-1 (A100) comprising derived and/or modified sequence from LASV(Nig08-A19;Clade III)__ADU56619__SP-IgE_NP(2-569) (opt4)
aggagagucccgcagucggcguccagcggcucugcuuguucgugugugugucguugcaggccuuauucaagcuuaccauggacuggaccuggauccuguuccugguggccgccgccaccagagugcacagcagcgccagcaaggaggugaagagcuuccuguggacccagagccugagaagagagcugagcggcuacugcagcaacaucaagcugcagguggugaaggacgcccaggcccugcugcacggccuggacuucagcgaggugagcaacgugcagagacugaugagaaagcagaagagagacgacggcgaccugaagagacugagagaccugaaccaggccgugaacaaccugguggagcugaagagcacccagcagaagagcgugcugagagugggcacccugagcagcgacgaccugcuggugcuggccgccgaccuggagaagcugaagagcaagguggugagaaccgagagaccccugagcagcggcaucuacaugggcaaccugagcagccagcagcuggaccagagaaaggcccugcugaacaugaucggcaugaccggcggcaacggcggcagaaacaccaccagcgacggcaucgugagagugugggacgugaagaacgccgagcugcugaacaaccaguucggcaccaugcccagccugacccuggccugccugaccaagcagggccagguggaccugaacgacgccgugcaggcccugaccgaccugggccugaucuacaccgccaaguaccccaacagcagcgaccuggacagacuggcccagagccaccccauccugaacaugaucgacaccaagaagagcagccugaacaucagcggcuacaacuucagccugggcgccgccgugaaggccggcgccugcaugcuggacggcggcaacaugcuggagaccaucaaggugagcccccagaccauggacggcauccugaagagcauccugaaggugaagagaagccugggcauguucaucagcgacacccccggcgagagaaaccccuacgagaacauccuguacaagaucugccugagcggcgacggcuggcccuacaucgccagcagaaccagcaucgugggcagagccugggagaacaccgugguggaccuggagagcgacaacaagccccagaagaccggcaacggcggcagcaacaagagccugcagagcgccggcuucgccgccggccugaccuacagccagcugaugacccugaaggacagcaugcugcagcuggaccccaacgccaagaccuggauggacaucgagggcagacccgaggaccccguggagaucgcccuguaccagcccagcagcggcugcuacauccacuucuucagagagcccaccgaccugaagcaguucaagcaggacgccaaguacagccacggcaucgacgugaccgaccuguucgccgcccagcccggccugaccagcgccgugaucgaggcccugcccagaaacauggugaucaccugccagggcagcgaggacaucagaaagcugcuggagagccagggcagaagagacaucaagcugaucgacaucagccugagcaagguggacagcagaaaguucgagaacgccgugugggaccaguucaaggaccugugccacaugcacaccggcaucgugguggagaagaagaagagaggcggcaaggaggagaucaccccccacugcgcccugauggacugcaucauguucgacgccgccgugagcggcggcguggacgccaaggugcugagagccgugcugcccagagacaugguguucagaaccagcacccccaagguggugcugugaggacuagucccuguucccagagcccacuuuuuuuucuuuuuuugaaauaaaauagccugucuuucagaucuaaaaaaaaaaaaaaaaaaaaaaaaaaaaaaaaaaaaaaaaaaaaaaaaaaaaaaaaaaaaaaaaaaaaaaaaaaaaaaaaaaaaaaaaaaaaaaaaaaaa

SEQ ID NO: 21087 - RNA, 2009 nt, Artificial Sequence
  mRNA product Design a-1 (A100) comprising derived and/or modified sequence from LASV(G1180-SLE-2010;Clade IV)__AIT17169__SP-IgE_NP(2-569) (opt4)
aggagagucccgcagucggcguccagcggcucugcuuguucgugugugugucguugcaggccuuauucaagcuuaccauggacuggaccuggauccuguuccugguggccgccgccaccagagugcacagcagcgccagcaaggagaucaagagcuuccuguggacccagagccugagaagagagcugagcggcuacugcagcaacaucaagcugcagguggugaaggacgcccaggcccugcugcacggccuggacuucagcgaggugagcaacgugcagagacugaugagaaaggagagaagagacgacaacgaccugaagagacugagagaccugaaccaggccgugaacaaccugguggagcugaagagcacccagcagaagagcauccugagagugggcacccugaccagcgacgaccugcugauccuggccgccgaccuggagaagcugaagagcaaggugaucagaaccgagagaccccugagcgccggcguguacaugggcaaccugagcagccagcagcuggaccagagaagagcccugcugagcaugaucggcaugagcagcggcaaccagagagcccaggccggcagagacggcguggugagagugugggacgugaagaacguggagcugcugaacaaccaguucggcaccaugcccagccugacccuggccugccugaccaagcagggccagguggaccugaacgacgccgugcaggcccugaccgaccugggccugaucuacaccgccaaguaccccaacaccagcgaccuggacagacugacccagagccaccccauccugaacaugaucgacaccaagaagagcagccugaacaucagcggcuacaacuucagccugggcgccgccgugaaggccggcgccugcaugcuggacggcggcaacaugcuggagaccaucaaggugagcccccagaccauggacggcauccugaagagcauccugaaggugaagaaggcccugggcauguucaucagcgacacccccggcgagagaaaccccuacgagaacauccuguacaagaucugccugagcggcgacggcuggcccuacaucgccagcagaaccagcaucaccggcagagccugggagaacaccgugguggaccuggagagcgacggcaagccccagaaggccggcagcaacaacagcaacaagagccugcagagcgugggcuucaccgccggccugaccuacagccagcugaugacccugaaggacgccaugcugcagcuggaccccaacgccaagaccuggauggacaucgagggcagacccgaggaccccguggagaucgcccuguaccagcccagcagcggcugcuacauccacuucuucagagagcccaccgaccugaagcaguucaagcaggacgccaaguacagccacggcaucgacgugaccgaccuguucgccgcccagcccggccugaccagcgccgugaucgacgcccugcccagaaacauggugaucaccugccagggcagcgacgacaucagaaagcugcuggagagccagggcagaaaggacaucaagcugaucgacaucgcccugagcaagaccgacagcagaaaguacgagaacgccgugugggaccaguacaaggaccugugccacaugcacaccggcguggugguggagaagaagaagagaggcggcaaggaggagaucaccccccacugcgcccugauggacugcaucauguucgacgccgccgugagcggcggccugaacaccagcgugcugagagccgugcugcccagagacaugguguucagaaccagcacccccagaguggugcugugaggacuagucccuguucccagagcccacuuuuuuuucuuuuuuugaaauaaaauagccugucuuucagaucuaaaaaaaaaaaaaaaaaaaaaaaaaaaaaaaaaaaaaaaaaaaaaaaaaaaaaaaaaaaaaaaaaaaaaaaaaaaaaaaaaaaaaaaaaaaaaaaaaaaa

SEQ ID NO: 21088 - RNA, 2009 nt, Artificial Sequence
  mRNA product Design a-1 (A100) comprising derived and/or modified sequence from LASV(G1442-SLE-2011;Clade IV)__AIT17181__SP-IgE_NP(2-569) (opt4)
aggagagucccgcagucggcguccagcggcucugcuuguucgugugugugucguugcaggccuuauucaagcuuaccauggacuggaccuggauccuguuccugguggccgccgccaccagagugcacagcagcgccagcaaggaggugaagagcuuccuguggacccagagccugagaagagagcugagcggcuacugcagcaacaucaagcugcagguggugaaggacgcccaggcccugcugcacggccuggacuucagcgaggugagcaacgugcagagacugaugagaaagcagagaagagacgacaacgaccugaagagacugagagaccugaaccaggccgugaacaaccugguggagcugaagagcacccagcagaagagcgugcugagagugggcacccugaccagcgacgaccugcuggugcuggccgccgaccuggagaagcugaagagcaaggugaucagaaccgagagaccccugagcgccggcguguacaugggcaaccugagcagccagcagcuggaccagagaagagcccugcugaacaugaucggcaugagcggcggcauccagggcaccagaaccggcagagacggcguggugagagugugggacgugaagaacgccgaccugcugaacaaccaguucggcaccaugcccagccugacccuggccugccugaccaagcagggccagguggaccugaacgacguggugcaggcccugaccgaccugggccugaucuacaccgccaaguaccccaacgccagcgaccuggacagacugacccagagccaccccauccugaacaugaucgacaccaagaagagcagccugaacaucagcggcuacaacuucagccugggcgccgccgugaaggccggcgccugcaugcuggacggcggcaacaugcuggagaccaucaaggugagcccccagaccauggacggcauccugaagagcauccugaaggugaagaagacccugggcauguucaucagcgacacccccggcgagagaaaccccuacgagaacauccuguacaagaucugccugagcggcgacggcuggcccuacaucgccagcagaaccagcaucaccggcagagccugggagaacaccgugguggaccuggagagcgacggcaagccccagaaggccggcagcaacaacagcaacaagagccugcagagcgccggcuucgccgccggccugaccuacagccagcugaugacccugaaggacgccaugcugcagcuggaccccaacgccaagaccuggauggacaucgagggcagacccgaggaccccguggagaucgcccuguaccagcccagcagcggcugcuacauccacuucuucagagagcccaccgaccugaagcaguucaagcaggacgccaaguacagccacggcaucgacgugaccgaccuguucgccgcccagcccggccugaccagcgccgugaucgaggcccugcccagaaacauggugaucaccugccagggcagcgacgacaucaagaagcugcuggagagccagggcagaaaggacaucaagcugaucgacaucgcccugagcaagaccgacagcagaaaguacgagaacgccgugugggaccaguacaaggaccugugccacaugcacaccggcguggugguggagaagaagaagagaggcggcaaggaggagaucaccccccacugcgcccugauggacugcaucauguucgacgccgccgugagcggcggccugaacacccuggugcugagagccgugcugcccagagacaugguguucagaaccagcacccccagaguggugcugugaggacuagucccuguucccagagcccacuuuuuuuucuuuuuuugaaauaaaauagccugucuuucagaucuaaaaaaaaaaaaaaaaaaaaaaaaaaaaaaaaaaaaaaaaaaaaaaaaaaaaaaaaaaaaaaaaaaaaaaaaaaaaaaaaaaaaaaaaaaaaaaaaaaaa

SEQ ID NO: 21089 - RNA, 2009 nt, Artificial Sequence
  mRNA product Design a-1 (A100) comprising derived and/or modified sequence from LASV(G3010-SLE-2013;Clade IV)__AIT17345__SP-IgE_NP(2-569) (opt4)
aggagagucccgcagucggcguccagcggcucugcuuguucgugugugugucguugcaggccuuauucaagcuuaccauggacuggaccuggauccuguuccugguggccgccgccaccagagugcacagcagcgccagcaaggagaucaagagcuuccuguggacccagagccugagaagagagcugagcggcuacugcagcaacaucaagcugcagguggugaaggacgcccaggcccugcugcacggccuggacuucagcgaggugagcaacgugcagagacugaugagaaaggagagaagagacgacaacgaccugaagagacugagagaccugaaccaggccgugaacaaccugguggagcugaagagcacccagcagaagagcauccugagagugggcacccugaccagcgacgaccugcugauccuggccgccgaccuggagaagcugaagagcaaggugaccagaaccgagagaccccugagcgccggcguguacaugggcaaccugagcagccagcagcuggaccagagaagagcccugcugagcaugaucggcaugagcagcggcgugcagggcgccagagccggcagagacggcguggugagagugugggacgugaagaacgccgagcugcugaacaaccaguucggcaccaugcccagccugacccuggccugccugaccaagcagggccagguggaccugaacgacguggugcaggcccugaccgaccugggccugaucuacaccgccaaguaccccaacaccagcgaccuggacagacugacccagagccaccccauccugaacaugaucgacaccaagaagagcagccugaacaucagcggcuacaacuucagccugggcgccgccgugaaggccggcgccugcaugcuggacggcggcaacaugcuggagaccaucaaggugagcccccagaccauggacggcauccugaagagcauccugaaggugaagaaggcccugggcauguucaucagcgagacccccggcgagagaaaccccuacgagaacauccuguacaagaucugccugagcggcgacggcuggcccuacaucgccagcagaaccagcaucaccggcagagccugggagaacaccgugguggaccuggagagcgacggcaagccccagaaggccggcagcaacaacagcaacaagagccugcagagcgccggcuucaccgccggccugaccuacagccagcugaugacccugaaggacgccaugcugcagcuggaccccaacgccaagaccuggauggacaucgagggcagacccgaggaccccguggagguggcccuguaccagcccagcagcggcugcuacauccacuucuucagagagcccaccgaccugaagcaguucaagcaggacgccaaguacagccacggcaucgacgugaccgaccuguucgccgcccagcccggccugaccagcgccgugaucgacgcccugcccagaaacauggugaucaccugccagggcagcgacgacaucaagaagcugcuggagagccagggcagaaaggacaucaagcugaucgacaucgcccugagcaagaccgacagcagaaaguacgagaacgccgugugggaccaguacaaggaccugugccacaugcacaccggcguggugguggagaagaagaagagaggcggcaaggaggagaucaccccccacugcgcccugauggacugcaucauguucgacgccgccgugagcggcggccugaacaccagcgugcugagagccgugcugcccagagacaugguguucagaaccagcacccccagaguggugcugugaggacuagucccuguucccagagcccacuuuuuuuucuuuuuuugaaauaaaauagccugucuuucagaucuaaaaaaaaaaaaaaaaaaaaaaaaaaaaaaaaaaaaaaaaaaaaaaaaaaaaaaaaaaaaaaaaaaaaaaaaaaaaaaaaaaaaaaaaaaaaaaaaaaaa

SEQ ID NO: 21090 - RNA, 2009 nt, Artificial Sequence
  mRNA product Design a-1 (A100) comprising derived and/or modified sequence from LASV(G502-SLE-2009;Clade IV)__AIT17127__SP-IgE_NP(2-569) (opt4)
aggagagucccgcagucggcguccagcggcucugcuuguucgugugugugucguugcaggccuuauucaagcuuaccauggacuggaccuggauccuguuccugguggccgccgccaccagagugcacagcagcgccagcaaggagaucaagagcuuccuguggacccagagccugagaagagagcugagcggcuacugcagcaacaucaagcugcagguggugaaggacgcccaggcccugcugcacggccuggacuucagcgaggugagcaacgugcagagacugaugagaaaggagagaagagacgacaacgaccugaagagacugagagaccugaaccaggccgugaacaaccugguggagcugaagagcacccagcagaagagcauccugagagugggcacccugaccagcgacgaccugcugauccuggccgccgaccuggagaagcugaagagcaaggugaucagaaccgagagaccccugagcgccggcguguacaugggcaaccugagcagccagcagcuggaccagagaagagcccugcugagcaugaucggcaugagcggcggcaaccagggcgugagagccggcaaggacggcguggugagagugugggacgugaagaacgccgagcugcugaacaaccaguucggcaccaugcccagccugacccuggccugccugaccaagcagggccagguggaccugaacgacgccgugcaggcccugaccgaccugggccugaucuacaccgccaaguaccccaacaccagcgaccuggacagacugacccagagccaccccauccugaacaugaucgacaccaagaagagcagccugaacaucagcggcuacaacuucagccugggcgccgccgugaaggccggcgccugcaugcuggacggcggcaacaugcuggagaccaucaaggugagcccccagaccauggacggcauccugaagagcauccugaaggugaagaaggcccugggcauguucaucagcgacacccccggcgagagaaaccccuacgagaacauccuguacaagaucugccugagcggcgacggcuggcccuacaucgccagcagaaccagcaucaccggcagagccugggagaacaccgugguggaccuggagagcgacggcaagccccagaaggccggcagcaacaacagcaacaagagccugcagagcgccggcuucaccgccggccugaccuacagccagcugaugacccugaaggacgccaugcugcagcuggaccccaacaccaagaccuggauggacaucgagggcagacccgaggaccccguggagaucgcccuguaccagcccagcagcggcugcuacauccacuucuucagagagcccaccgaccugaagcaguucaagcaggacgccaaguacagccacggcaucgacgugaccgaccuguucgccgcccagcccggccugaccagcgccgugaucgacgcccugcccagaaacauggugaucaccugccagggcagcgacgacaucagaaagcugcuggagagccagggcagaaaggacaucaagcugaucgacaucgcccugaacaagaccgacagcagaaaguacgagaacgccgugugggaccaguacaaggaccugugccacaugcacaccggcguggugguggagaagaagaagagaggcggcaaggaggagaucaccccccacugcgcccugauggacugcaucauguucgacgccgccgugagcggcggccugaacaccagcgugcugagagccgugcugcccagagacaugguguucagaaccagcacccccagaguggugcugugaggacuagucccuguucccagagcccacuuuuuuuucuuuuuuugaaauaaaauagccugucuuucagaucuaaaaaaaaaaaaaaaaaaaaaaaaaaaaaaaaaaaaaaaaaaaaaaaaaaaaaaaaaaaaaaaaaaaaaaaaaaaaaaaaaaaaaaaaaaaaaaaaaaaa

SEQ ID NO: 21091 - RNA, 2009 nt, Artificial Sequence
  mRNA product Design a-1 (A100) comprising derived and/or modified sequence from LASV(G733-SLE-2010;Clade IV)__AIT17155__SP-IgE_NP(2-569) (opt4)
aggagagucccgcagucggcguccagcggcucugcuuguucgugugugugucguugcaggccuuauucaagcuuaccauggacuggaccuggauccuguuccugguggccgccgccaccagagugcacagcagcgccagcaaggagaucaagagcuuccuguggacccagagccugagaagagagcugagcggcuacugcagcaacaucaagcugcagguggugaaggacgcccaggcccugcugcacggccuggacuucagcgaggugagcaacgugcagagacugaugagaaaggagagaagagacgacaacgaccugaagagacugagagaccugaaccaggccgugaacaaccugguggagcugaagagcacccagcagaagagcgugcugagagugggcacccugaccagcgacgagcugcuggugcuggccgccgaccuggagaagcugaagagcaaggugaucagaaccgagagaccccugagcgccggcguguacaugggcaaccugagcagccagcagcuggaccagagaagagcccugcugagcaugaucggcaugagcggcggcaaccagggcgccagaaccggcagagacggcguggugagagugugggacgugaagaacgccgagcugcugaacaaccaguucggcaccaugcccagccugacccuggccugccugaccaagcagggccagguggaccugaacgacgccgugcaggcccugaccgaccugggccugaucuacaccgccaaguaccccaacaccagcgaccuggacagacugacccagagccaccccauccugaacaugaucgacaccaagaagagcagccugaacaucagcggcuacaacuucagccugggcgccgccgugaaggccggcgccugcaugcuggacggcggcaacaugcuggagaccaucaaggugagcccccagaccauggacggcauccugaagagcauccugaaggugaagaaggcccugggcauguucaucagcgacacccccggcgagagaaaccccuacgagaacauccuguacaagaucugccugagcggcgacggcuggcccuacaucgccagcagaaccagcaucaccggcagagccugggagaacaccgugguggaccuggagagcgacggcaagccccagaaggccggcagcaacaacagcaacaagagccugcagagcgccggcuucaccgccggccugaccuacagccagcugaugacccugaaggacgccaugcugcagcuggaccccaacgccaagaccuggauggacaucgagggcagacccgaggaccccguggagaucgcccuguaccagcccagcagcggcugcuacauccacuucuucagagagcccaccgaccugaagcaguucaagcaggacgccaaguacagccacggcaucgacgugaccgaccuguucgccgcccagcccggccugaccagcgccgugaucgacgcccugcccagaaacauggugaucaccugccagggcagcgacgacaucagaaagcugcuggagagccagggcagaaaggacaucaagcugaucgacaucgcccugagcaagaucgacagcagaaaguacgagaacgccgugugggaccaguacaaggaccugugccacaugcacaccggcguggugguggagaagaagaagagaggcggcaaggaggagaucaccccccacugcgcccugauggacugcaucauguucgacgccgccgugagcggcggccugaacagccuggugcugagagccgugcugcccagagacaugguguucagaaccagcacccccagaguggugcugugaggacuagucccuguucccagagcccacuuuuuuuucuuuuuuugaaauaaaauagccugucuuucagaucuaaaaaaaaaaaaaaaaaaaaaaaaaaaaaaaaaaaaaaaaaaaaaaaaaaaaaaaaaaaaaaaaaaaaaaaaaaaaaaaaaaaaaaaaaaaaaaaaaaaa

SEQ ID NO: 21092 - RNA, 2009 nt, Artificial Sequence
  mRNA product Design a-1 (A100) comprising derived and/or modified sequence from MOPV/LASV reassortant(IGS-1;Clade IV)__AFY05578__SP-IgE_NP(2-569) (opt4)
aggagagucccgcagucggcguccagcggcucugcuuguucgugugugugucguugcaggccuuauucaagcuuaccauggacuggaccuggauccuguuccugguggccgccgccaccagagugcacagcagcgccagcaaggagaucaagagcuuccuguggacccagagccugagaagagagcugagcggcuacugcagcaacaucaagcugcagguggugaaggacgcccaggcccugcugcacggccuggacuucagcgaggugagcaacgugcagagacugaugagaaaggagagaagagacgacaacgaccugaagagacugagagaccugaaccaggccgugaacaaccugguggagcugaagagcacccagcagaagagcauccugagagugggcacccugaccagcgacgaccugcugauccuggccgccgaccuggagaagcugagaagcaaggugaucagaaccgagagaccccugagcgccggcguguacaugggcaaccugagcagccagcagcuggaccagagaagagcccugcugaacaugaucggcaugagcggcggcaaccagggcgccagagccggcagagacggcguggugagagugugggacgugaagaacgccgagcugcugagcaaccaguucggcaccaugcccagccugacccuggccugccugaccaagcagggccagguggaccugaacgacgccgugcaggcccugaccgaccugggccugaucuacaccgccaaguaccccaacaccagcgaccuggacagacugacccagagccaccccauccugaacaugaucgacaccaagaagagcagccugaacaucagcggcuacaacuucagccugggcgccgccgugaaggccggcgccugcaugcuggacggcggcaacaugcuggagaccaucaaggugagcccccagaccauggacggcauccugaagagcauccugaaggugaagaaggcccugggcauguucaucagcgacacccccggcgagagaaaccccuacgagaacauccuguacaagaucugccugagcggcgacggcuggcccuacaucgccagcagaaccagcaucaccggcagagccugggagaacaccgugguggaccuggagagcgacggcaagccccagaaggccgacagcaacaacagcagcaagagccugcagagcgccggcuucaccgccggccugaccuacagccagcugaugacccugaaggacgccaugcugcagcuggaccccaacgccaagaccuggauggacaucgagggcagacccgaggaccccguggagaucgcccuguaccagcccagcagcggcugcuacauccacuucuucagagagcccaccgaccugaagcaguucaagcaggacgccaaguacagccacggcaucgacgugaccgaccuguucgccacccagcccggccugaccagcgccgugaucgacgcccugcccagaaacauggugaucaccugccagggcagcgacgacaucagaaagcugcuggagagccagggcagaaaggacaucaagcugaucgacaucgaccugagcaagaccgacagcagaaaguacgagaacgccgugugggaccaguacaaggaccugugccacaugcacaccggcguggugguggagaagaagaagagaggcggcaaggaggagaucaccccccacugcgcccugauggacugcaucauguucgacgccgccgugagcggcggccugaacaccagcgugcugagagccgugcugcccagagacaugguguucagaaccagcacccccagaguggugcugugaggacuagucccuguucccagagcccacuuuuuuuucuuuuuuugaaauaaaauagccugucuuucagaucuaaaaaaaaaaaaaaaaaaaaaaaaaaaaaaaaaaaaaaaaaaaaaaaaaaaaaaaaaaaaaaaaaaaaaaaaaaaaaaaaaaaaaaaaaaaaaaaaaaaa

SEQ ID NO: 21093 - RNA, 2009 nt, Artificial Sequence
  mRNA product Design a-1 (A100) comprising derived and/or modified sequence from LASV(LM765-SLE-2012;Clade IV)__AIT17815__SP-IgE_NP(2-569) (opt4)
aggagagucccgcagucggcguccagcggcucugcuuguucgugugugugucguugcaggccuuauucaagcuuaccauggacuggaccuggauccuguuccugguggccgccgccaccagagugcacagcagcgccagcaaggagaucaagagcuuccuguggacccagagccugagaagagagcugagcggcuacugcagcaacaucaagcugcagguggugaaggacgcccaggcccugcugcacggccuggacuucagcgaggugagcaacgugcagagacugaugagaaaggagagaagagacgacaacgaccugaagagacugagagaccugaaccaggccgugaacaaccugguggagcugaagagcacccagcagaagagcauccugagagugggcacccugaccagcgacgaccugcugauccuggccgccgaccuggagaagcugaagagcaaggugaccagaaccgagagaccccugagcgccggcguguacaugggcaaccugagcagccagcagcuggaccagagaagagcccugcuggacaugaucggcaugagcggcagcaaccagggcgccagagccggcagagacggcguggugagagugugggacgugaagaacgccgagcugcugaacaaccaguucggcaccaugcccagccugacccuggccugccugaccaagcagggccagguggaccugaacgacgccgugcaggcccugaccgaccugggccugaucuacaccgccaaguaccccaacaccagcgaccuggacagacugacccagagccaccccauccugaacaugaucgacaccaagaagagcagccugaacaucagcggcuacaacuucagccugggcgccgccgugaaggccggcgccugcaugcuggacggcggcaacaugcuggagaccaucaaggugagcccccagaccauggacggcauccugaagagcauccugaaggugaagaaggcccugggcauguucaucagcgacgcccccggcgagagaaaccccuacgagaacauccuguacaagaucugccugagcggcgacggcuggcccuacaucgccagcagaaccagcaucaccggcagagccugggagaacaccgugguggaccuggagagcgacggcaagccccagaaggccggcagcaacggcagcaacaagagccugcagagcgccggcuucaccgccggccugaccuacagccagcugaugacccugaaggacgccaugcugcagcuggaccccaacgccaagaccuggauggacaucgagggcagacccgaggaccccguggagaucgcccuguaccagcccagcagcggcugcuacauccacuucuucagagagcccaccgaccugaagcaguucaagcaggacgccaaguacagccacggcaucgacgugaccgaccuguucgccgcccagcccggccugaccagcgccgugaucgacgcccugcccagaaacauggugaucaccugccagggcagcgacgacaucagaaagcuguucgagagccagggcagaaaggacaucaagcugaucgacaucgcccugagcaagaccgacagcagaaaguacgagaacgccgugugggaccaguacaaggaccugugccacaugcacaccggcaucgugguggagaagaagaagagaggcggcaaggaggagaucaccccccacugcgcccugauggacugcaucauguucgacgccgccgugagcggcggccugaacaccagcgugcugagagccgugcugcccagagacaugguguucagaaccagcacccccagaguggugcugugaggacuagucccuguucccagagcccacuuuuuuuucuuuuuuugaaauaaaauagccugucuuucagaucuaaaaaaaaaaaaaaaaaaaaaaaaaaaaaaaaaaaaaaaaaaaaaaaaaaaaaaaaaaaaaaaaaaaaaaaaaaaaaaaaaaaaaaaaaaaaaaaaaaaa

SEQ ID NO: 21094 - RNA, 2009 nt, Artificial Sequence
  mRNA product Design a-1 (A100) comprising derived and/or modified sequence from LASV(LM776-SLE-2012;Clade IV)__AIT17825__SP-IgE_NP(2-569) (opt4)
aggagagucccgcagucggcguccagcggcucugcuuguucgugugugugucguugcaggccuuauucaagcuuaccauggacuggaccuggauccuguuccugguggccgccgccaccagagugcacagcagcgccagcaaggagaucaagagcuuccuguggacccagagccugagaagagagcugagcagcuacugcagcaacaucaagcugcagguggugaaggacgcccaggcccugcugcacggccuggacuucagcgaggugagcaacgugcagagacugaugagaaaggagagaagagacgacaacgaccugaagagacugagagaccugaaccaggccgugaacaaccugguggagcugaagagcacccagcagaagagcauccugagagugggcacccugaccagcgacgaccugcugauccuggccgccgaccuggagaagcugaagagcaaggugaccagaaccgagagaccccugagcgccggcguguacaugggcaaccugagcagccagcagcuggaccagagaagagcccugcugagcaugaucggcaugagcggcagcaaccagggcgccagagccggcagagacggcguggugagagugugggacgugaagaacgccgagcugcugaacaaccaguucggcaccaugcccagccugacccuggccugccugaccaagcagggccagguggaccugaacgacgccgugcaggcccugaccgaccugggccugaucuacaccgccaaguaccccaacaccagcgaccuggacagacugacccagagccaccccauccugaacaugaucgacaccaagaagagcagccugaacaucagcggcuacaacuucagccugggcgccgccgugaaggccggcgccugcaugcuggacggcggcaacaugcuggagaccaucaaggugagcccccagaccauggacggcauccugaagagcauccugaaggugaagaaggcccugggcauguucaucagcgacacccccggcgagagaaaccccuacgagaacauccuguacaagaucugccugagcggcgacggcuggcccuacaucgccagcagaaccagcaucaccggcagagccugggagaacaccgugguggaccuggagagcgacggcaagccccagaaggccggcagcaacaacagcaacaagagccugcagagcgccggcuucaccgccggccugaccuacagccagcugaugacccugaaggacgccaugcugcagcuggaccccaacgccaagaccuggauggacaucgagggcagacccgaggaccccguggagguggcccuguaccagcccagcagcggcugcuacauccacuucuucagagagcccaccgaccugaagcaguucaagcaggacgccaaguacagccacggcaucgacgugaccgaccuguucgccgcccagcccggccugaccagcgccgugaucgacgcccugcccagaaacauggugaucaccugccagggcagcgacgacaucagaaagcugcuggagagccagggcagaaaggacaucaagcugaucgacaucgcccugagcaagaccgacagcagaaaguacgagaacgccgugugggaccaguacaaggaccugugccacaugcacaccggcguggugguggagaagaagaagagaggcggcaaggaggagaucaccccccacugcgcccugauggacugcaucauguucgacgccgccgugagcggcggccugaacaccagcgugcugagagccgugcugcccagagacaugguguucagaaccagcacccccagaguggugcugugaggacuagucccuguucccagagcccacuuuuuuuucuuuuuuugaaauaaaauagccugucuuucagaucuaaaaaaaaaaaaaaaaaaaaaaaaaaaaaaaaaaaaaaaaaaaaaaaaaaaaaaaaaaaaaaaaaaaaaaaaaaaaaaaaaaaaaaaaaaaaaaaaaaaa

SEQ ID NO: 21095 - RNA, 2009 nt, Artificial Sequence
  mRNA product Design a-1 (A100) comprising derived and/or modified sequence from LASV(Mad39;Clade IV)__ANH09723__SP-IgE_NP(2-569) (opt4)
aggagagucccgcagucggcguccagcggcucugcuuguucgugugugugucguugcaggccuuauucaagcuuaccauggacuggaccuggauccuguuccugguggccgccgccaccagagugcacagcagcgccagcaaggagaucaagagcuuccuguggacccagagccugagaagagagcugagcggcuacugcagcaacaucaagcugcagguggugaaggacgcccaggcccugcugcacggccuggacuucagcgaggugagcaacgugcagagacugaugagaaagcagagaagagacgacaacgaccugaagagacugagagaccugaaccaggccgugaacaaccugguggagcugaagagcacccagcagaagagcgugcugagagugggcacccugaccagcgacgaccugcugacccuggccgccgaccuggagaagcugaagagcaaggugaccagaaccgagagaccccugaccgccggcguguacaugggcaaccugagcagccagcagcuggaccagagaagagcccugcugaacaugaucggcaugagcggcggcaaccagggcgccagaaccggcagagacggcguggugagagugugggacgugaagaacgccgagcugcugaacaaccaguucggcaccaugcccagccugacccuggccugccugaccaagcagggccagguggaccugaacgacguggugcaggcccugaccgaccugggccugaucuacaccgccaaguaccccaacaccagcgaccuggacagacugacccagagccaccccauccugaacaugaucgacaccaacaagagcagccugaacaucagcggcuacaacuucagccugggcgccgccgugaaggccggcgccugcaugcuggacggcggcaacaugcuggagaccaucaaggugagcccccagaccauggacggcauccugaagagcauccugaaggugaagaagagccugggcauguucaucagcgacacccccggcgagagaaaccccuacgagaacauccuguacaagaucugccugagcggcgacggcuggcccuacaucgccagcagaaccagcaucaccggcagagccugggagaacaccgugguggaccuggagagcggcggcaagccccagaaggccggcagcaacaacagcaacaagagccugcagagcgccggcuucgccgccggccugaccuacagccagcugaugacccugaaggacgccaugcugcagcuggaccccaacgccaagaccuggauggacaucgagggcagacccgaggaccccguggagaucgcccuguaccagcccaucagcggcugcuacauccacuucuucagagagcccaccgaccugaagcaguucaagcaggacgccaaguacagccacggcaucgacgugaccgaccuguucgccgcccagcccggccugaccagcgccgugaucgaggcccugcccagaaacauggugaucaccugccagggcagcgacgacaucagaaagcuguucgagagccagggcagaaaggacaucaagcugaucgacaucgcccugagcaagaccgacagcagaaaguacgagaacgccgugugggaccaguacaaggaccugugccacaugcacaccggcguggugguggagaagaagaagaagggcggcaaggaggagaucaccccccacugcgcccugauggacugcaucauguucgacgccgccgugagcggcggccugaacacccuggugcugagagccgugcugcccagagacaugguguucagaaccagcacccccaagguggugcugugaggacuagucccuguucccagagcccacuuuuuuuucuuuuuuugaaauaaaauagccugucuuucagaucuaaaaaaaaaaaaaaaaaaaaaaaaaaaaaaaaaaaaaaaaaaaaaaaaaaaaaaaaaaaaaaaaaaaaaaaaaaaaaaaaaaaaaaaaaaaaaaaaaaaa

SEQ ID NO: 21096 - RNA, 2009 nt, Artificial Sequence
  mRNA product Design a-1 (A100) comprising derived and/or modified sequence from LASV(Z0947-SLE-2011;Clade IV)__AIT17841__SP-IgE_NP(2-569) (opt4)
aggagagucccgcagucggcguccagcggcucugcuuguucgugugugugucguugcaggccuuauucaagcuuaccauggacuggaccuggauccuguuccugguggccgccgccaccagagugcacagcagcgccagcaaggagaucaagagcuuccuguggacccagagccugagaagagagcugagcggcuacugcagcaacaucaagcugcagguggugaaggacgcccaggcccugcugcacggccuggacuucagcgaggugagcaacgugcagagacugaugagaaaggagagaagagacgacaacgaccugaagagacugagagaccugaaccaggccgugaacaaccugguggagcugaagagcacccagcagaagagcauccugagagugggcacccugaccagcgacgaccugcugauccuggccgccgaccuggagaagcugaagagcaaggugaccagaaccgagagaccccugagcgccggcguguacaugggcaaccugagcagccagcagcuggaccagagaagagcccugcugaacaugaucggcaugagcggcagcaaccagggcgccagaaccggcagagacggcguggugagagugugggacgugaagaacgccgagcugcugaacaaccaguucggcaccaugcccagccugacccuggccugccugaccaagcagggccagguggaccugaacgacgccgugcaggcccugaccgaccugggccugaucuacaccgccaaguaccccaacaccagcgaccuggacagacugacccagagccaccccauccugaacaugaucgacaccaagaagagcagccugaacaucagcggcuacaacuucagccugggcgccgccgugaaggccggcgccugcaugcuggacggcggcaacaugcuggagaccaucaaggugagcccccagaccauggacggcauccugaagagcauccugaaggugaagaaggcccugggcauguucaucagcgacgcccccggcgagagaaaccccuacgagaacauccuguacaagaucugccugagcggcgacggcuggcccuacaucgccagcagaaccagcaucaccggcagagccugggagaacaccgugguggaccuggagagcgacggcaagccccagaaggccggcagcaacggcagcaacaagagccugcagagcgccggcuucaccgccggccugaccuacagccagcugaugacccugaaggacgccaugcugcagcuggaccccaacgccaagaccuggauggacaucgagggcagacccgaggaccccguggagaucgcccuguaccagcccagcagcggcugcuacauccacuucuucagagagcccaccgaccugaagcaguucaagcaggacgccaaguacagccacggcaucgacgugaccgaccuguucgccgcccagcccggccugaccagcgccgugaucgacgcccugcccagaaacauggugaucaccugccagggcagcgacgacaucagaaagcuguucgagagccagggcagaaaggacaucaagcugaucgacaucgcccugagcaagaccgacagcagaaaguacgagaacgccgugugggaccaguacaaggaccugugccacaugcacaccggcaucgugguggagaagaagaagagaggcggcaaggaggagaucaccccccacugcgcccugauggacugcaucauguucgacgccgccgugagcggcggccugaacaccagcgugcugagagccgugcugcccagagacaugguguucagaaccagcacccccagaguggugcugugaggacuagucccuguucccagagcccacuuuuuuuucuuuuuuugaaauaaaauagccugucuuucagaucuaaaaaaaaaaaaaaaaaaaaaaaaaaaaaaaaaaaaaaaaaaaaaaaaaaaaaaaaaaaaaaaaaaaaaaaaaaaaaaaaaaaaaaaaaaaaaaaaaaaa

SEQ ID NO: 21097 - RNA, 2009 nt, Artificial Sequence
  mRNA product Design a-1 (A100) comprising derived and/or modified sequence from LASV(Josiah;Clade IV)__NP_694869__SP-IgE_NP(2-569) (opt5)
aggagagucccgcagucggcguccagcggcucugcuuguucgugugugugucguugcaggccuuauucaagcuuaccauggacuggaccuggauccuguuccucguggccgcugccacaagaguccacagcagcgccuccaaggagaucaaaucuuuccuguggacccagagccucagacgggaacuguccggcuacugcucuaacauuaagcugcaaguggucaaagacgcucaggcccugcuccacgggcuggauuuuagcgagguuuccaaugugcagcgccuuaugagaaaggaacggcgcgacgauaacgaccugaaaagacuccgggaucugaaucaggcggugaacaaucuggucgagcucaagucuacacaacaaaagagcauccugcgcgugggaacgcuuaccuccgacgaucugcucauucuggcugccgaccuugaaaaacuuaagagcaaaguuaucagaacagagcggccccucucugccggcguguauauggggaaccuguccagccagcagcuggaucagcgcagagcucuccugaauaugauuggaaugucuggcgggaaccagggagcccgggcuggccgcgacggcgucgugagaguuugggaugugaagaaugccgagcuucugaacaaucaguucgggaccaugccuucccucacacuggcgugucuuaccaaacagggacaagucgaccugaacgaugccgugcaggcucucacagaccugggccugaucuacaccgccaaguauccgaauacgagcgaccucgaucggcugacccagucucaucccauccuuaacaugauugacacaaagaaauccagccugaauaucuccggguacaacuuuucucucggagcugccgugaaggcgggcgccugcaugcuggaugggggaaacaugcuugaaaccauuaaagucagcccucaaacaauggacggcauccugaaguccauucucaaaguuaagaaagcucugggcauguucaucagcgauacccccggggagcgcaauccuuaugaaaacauucuguacaagaucugucucucuggagacggcuggcccuauaucgccuccagaacgagcauuacagggcgggcuugggagaauaccgugguggaucuggagucugacggaaagccucagaaagccgauagcaacaauuccucuaagagccuucaguccgccggcuuuacagcugggcugaccuacagccagcucaugacccugaaagacgcgaugcugcaacuugauccgaacgccaagacauggauggacaucgaaggaagacccgaggacccugucgaaauugcucucuaccagcccucuuccggcugcuauauccacuucuuucgcgagccuacggaucugaaacaguucaagcaggacgccaaguacagccauggcauugaugugaccgaccuguuugccacacaacccgggcucaccucugcuguuaucgaugcccugccgcggaauauggugaucacaugucagggauccgacgauauuagaaaacuucuggaaagccagggccgcaaggacaucaaacucauugauaucgcgcuguccaagaccgacucucggaaauaugagaacgcugucugggaucaguacaaggaccugugccacaugcauacgggggugguuguggagaagaaaaagagaggaggcaaagaagagauuacaccucacugugcccuuauggauugcaucauguucgacgccgcugucagcgggggccucaauaccuccgugcugcgcgccguccugccccgggacaugguguuuagaaccucuacaccucgcguugugcucugaggacuagucccuguucccagagcccacuuuuuuuucuuuuuuugaaauaaaauagccugucuuucagaucuaaaaaaaaaaaaaaaaaaaaaaaaaaaaaaaaaaaaaaaaaaaaaaaaaaaaaaaaaaaaaaaaaaaaaaaaaaaaaaaaaaaaaaaaaaaaaaaaaaaa

SEQ ID NO: 21098 - RNA, 2009 nt, Artificial Sequence
  mRNA product Design a-1 (A100) comprising derived and/or modified sequence from LASV(LP;Clade I)__AAF86702__SP-IgE_NP(2-569) (opt5)
aggagagucccgcagucggcguccagcggcucugcuuguucgugugugugucguugcaggccuuauucaagcuuaccauggacuggaccuggauccuguuccucguggccgcugccacaagaguccacagcagcaacuccaaggagaucaaaucuuuccuguggacccagagccucagacgggaacuguccggcuacugcucuaauauuaagcuccaaguggucaaagacgcccaggcucugcuccacgggcuggauuuuagcgagguuuccaacgugcagcgccuuaugagaaagcagaaacgggacgaugccgaccugaagcgccucagagaucugaaucaagcggugaacaaucuggucgaacucaagucuacacagcagaaaaacgugcugcggguuggaacgcuuagcuccgacgaucugaucacccucgcugccgaccuggagaaacuuaaaagcaaggugauucgcacagaaagaccccugucuuccggcgucuauauggggaaucucagcucucagcaacuggaucagcggcgcgcccugcucuccaugaucggaaugagcggcgggccucagggaaacagaaccggcggcgacggggugguucgggugugggaugucaaaaaugcugagcugcuuaacaaucaguucggaacaaugccgucucugacccucgccugucugacaaagcaaggccagguggaccuuaacgaugcugugcaggcccugaccgaccucgggcugauuuacacggcgaaguaucccaauuccagcgaccuggauaugcucacccaaucccauccuauccugggaauggucgacacaaagaagucuagccuuaacaucuccggcuacaauuuuagccugggggccgcuguuaaagccggagcuugcaugcucgauggcggcaacaugcuggagaccauuaaggugucuccccagacaauggacgggauccuuaaauccauucugaaggugaaacgcagccucggaauguucaucucugauaccccuggcgaaagaaaccccuaugagaauauucuguacaagaucugucugagcggggaaggauggccuuauauugccucccggacgucuaucacaggccgcgcgugggagaacacccucgucgaccuggagagcgauaauaagccgcccaaacuuaacuccgccgggagcaauaagucucugcaggcugccggacucaacgcuggccugacauacucccagcugaugacccuuaaagacugcaugcuccaacuggauccuagcucuaagaccuggaucgacauugaaggcagacccgaggauccuguggaaaucgcccuguuucagcccuccagcggguguuacauucacuucuuucgggagccgacagaccucaaacaguucaagcaggacgccaaguauucccauggaaucgauguuacggaccuguuuucuacccaaccuggccuuacaagcgcugugauugaagcgcugcccagaaauaugguccuuaccugccagggguccgaugacaucaaaaagcugcuggagucucagggacgccgggauaucaaacuuauugacaucagccucuccaaggccgauagcagaaaauucgagaacgcugugugggaccaguacaaggaucugugucacaugcauacaggcguuguggucgaaaagaaaaagcgcgggggcaaagaggaaauuaccccucacugcgcccugcucgacuguaucauguuugaugccgcuacgacaggaucucugaauauuaccacccuucgggccgugcugcccagagacauggucuuccgcacauccacccccaaggugguucucugaggacuagucccuguucccagagcccacuuuuuuuucuuuuuuugaaauaaaauagccugucuuucagaucuaaaaaaaaaaaaaaaaaaaaaaaaaaaaaaaaaaaaaaaaaaaaaaaaaaaaaaaaaaaaaaaaaaaaaaaaaaaaaaaaaaaaaaaaaaaaaaaaaaaa

SEQ ID NO: 21099 - RNA, 2009 nt, Artificial Sequence
  mRNA product Design a-1 (A100) comprising derived and/or modified sequence from LASV(803213;Clade II)__AAF86704__SP-IgE_NP(2-569) (opt5)
aggagagucccgcagucggcguccagcggcucugcuuguucgugugugugucguugcaggccuuauucaagcuuaccauggacuggaccuggauccuguuccucguggccgcugccacaagaguccacagcagcgccuccaaggaggugaaaucuuuccuguggacccagagccucagacgggaacuguccggcuacugcucuaacaucaaacuucaagucguuaaggacgcucaggcccugcuccacgggcuggauuuuagcgaggugaauaacgugcagcgccuuaugagaaagcagaaacgggacgauggagaccugaagcgccucagagaucugaaucaagcggucaacaaucugguggaacucaaguccacacagcagaaaucuauucugcggguuggcacgcuuaccagcgacgaucugcucacacuggcugccgaccuugagaagcugaaauccaaggugauccgcaccgaaagaccccucagcucuggggucuauaugggaaaccuguccacacagcaacuggagcagcggcgcgcccuccugaauaugauuggcauggugggaggagcucagggcacccagccuggcagagaugggguugugcgggucugggacgugaaaaacccggaucuucugaauaaccaauucggaacaaugcccagccucacccuggccugucuuacgaagcagggccagguggaccugaaugaugcuguccucgcccugaccgaccuggggcucaucuacacagcgaaguauccuaacucuuccgaccuggaucgccuuagccaaucucaucccauucugaauaugguugacaccaaaaaguccagccucaacaucuccggauacaauuuuucucugggcgccgcugugaaagccggggcuugcaugcuugauggaggcaacaugcuggagacaaucaaggugaccccucagacgauggacggcauucucaaaagcauccugaaggucaaaagaucccuggggauguucgugagcgauacacccggagaacggaacccuuaugagaauauucucuacaagaucugucugucuggcgacggguggccguauauugccucccgcaccagcaucguugggagagcgugggaaaacacaaccguggaucuugagucugacggcaagccccagaaagucgggaccgccggaagcaauaagucccugcagucugcuggcuuuccuacaggccucacguacagccaacugaugacccugaaagauuccaugaugcagcuugaccccagcgccaagacauggauugauaucgaggggcggccugaagaccccguggagaucgcucucuaccagccgaugucuggaugcuauauucacuucuuuagagaaccuaccgaccugaaacaguucaagcaagaugccaaguacucccauggcaucgacguugccgaucuguuucccgcucagccugggcucacaagcgcggugauugaggcccugccccgcaacaugguccuuaccugucagggaucugacgauaucaaaaagcugcucgacucccagggccggagagauauuaaacugaucgacaucagccuguccaagguggauucucgcaaauucgaaaaugcugucugggaccaaugcaaggaucuuugucacaugcauacgggggugguuguggagaagaaaaagcggggcggaaaagaggaaauuacaccccacugcgcccucauggacuguaucauguuugaugccgcugucagcggcgggcugaacauuccugugcugagagccguucucccgcgcgacaugguguuccggaccuccucucccaaggucgugcugugaggacuagucccuguucccagagcccacuuuuuuuucuuuuuuugaaauaaaauagccugucuuucagaucuaaaaaaaaaaaaaaaaaaaaaaaaaaaaaaaaaaaaaaaaaaaaaaaaaaaaaaaaaaaaaaaaaaaaaaaaaaaaaaaaaaaaaaaaaaaaaaaaaaaa

SEQ ID NO: 21100 - RNA, 2012 nt, Artificial Sequence
  mRNA product Design a-1 (A100) comprising derived and/or modified sequence from LASV(GA391;Clade III)__CAA36646__SP-IgE_NP(2-570) (opt5)
aggagagucccgcagucggcguccagcggcucugcuuguucgugugugugucguugcaggccuuauucaagcuuaccauggacuggaccuggauccuguuccucguggccgcugccacaagaguccacagcagcgccuccaaggaggugagaucuuuccuguggacccagagccuccggcgcgaacuguccggcuacugcucuaacaucaaacuucaagucguuaaggacgcucaggcccugcuccacgggcuggauuuuagcgagguguccaaugugcagagacuuaugcggaaacagaagcgcgacgauggagaccugaaaagacuccgggaucugaaccaagcggucaauaaccugguggaacucaagucuacacagcagaaaagcguucugcgcgugggcacgcuuuccagcgacgaucugcucauucuggcugccgaccuugagaaacugaagucuaaagucaccagaacagaacggccccucuccagcgggguguauaugggaaaucugucuucccagcaacuggaucagcgcagagcccuccugaacaugaucggcaugaccgggguuagcggaggcggcaagggggcuucugacggaauugugcgggucugggaugugaaaaaugccgagcuucugaacaaucaguucggcacaaugccuucccucacccuggcuugucuuacaaagcaggggcaaguggaccugaacgaugccguccaggcgcucaccgaccugggacugaucuacacggccaaguauccgaauagcuccgaccucgaucgccugucucagagccaucccauucuuaacaugaucgacaccaaaaaguccagccugaauaucucuggcuacaacuuuucccucggggcugccguuaaagcuggagccugcaugcuggauggcggcaauaugcuugagacaauuaaggugagcccucaaaccauggacgggauccugaaaucuauucucaaggugaaaaagagccugggaauguucgucuccgauacacccggcgaaagaaacccuuaugagaacauccuguacaagauuugucucucuggggacggauggcccuauaucgcgagccggaccuccauugugggccgcgccugggaaaauacgguuguggaucuggagcaggacaacaaaccucagaagaucgggaauggaggcagcaacaaaucucuucaguccgcuggcuuugccgcugggcugacauacagccaacucaugacccugaaggauuucaaaugcuuuaaucugaucccgaacgccaagacauggauggacauugagggaagacccgaagauccugucgagaucgcccuuuaccagcccucuuccggcuguuaugugcacuucuuucgggaaccuaccgaccucaagcaguucaaacaggacgcuaaguacagccaugggauugauguuaccgaccuguuugcggcccaacccggacugacauccgcugugaucgaggcccucccgagaaauauggucauuacgugccagggcucugaagauauccgcaaacugcuugagagccaggggcggagagacaucaagcugauugauaucacccucuccaaagccgacucucgcaaguucgagaacgcugugugggaucaguuuaaggaccugugucacaugcauacaggcgucgugguugaaaagaagaaacggggaggcaaggaggaaauuaccccucacugcgcccugauggauuguaucauguucgacgcggcugugagcgggggacuugaugccaaaguccucagagugguucugccccgcgacaugguguuccggacauccaccccuaaggucgugcugugaggacuagucccuguucccagagcccacuuuuuuuucuuuuuuugaaauaaaauagccugucuuucagaucuaaaaaaaaaaaaaaaaaaaaaaaaaaaaaaaaaaaaaaaaaaaaaaaaaaaaaaaaaaaaaaaaaaaaaaaaaaaaaaaaaaaaaaaaaaaaaaaaaaaa

SEQ ID NO: 21101 - RNA, 2009 nt, Artificial Sequence
  mRNA product Design a-1 (A100) comprising derived and/or modified sequence from LASV(AV;Clade V)__CCA30315__SP-IgE_NP(2-569) (opt5)
aggagagucccgcagucggcguccagcggcucugcuuguucgugugugugucguugcaggccuuauucaagcuuaccauggacuggaccuggauccuguuccucguggccgcugccacaagaguccacagcagcgccuccaaggaggugaaaucuuuccuguggacccagagccucagacgggaacuguccggcuacugcucuaacaucaaacuucaagucguuaaggacgcucaggcccugcuccacgggcuggauuuuagcgagguguccaaugugcagcgccuuaugagaaagcagcggcgcgacgauucugaccugaaaagacuccgggaucugaaccaagcggucaauaaccugguggaacucaagagcacacagcagaaguccguucugcgcgugggaacgcuuagcucugacgaucugcucacccuggcugccgaccuugagaaacugaaguccaaagucacaagaaccgaacggccccucagcucuggcguguauauggggaaucuguccagccagcaacuggaucagcgcagagcccuccugaaccuuauuggaaugacaaauggcucucaggggucccaggcuggacgggacggcguugugcgcgucugggaugugaagaacgccgagcugcucaauaaccaauucggcaccaugccuagccugacacuugcuugucugaccaaacagggacagguggaccucaaugaugucguucaagcccugacggaccuggggcucaucuacaccgcgaaguauccgaacacauccgaccuggauagacuuacccagucucaucccauucugaauaugaucgacacaaagaaaagcucccucaacauuagcggcuacaauuuuucucugggggccgcugugaaggccggagcuugcaugcuugauggcgggaacaugcuggagaccaucaaaguguccccucagagcauggacggaauccucaagucuauucugaaagucaagcgggcccugggcauguucgugagcgauacgcccggcgaacgcaacccuuaugagaauauccucuacaaaauuugucuguccggggacggauggcccuauaucgcgucuagaacaagcauuguuggccgggccugggaaaacaccguggucgaucuugagacagacgggaagccucagaagaucggauccggcaauagcaacaaaucucugcaauccgcuggguuuagcgccggacucaccuacucucagcugaugacccugaaggaugcuaugcuucagcucgacccgaaugccaaaacauggauggauauugagggcagacccgaagacccuguggagguugcccuguaccagcccaucuccggcugcuauauccacuucuuucgcgaaccuacggaccugaagcaauucaaacaggaugcuaaguacagccaugggauugacaucgcggaucucuuugccgcucagcccggacugaccuccgccgugauugaggcccuuccgcggaacauggucaucacaugucagggcucugaagacauuaagaaacugcucgagagccaagggagaaaggauaucaaacugaucgacauugcucuguccaagaucgauucucgcaaauucgagaaugccgugugggaccaguauaaggaucuuugccacaugcauaccggagucgugguugaaaagaaaaagcggggcgggaaagaggaaauuacaccucacugugcgcucauggacugcaucauguuugaugcugccgugagcggcggacugaacacccugguccucagagccgugcugccccgcgacaugguuuuccggacguccacaccuagagugguccuuugaggacuagucccuguucccagagcccacuuuuuuuucuuuuuuugaaauaaaauagccugucuuucagaucuaaaaaaaaaaaaaaaaaaaaaaaaaaaaaaaaaaaaaaaaaaaaaaaaaaaaaaaaaaaaaaaaaaaaaaaaaaaaaaaaaaaaaaaaaaaaaaaaaaaa

SEQ ID NO: 21102 - RNA, 2009 nt, Artificial Sequence
  mRNA product Design a-1 (A100) comprising derived and/or modified sequence from LASV(Togo/2016/7082;Clade VI)__AMR44578__SP-IgE_NP(2-569) (opt5)
aggagagucccgcagucggcguccagcggcucugcuuguucgugugugugucguugcaggccuuauucaagcuuaccauggacuggaccuggauccuguuccucguggccgcugccacaagaguccacagcagcaacuccaaggaggugaaaucuuuccuguggacccagagccucagacgggaacuguccggcuacugcucuaauaucaaacuucaagucguuaaagacgcccaggcucugcuccacgggcuggauuuuagcgagguguccaacgugcagcgccuuaugagaaagcagaaacgggacgauggagaccugaagcgccucagagaucugaaucaagccgucaacaaucugguggaacucaagucuguucagcagaaaagcauucugcgggugggcacacuuacguccgacgaucugcucacccuggcggcugaccuugagaagcugaaaagcaaggucacacgcaccgaaagaccccucucuuccgggguguauaugggaaaccugagcucucagcaacuggaucagcggcgcgcccuccuguccaugaucggcaugagcgggggaaaucagaacucucagccuaaaggcgacggcguugugagagucugggaugugaagaaugccgaccuucugaacaaucaauucgggacaaugccgucccucacccuggcuugucuuacaaagcagggacagguggaucugaacgacgccguccaagcucucaccgaccugggccugauuuacacggccaaauaucccaauagcuccgaucucgaccggcugucucagagccauccuauccuuaacaugauugauaccaagaaauccagccugaauaucucuggguacaacuuuucccucggagcggccaucaagacaggcgcuugcaugcuggacgggggaaacaugcuugagaccauuaaaguuacaccccagaccauggauggcauccucaagagcauucugaaagugaagcgcucucugggcauguucaucagcgacacgccuggggagagaaaucccuaugaaaacauucuguacaagaucugucucuccggagauggcuggccuuauauugccucucggacagcuaucaucgggcgcgccugggagaauaccguggucgaccuggaaagcgauuccaaaccgcagaagauuggaagcaacggcucuaauaaaucccuucaaagcgcgggguuugcccccggacugacauacucucagcucaugacccugaaggacuccaugcugcagcuugauccuaacgcuaaaaccuggaucgacauugagggcagacccgaggacccuguggaaguugcccucuuccagcccaucagcggcugcuacauucacuuuuuccgggagccgacagaucugaagcaauuuaagcaggacgcuaaauauucccaugggaucgaugugacggaccuguucgccgcccagccuggacucaccucugcugucaucgaagcgcugcccagaaauauggugcuuacaugucagggcagcgaugacauuaagaaacugcucgauucccaagggcgccgggacaucaagcugauugauguuucucugaacaaaaucgacagcagaaaguuugagaaugccgugugggaucaguacaaggaccuuugccacaugcauaccggagucguggucgaaaagaagaaaaagggcgggaaagaggagauuacaccucacugugcucuccuggauugcaucauguucgacgccgccguguccggcggacugaacgcuaccguucuccgcgccgugcugccccgggacauggucuuuagaacgagcucucccaaggugguucuuugaggacuagucccuguucccagagcccacuuuuuuuucuuuuuuugaaauaaaauagccugucuuucagaucuaaaaaaaaaaaaaaaaaaaaaaaaaaaaaaaaaaaaaaaaaaaaaaaaaaaaaaaaaaaaaaaaaaaaaaaaaaaaaaaaaaaaaaaaaaaaaaaaaaaa

SEQ ID NO: 21103 - RNA, 2009 nt, Artificial Sequence
  mRNA product Design a-1 (A100) comprising derived and/or modified sequence from LASV(KAK-428;Clade n.d. (VII))__ANH09741__SP-IgE_NP(2-569) (opt5)
aggagagucccgcagucggcguccagcggcucugcuuguucgugugugugucguugcaggccuuauucaagcuuaccauggacuggaccuggauccuguuccucguggccgcugccacaagaguccacagcagcaacuccaaggaggugaaaucuuuccuguggacccagagccucagacgggaacuguccggcuacugcacaaauaucaaacuucaagucguuaaggacgcccaggcucugcuccacgggcuggauuuuucugaggugagcaacgugcagcgccuuaugagaaagcagaaacgggacgauaaugaccugaagcgccucagagaucugaaccaagccgucaauaaccugguggaacucaaguccguucagcagaaaucugugcugaaggucggaacgcuuaauagcgacgaucugcucacccuggcggcugaccuugagaaacugaaguccaaagugguucggacagaacgcccccucagcucuggcguguauauggggaaccuguccagccagcaacuggaucagagacgggcccuccugaauaugauuggaauggccggcgggucucagggaaaccagccuucccgcgacggcgucgugagagugugggaugucaagaaugcugaccuucugaacaaucaauucggcaccaugccgagccucacacuggccugucuuaccaagcaggggcagguugaucugaacgacguggugcucgcucugacagaccugggacucaucuacaccgccaaauaucccaauucuuccgaucuggaccggcuuagccaaaaccauccuguccugaacaugauugaugugaauaaguccucucucaacaucagcggcuacaauuuuucccugggggcggccguuaaagcuggagccugcaugcuugacggcgggaacaugcuggagacgauuaagaucagcccccagaccguggauggaauccucaaaucuauucugaaggucaaacgcgcucugggcauguucguguccgacacaccuggcgagagaaaucccuaugaaaacauccucuacaagguuugucugagcgggaauggauggccuuauauugccucucggaccagcaucgugggccgcgcgugggagaacacagucguggaucuugaauccaauaagaaccagccgaaagucgggaauaacggaucuaauaagaugcugcagagcuccggcuuugccaccgggcucacguacagccaacugaugacacugagagacucuaugcuucagcucgaucccaccgcuaaaacauggauugacaucgagggacggccugaggaucccguggaacuggcccuguuccagccuuccagcggcugcuacauucacuuuuucagagagcccaccgaccucaagcaguuuaaacaagacgcuaaguauucucauggcaucgauguuaacgaccuguucuccgcccagccggggcuuaccagcgccgugcuggaagcucucccucgcaauaugguccugacaugucagggauccgaugacauccggaagcugcuugauucucaggacagaaaagauauuaagcucaucgacauuagccuguccaaagcggaugcccgcaaguuugagaacgacgugugggaucaauucaaagaccugugccacaugcauacgggcaucguuguggaaaagaagaaaaagggagggaaacaggagaugacaccccacugugcucuccuggauugcauuauguuugacgccgccgucucuggcgggcuuaacgugccuacccugcgggcugugcuccccaccgacaugguuuucagaacaaucaccacgaaggucgugcugugaggacuagucccuguucccagagcccacuuuuuuuucuuuuuuugaaauaaaauagccugucuuucagaucuaaaaaaaaaaaaaaaaaaaaaaaaaaaaaaaaaaaaaaaaaaaaaaaaaaaaaaaaaaaaaaaaaaaaaaaaaaaaaaaaaaaaaaaaaaaaaaaaaaaa

SEQ ID NO: 21104 - RNA, 2009 nt, Artificial Sequence; identical to SEQ ID NO: 21098
  mRNA product Design a-1 (A100) comprising derived and/or modified sequence from LASV(Pinneo-NIG-1969;Clade I)__AIT17837__SP-IgE_NP(2-569) (opt5)

SEQ ID NO: 21105 - RNA, 2009 nt, Artificial Sequence
  mRNA product Design a-1 (A100) comprising derived and/or modified sequence from LASV(ISTH0009-NIG-2011;Clade II)__AIT17405__SP-IgE_NP(2-569) (opt5)
aggagagucccgcagucggcguccagcggcucugcuuguucgugugugugucguugcaggccuuauucaagcuuaccauggacuggaccuggauccuguuccucguggccgcugccacaagaguccacagcagcguguccaaggaggucaaaucuuuccuguggacccagagccucagacgggaacuguccggcuacugcucuaacaucaaacuucaaguugugaaggacgcccaggcucugcuccacgggcuggauuuuagcgagguguccaauguccagcgccuuaugagaaagcagaaacgggacgauucugaccugaagcgccucagagaucugaaccaagccgugaauaaccugguugaacucaagagcacacagcagaaauccauucugcgggugggaacgcuuaccagcgacgaucugcucacacuggcggcugaccuugagaagcugaaaucuaaggucauccgcaccgaaagaccccucuccagcggcguguauauggggaaucugucuacacagcaacuggagcagcggcgcgcccuccugaacaugauuggaaugguuggcggggcccagggaacccagccuggcagagauggcgugguccgggugugggacgugaaaaauccggaucuucugaacaaucaauucgggacaaugcccucccucacccuggcuugucuuacgaagcagggacaggucgaccugaacgaugccguucucgcucugaccgaccugggccucaucuacacagccaaguauccuaauagcucugaccuggaucgccuuucccaaagccaucccauucugaacaugguggacaucaaaaaguccucucucaauaucagcggguacaacuuuucccugggagcggccgugaaagcuggcgccugcaugcuugaugggggaaauaugcuggagaccauuaaggucacaccucagaccauggacggcauccucaaaagcauucugaaggugaaaagaucucugggcauguucguuuccgauacgcccggggaacggaacccuuaugagaacauccucuacaagauuugucugagcggagacggcuggccguauaucgcuucucgcacaagcauuguggggagagccugggaaaauaccacagucgaucuugaguccgacggaaagccccagaaagugggcucugcggggagcaacaagucccugcagagcgccggauuuccuaccggccucaccuacucucaacugaugacacugaaagauuccaugaugcagcuugaccccagcgcuaagacguggaucgauaucgagggccggccugaagaccccguugagauugcccucuaccagccgaugucugggugcuauauccacuucuuuagagaaccuaccgaccugaaacaguucaagcaagaugcuaaguacucccauggaauugacguggccgaucuguuucccgcccagccuggccucacaagcgcugucaucgaggcgcugccccgcaauauggugcuuaccugucagggguccgacgauauuaaacggcugcucgacucucagggaagacgcgauaucaagcugaucgacauugcccugagcaaagcugauucccggagauucgaaaacgccgucugggaccaaugcaaggaucuuugucacaugcauacaggcgugguuguggagaaaaagaagcgcgggggcaaagaggaaaucacgccccacugcgcccucauggacuguauuauguaugaugcugccgucucuggaggccugaauaucccugugcugcgggcgguucucccgagagacaugguguuucgcaccagcucccccaaggucgugcugugaggacuagucccuguucccagagcccacuuuuuuuucuuuuuuugaaauaaaauagccugucuuucagaucuaaaaaaaaaaaaaaaaaaaaaaaaaaaaaaaaaaaaaaaaaaaaaaaaaaaaaaaaaaaaaaaaaaaaaaaaaaaaaaaaaaaaaaaaaaaaaaaaaaaa

SEQ ID NO: 21106 - RNA, 2009 nt, Artificial Sequence
  mRNA product Design a-1 (A100) comprising derived and/or modified sequence from LASV(ISTH2010-NIG-2012;Clade II)__AIT17483__SP-IgE_NP(2-569) (opt5)
aggagagucccgcagucggcguccagcggcucugcuuguucgugugugugucguugcaggccuuauucaagcuuaccauggacuggaccuggauccuguuccucguggccgcugccacaagaguccacagcagcgccuccaaggaggugaaaucuuuccuguggacccagagccucagacgggaacuguccggcuacugcucuaacaucaaacuucaagucguuaaggacgcucaggcccugcuccacgggcuggauuuuagcgagguguccaaugugcagcgccuuaugagaaagcagaaacgggacgauucugaccugaagcgccucagagaucugaaccaagcggucaauaaccugguggaacucaagagcacacagcagaaauccauucugcggguuggaacgcuuaccagcgacgaucugcucacacuggcugccgaccuugagaagcugaaaucuaaggugauccgcaccgaaagaccccucuccagcggcgucuauauggggaaucugucuacacagcaacuggagcagcggcgcgcccuccugaaccuuauuggaauggugggcggggcucagggaacccagccuggcagagauggcguugugcgggucugggacgugaaaaauccggaucugcucaacaaucaauucgggacaaugcccucccugacccuugccugucugacgaagcagggacagguggaccucaacgaugcuguccuggcccugaccgaccucggccugaucuacacagcgaaguauccuaauagcucugaccuugaucgccugucccaaagccaucccauucucaacaugguugacaccaaaaaguccucucugaauaucagcggguuuaacuucucccuuggagccgcugugaaagccggcgcuugcaugcuggaugggggaaauaugcucgagacaaucaaggugaccccucagacgauggacggcauucugaaaagcauccugaaggucaaaaagucucucggcauguuuguguccgauacacccggggaaagaaacccuuacgagaacauucuguauaagaucugucuuagcggagacggcuggccguacauugccucucggaccagcaucguugggcgcgcgugggaaaauacaaccguggaucuggaguccgacggaaaaccccacaaggucggcaccgccgggucuaacaaaagccuccaguccgcuggauucccuacaggccugacguauagccagcugaugacccuuaaggauucuaugaugcaacucgaccccuccgccaaaacauggauugauaucgagggcagaccugaagaccccguggagaucgcucuguaccagccgaugagcgggugcuacauucacuuuuuccgggaaccuaccgaccugaagcaguuuaagcaggaugccaaauauucucauggaaucgacguugccgaucucuuccccgcucaaccuggccugacauccgcggugauugaggcccuucccagaaauaugguccugaccugucaggggagcgacgauaucaagcgccuccuggacucccagggacggagagauauuaaacugaucgacaucgcucuuucuaaggccgauagccgccgguuugaaaacgccgugugggaccagugcaaagaucucugucauaugcacacgggcgucgugguugagaagaagaaaagagggggcaaggaggaaauuacaccccacugcgcucugauggacuguaucauguacgaugccgcgguguccggaggccugaauauuccuguccuccgcgcugugcugccgcgggacaugguuuucagaaccucuagccccaaagugguccuuugaggacuagucccuguucccagagcccacuuuuuuuucuuuuuuugaaauaaaauagccugucuuucagaucuaaaaaaaaaaaaaaaaaaaaaaaaaaaaaaaaaaaaaaaaaaaaaaaaaaaaaaaaaaaaaaaaaaaaaaaaaaaaaaaaaaaaaaaaaaaaaaaaaaaa

SEQ ID NO: 21107 - RNA, 2009 nt, Artificial Sequence
  mRNA product Design a-1 (A100) comprising derived and/or modified sequence from LASV(Lassa virus/H.sapiens-wt/NGA/2015/ISTH_0543;Clade II)__AVO03640__SP-IgE_NP(2-569) (opt5)
aggagagucccgcagucggcguccagcggcucugcuuguucgugugugugucguugcaggccuuauucaagcuuaccauggacuggaccuggauccuguuccucguggccgcugccacaagaguccacagcagcgccuccaaggaggugaaaucuuuccuguggacccagagccucagacgggaacuguccggcuacugcucuaacaucaaacuucaagucguuaaggacgcucaggcccugcuccacgggcuggauuuuagcgagguguccaaugugcagcgccuuaugagaaagcagaaacgggacgauucugaccugaagcgccucagagaucugaaccaagcggucaauaaccugguggaacucaagagcacacagcagaaauccauucugcggguuggaacgcuuaccagcgacgaucugcucacacuggcugccgaccuugagaagcugaaaucuaaggugauccgcaccgaaagaccccucuccagcggcgucuauauggggaaucugucuacacagcaacuggagcagcggcgcgcccuccugaacaugauuggaauggugggcggggcucagggaacccagccuggcagagauggcguugugcgggucugggacgugaaaaauccggaucuucugaacaaucaauucgggacaaugcccucccucacccuggccugucuuacgaagcagggacagguggaccugaacgaugcuguccucgcccugaccgaccugggccucaucuacacagcgaaguauccuaauagcucugaccuggaucgccuuucccaaagccaucccauucugaacaugguugacaccaaaaaguccucucucaauaucagcggguacaacuuuucccugggagccgcugugaaagccggcgcuugcaugcuugaugggggaaauaugcuggagacaaucaaggugaccccucagacgauggacggcauucucaaaagcauccugaaggucaaaaagucucugggcauguucguguccgauacacccggggaaagaaacccuuaugagaacauucucuacaagaucugucugagcggagacggcuggccguauauugccucucggaccagcaucguugggcgcgcgugggaaaauacaaccguggaucuugaguccgacggaaaaccccagaaggucggcucugccgggagcaacaaaucccugcagagcgcuggauuuccuaccggccucacauacucucaacugaugacgcugaaggauuccaugaugcagcuugaccccagcgccaaaaccuggauugauaucgagggcagaccugaagaccccguggagaucgcucucuaccagccgaugucugggugcuauauucacuucuuucgggaaccuacagaccugaagcaguucaagcaagaugccaaauacucccauggaaucgacguugccgaucuguuucccgcucagccuggccucaccagcgcggugauugaggcccugcccagaaauaugguccuuacaugucagggguccgacgauaucaagcgccugcucgacucucagggacggaaagauauuaagcugaucgacaucgcucugagcaaagccgauuccagacgcuucgaaaacgccgugugggaccaaugcaaggaucuuugucacaugcauaccggcgucgugguugagaagaaaaagagagggggcaaagaggaaauuacgccccacugcgcucucauggacuguaucauguaugaugccgcggugucuggaggccugaauauuccuguccugcgggcugugcucccgcgcgacaugguuuuucggacaagcucccccaaggugguccugugaggacuagucccuguucccagagcccacuuuuuuuucuuuuuuugaaauaaaauagccugucuuucagaucuaaaaaaaaaaaaaaaaaaaaaaaaaaaaaaaaaaaaaaaaaaaaaaaaaaaaaaaaaaaaaaaaaaaaaaaaaaaaaaaaaaaaaaaaaaaaaaaaaaaa

SEQ ID NO: 21108 - RNA, 2009 nt, Artificial Sequence
  mRNA product Design a-1 (A100) comprising derived and/or modified sequence from LASV(Lassa virus/H.sapiens-wt/NGA/2016/ISTH_0009;Clade II)__AVO03572__SP-IgE_NP(2-569) (opt5)
aggagagucccgcagucggcguccagcggcucugcuuguucgugugugugucguugcaggccuuauucaagcuuaccauggacuggaccuggauccuguuccucguggccgcugccacaagaguccacagcagcgccuccaaggaggugaaaucuuuccuguggacccagagccucagacgggaacuguccggcuacugcucuaacaucaaacuucaagucguuaaggacgcucaggcccugcuccacgggcuggauuuuagcgagguguccaaugugcagcgccuuaugagaaagcagaaacgggacgauucugaccugaagcgccucagagaucugaaccaagcggucaauaaccugguggaacucaagagcacacagcagaaauccauucugcggguuggaacgcuuaccagcgacgaucugcucacacuggcugccgaccuugagaagcugaaaucuaaggugauccgcaccgaaagaccccucuccagcggcgucuauauggggaaucugucuacacagcaacuggagcagcggcgcgcccuccugaacaugauuggaauggugggcggggcucagggaacccagccuggcagagauggcguugugcgggucugggacgugaaaaauccggaucuucugaacaaucaauucgggacaaugcccucccucacccuggccugucuuacgaagcagggacagguggaccugaacgaugcuguccucgcccugaccgaccugggccucaucuacacagcgaaguauccuaauagcucugaccuggaucgccuuucccaaagccaucccauucugaacaugguugacaccaaaaaguccucucucaauaucagcggguacaacuuuucccugggagccgcugugaaagccggcgcuugcaugcuugaugggggaaauaugcuggagacaaucaaggugaccccucagacgauggacggcauucucaaaagcauccugaaggucaaaaagucucugggcauguucguguccgauacacccggggaaagaaacccuuaugagaacauucucuacaagaucugucugagcggagacggcuggccguauauugccucucggaccagcaucguugggcgcgcgugggaaaauacaaccguggaucuugaguccgacggaaaaccccagaaggucggcucugccgggagcaacaaaucccugcagagcgcuggauuuccuaccggccucacauacucucaacugaugacgcugaaggauuccaugaugcagcuugaccccagcgccaaaaccuggauugauaucgagggcagaccugaagaccccguggagaucgcucucuaccagccgaugucugggugcuauauucacuucuuucgggaaccuacagaccugaagcaguucaagcaagaugccaaauacucccauggaaucgacguugccgaucuguuucccgcucagccuggccucaccagcgcggugauugaggcccugcccagaaauaugguccuuacaugucagggguccgacgauaucaagcgccugcucgacucucagggacggagagauauuaaacugaucgacaucgcucugagcaaggccgauucccgccgguucgaaaacgccgugugggaccaaugcaaagaucuuugucacaugcauaccggcgucgugguugagaagaagaaaagagggggcaaggaggaaauuacgccccacugcgcucucauggacuguaucauguaugaugccgcggugucuggaggccugaauauuccuguccugcgcgcugugcucccgcgggacaugguuuuuagaacaagcucccccaaagugguccugugaggacuagucccuguucccagagcccacuuuuuuuucuuuuuuugaaauaaaauagccugucuuucagaucuaaaaaaaaaaaaaaaaaaaaaaaaaaaaaaaaaaaaaaaaaaaaaaaaaaaaaaaaaaaaaaaaaaaaaaaaaaaaaaaaaaaaaaaaaaaaaaaaaaaa

SEQ ID NO: 21109 - RNA, 2009 nt, Artificial Sequence
  mRNA product Design a-1 (A100) comprising derived and/or modified sequence from LASV(Lassa virus/H.sapiens-wt/NGA/2016/ISTH_0017;Clade II)__AVO03568__SP-IgE_NP(2-569) (opt5)
aggagagucccgcagucggcguccagcggcucugcuuguucgugugugugucguugcaggccuuauucaagcuuaccauggacuggaccuggauccuguuccucguggccgcugccacaagaguccacagcagcgccuccaaggaggugaaaucuuuccuguggacccagagccucagacgggaacuguccggcuacugcucuagcaucaaacuucaagucguuaaggacgcucaggcccugcuccacgggcuggauuuuuccgaggugucuaacgugcagcgccuuaugagaaagcagaaacgggacgauagcgaccugaagcgccucagagaucugaaucaagcggucaacaaucugguggaacucaaguccacacagcagaaaagcauucugcggguuggaacgcuuaccucugacgaucugcucacacuggcugccgaccuugagaagcugaaauccaaggugauccgcaccgaaagaccccucagcucuggcgucuauauggggaaccuguccacacagcaacuggagcagcggcgcgcccuccugaauaugauuggaauggcuggcggggcccagggaacccagccuggcagagauggcgugguucgggugugggacgucaaaaacccggaucuucugaauaaccaauucgggacaaugcccagccucacccuggcuugucuuacgaagcagggacagguggaccugaaugaugccgugcucgcgcugaccgaccugggccucaucuacacagccaaguauccuaacucuuccgaccuggaucgccuuagccaaucccaucccauucugaauauggucgacaccaaaaagucuagccucaacaucuccggguacaauuuuagccugggagcugccguuaaagcuggcgccugcaugcuugaugggggaaacaugcuggagacaaucaaggugaccccucagacgauggacggcauucucaaaucuauccugaaggugaaaagaucccugggcauguucgucagcgaugcgcccggggaacggaauccuuaugagaacauucucuacaagaucugucugucuggagacggcuggccguauauugccagccgcacauccaucguggggagagcuugggaaaacaccacaguugaucuugagucugacggaaagccccagaaagugggcgccaccgggagcaauaagucccugcagagcgcuggauuuccuaccggccucacauacucucaacugaugacgcugaaagauuccaugaugcagcuugaccccagcgccaagaccuggauugauaucgagggccggccugaagaccccgucgagguggcccucuaccagccgguuucugggugcuauauccacuucuuuagagaaccuacagaccugaaacaguucaagcaagaugcuaaguacucccauggaauugacguggcggaucuguuucccgcccagccuggccucaccagcgcugucaucgaggcccugccccgcaacauggugcuuacaugucagggguccgacgauauuaaaaagcugcucgacucucagggacggaaagauaucaagcugauugacaucgcccugagcaaagcugauuccagacgcuucgaaaaugccgucugggaccaaugcaaggaucuuugucacaugcauaccggcgugguuguggagaagaaaaagagagggggcaaagaggaaaucacgccccacugcgcgcucauggacuguauuauguaugaugcugccgucucuggaggccugaacaucccugugcugcgggccguucucccgcgcgacaugguguuucggacaagcucccccaaggucgugcugugaggacuagucccuguucccagagcccacuuuuuuuucuuuuuuugaaauaaaauagccugucuuucagaucuaaaaaaaaaaaaaaaaaaaaaaaaaaaaaaaaaaaaaaaaaaaaaaaaaaaaaaaaaaaaaaaaaaaaaaaaaaaaaaaaaaaaaaaaaaaaaaaaaaaa

SEQ ID NO: 21110 - RNA, 2009 nt, Artificial Sequence
  mRNA product Design a-1 (A100) comprising derived and/or modified sequence from LASV(Lassa virus/H.sapiens-wt/NGA/2018/ISTH_0959;Clade II)__AVV65100__SP-IgE_NP(2-569) (opt5)
aggagagucccgcagucggcguccagcggcucugcuuguucgugugugugucguugcaggccuuauucaagcuuaccauggacuggaccuggauccuguuccucguggccgcugccacaagaguccacagcagcgccuccaaggaggugaaaucuuuccuguggacccagagccucagacgggaacuguccggcuacugcucuaacaucaaacuucaagucguuaaggacgcucaggcccugcuccacgggcuggauuuuagcgagguguccaaugugcagcgccuuaugagaaagcagaaacgggacgauucugaccugaagcgccucagagaucugaaccaagcggucaauaaccugguggaacucaagagcacccagcagaaauccauucugcggguuggaacgcuuaccagcgacgaucugcucacacuggcugccgaccuugagaagcugaaaucuaaggugauccgcaccgaaagaccccucuccagcggcgucuauauggggaaucugucuacacagcaacuggagcagcggcgcgcccuccugaaccuuauuggaauggugggcggggcucagggaacccagccuggcagagauggcguugugcgggucugggacgugaaaaauccggaucugcucaacaaucaauucgggacaaugcccucccugacccuugccugucugacgaagcagggacagguggaccucaacgaugucguucuggcucugaccgaccucggccugaucuacacagccaaguauccuaauagcucugaccuugaucgccugucccaaagccaucccauucucaacaugguggacaccaaaaaguccucucugaauaucagcggguuuaacuucucccuuggagcggccgugaaagcuggcgccugcaugcuggaugggggaaauaugcucgagacaaucaaggucaccccucagacgauggacggcauucugaaaagcauccugaaggugaaaaagucucucggcauguuuguuuccgauacacccggggaaagaaacccuuacgagaacauucuguauaagaucugucuuagcggagacggcuggccguacauugcuucucggaccagcaucguggggcgcgccugggaaaauacaaccgucgaucuggaguccgacggaaaaccccacaaggugggcaccgcggggucuaacaaaagccuccaguccgccggauucccuacaggccugacguauagccagcugaugacccuuaaggauucuaugaugcaacucgaccccuccgcuaaaacauggauugauaucgagggcagaccugaagaccccguugagaucgcccuguaccagccgaugagcgggugcuacauucacuuuuuccgggaaccuaccgaccugaagcaguuuaagcaggaugcuaaauauucucauggaaucgacguggccgaucucuuccccgcccaaccuggccugacauccgcugucauugaggcgcuucccagaaauauggugcugaccugucaggggagcgacgauaucaagcgccuccuggacucccagggacggaaagauauuaagcugaucgacaucgcccuuucuaaaacggauagcagacgcuuugaaaacgcugucugggaccagugcaaggaucucugucauaugcacacaggcgugguuguggagaagaaaaagagagggggcaaagaggaaauuacaccccacugcgcccugauggacuguaucauguacgaugccgcugucuccggaggccugaauauuccugugcuccgggccguucugccgcgcgacaugguguuccggaccucuagccccaaggucgugcuuugaggacuagucccuguucccagagcccacuuuuuuuucuuuuuuugaaauaaaauagccugucuuucagaucuaaaaaaaaaaaaaaaaaaaaaaaaaaaaaaaaaaaaaaaaaaaaaaaaaaaaaaaaaaaaaaaaaaaaaaaaaaaaaaaaaaaaaaaaaaaaaaaaaaaa

SEQ ID NO: 21111 - RNA, 2009 nt, Artificial Sequence
  mRNA product Design a-1 (A100) comprising derived and/or modified sequence from LASV(LASV003-NIG-2008;Clade II)__AIT17581__SP-IgE_NP(2-569) (opt5)
aggagagucccgcagucggcguccagcggcucugcuuguucgugugugugucguugcaggccuuauucaagcuuaccauggacuggaccuggauccuguuccucguggccgcugccacaagaguccacagcagcgccuccaaggaggugaaaucuuuccuguggacccagagccucagacgggaacuguccggcuacugcucuagcaucaaacuucaagucguuaaggacgcucaggcccugcuccacgggcuggauuuuuccgaggugucuaacgugcagcgccuuaugagaaagcagaaacgggacgauagcgaccugaagcgccucagagaucugaaucaagcggucaacaaucugguggaacucaaguccacccagcagaaaagcguucugcgggugggaacgcuuaccucugacgaucugcucacacuggcugccgaccuugagaagcugaaauccaaggucauucgcaccgaaagaccccucagcucuggcguguauauggggaaccuguccgcccagcaacuggagcagcggcgcacacuccugaauaugaucggaaugguuggcggggcucagggaacccagccuggcagagauggcgugguccgggugugggacgugaaaaacccggaucuucugaauaaccaauucgggacaaugcccagccucacccuggccugucuuacgaagcagggacaggucgaccugaaugauguugugcucgcucugaccgaccugggccucauuuacacagccaaguauccuaacucuuccgaccuggaucgccuuagccaaucccaucccauccugucuaugguggacaccaaaaagagcucccucaauauuagcggguacaacuuuucucugggagcggccgucaaagcuggcgccugcaugcuugaugggggaaauaugcuggagacaaucaaggugaccccucagacgauggacggcauccucaaauccauucugaagguuaaaaagagccugggcauguucgugucugauacacccggggaaagaaacccuuaugagaauauccucuacaagauuugucugagcggagacggcuggccguauaucgcuucccggaccucuauugucgggcgcgccugggaaaacacaaccguggaucuugagagcgacggaaaaccccagaagguuggcaccgcgggguccaacaaaagccugcagucugccggauuuccuacaggccucacguacucccaacugaugacccugaaggauagcaugaugcagcuugaccccucugcuaaaacauggaucgauauugagggcagaccugaagaccccguggagaucgcccucuaccagccgauguccgggugcuauauccacuucuuucgggaaccuaccgaccugaagcaguucaagcaagaugcuaaauacagccauggaauugacgucacagaucuguuucccgcccagccuggccucaccuccgccgugaucgaggcucugcccagaaauaugguccuuacgugucaggggucugacgauauuaagcgccugcucgacagccagggacggagagauaucaaacugauugacaucgcgcuguccaaggccgauucucgccgguucgaaaacgcugugugggaccaaugcaaagaucuuugucacaugcauacaggcguuguggucgagaagaagaaaagagggggcaaggaggaaaucacaccccacugcgcccucauggacuguauuauguaugaugccgcugugagcggaggccugaauaucccuguucugcgcgccgugcucccgcgggacauggucuuuagaaccuccagccccaaaguggugcugugaggacuagucccuguucccagagcccacuuuuuuuucuuuuuuugaaauaaaauagccugucuuucagaucuaaaaaaaaaaaaaaaaaaaaaaaaaaaaaaaaaaaaaaaaaaaaaaaaaaaaaaaaaaaaaaaaaaaaaaaaaaaaaaaaaaaaaaaaaaaaaaaaaaaa

SEQ ID NO: 21112 - RNA, 2009 nt, Artificial Sequence
  mRNA product Design a-1 (A100) comprising derived and/or modified sequence from LASV(LASV035-NIG-2009;Clade II)__AIT17589__SP-IgE_NP(2-569) (opt5)
aggagagucccgcagucggcguccagcggcucugcuuguucgugugugugucguugcaggccuuauucaagcuuaccauggacuggaccuggauccuguuccucguggccgcugccacaagaguccacagcagcgccuccaaggaggugaaaucuuuccuguggacccagagccucagacgggaacuguccggcuacugcucuagcaucaaacuucaagucguuaaagacgcucaggcccugcuccacgggcuggauuuuuccgaggugucuaacgugcagcgccuuaugagaaagcagaaacgggacgauagcgaccugaagcgccucagagaucugaaucaagcggucaacaaucugguggaacucaaguccacacagcagaaaagcauucugcggguuggaacgcuuaccucugacgaucugcucacacuggcugccgaccuugagaagcugaaauccaaggugauccgcaccgaaagaccccucagcucuggcgucuauauggggaaccuguccgcccagcaacuggagcagcggcgcgcucuccugaauaugauuggaauggugggcggggcccagggaacacagccuggcagagauggcguugugcgggucugggacgugaaaaacccggaucuucugaauaaccaauucgggaccaugcccagccucacacuggcuugucuuaccaagcagggacagguggaccugaaugaugccguccucgcgcugacggaccugggccucaucuacaccgccaaguauccuaacucuuccgaccuggaucgccuuagccaaucccaucccauucugaauaugguugacacaaagaagucuagccucaacaucuccggguacaauuuuagccugggagcugccgugaaagcuggcgccugcaugcuugaugggggaaacaugcuggagaccaucaaggugacaccucagaccauggacggcauucucaaaucuauccugaaggucaaaagaucccugggcauguucgugagcgauacgcccggggaacggaauccuuaugagaacauucucuacaagaucugucugucuggagacggcuggccguauauugcgagccgcacauccaucguugggagagccugggaaaacaccacaguggaucuugagucugacggaaagccccagaaagucggcaccaccgggagcaauaagucccugcagagcgcuggauuuccuacaggccucacguacucucaacugaugacccugaaagauuccaugaugcagcuugaccccagcgccaagacauggauugauaucgagggccggccugaagaccccguggagaucgcucucuaccagccgaugucugggugcuauauucacuucuuuagagaaccuaccgaccugaaacaguucaagcaagaugccaaguacucccauggaaucgacguugccgaucuguuucccgcucagccuggccucacaagcgcggugauugaggcccugccccgcaacaugguccuuaccugucagggguccgacgauaucaaaaagcugcucgacucucagggacggagagauauuaaacugaucgacaucgcucugagcaaggccgauucccgcaaauucgaaaaugccgugugggaccaaugcaaggaucuuugucacaugcauacgggcgucgugguugagaagaaaaagagagggggcaaagaggaaauuacaccccacugcgcucucauggacuguaucauguaugaugccgcggugucuggaggccugaacauuccuguccugcgggcugugcucccgcgcgacaugguuuuucggaccagcucccccaaggugguccugugaggacuagucccuguucccagagcccacuuuuuuuucuuuuuuugaaauaaaauagccugucuuucagaucuaaaaaaaaaaaaaaaaaaaaaaaaaaaaaaaaaaaaaaaaaaaaaaaaaaaaaaaaaaaaaaaaaaaaaaaaaaaaaaaaaaaaaaaaaaaaaaaaaaaa

SEQ ID NO: 21113 - RNA, 2009 nt, Artificial Sequence
  mRNA product Design a-1 (A100) comprising derived and/or modified sequence from LASV(LASV1000-NIG-2009;Clade II)__AIT17783__SP-IgE_NP(2-569) (opt5)
aggagagucccgcagucggcguccagcggcucugcuuguucgugugugugucguugcaggccuuauucaagcuuaccauggacuggaccuggauccuguuccucguggccgcugccacaagaguccacagcagcgccuccaaggaggugaaaucuuuccuguggacccagagccucagacgggaacuguccggcuacugcucuaacaucaaacuucaagucguuaaggacgcucaggcccugcuccacgggcuggauuuuagcgagguguccaaugugcagcgccuuaugagaaagcagaaacgggacgauucugaccugaagcgccucagagaucugaaccaagcggucaauaaccugguggaacucaagagcacacagcagaaauccauucugcggguuggaacgcuuaccagcgacgaucugcucacacuggcugccgaccuugagaagcugaaaucuaaggugauccgcaccgaaagaccccucuccagcggcgucuauauggggaaucugucuacacagcaacuggagcagcggcgcgcccuccugaacaugauuggaauggugggcggggcucagggaacccagccuggcagagauggcguugugcgggucugggacgugaaaaauccggaucuucugaacaaucaauucgggacaaugcccucccucacccuggccugucuuacgaagcagggacagguggaccugaacgaugucguucucgcucugaccgaccugggccucaucuacacagccaaguauccuaauagcucugaccuggaucgccuuucccaaagccaucccauucugaacaugguggacaccaaaaaguccucucucaauaucagcggguacaacuuuucccugggagcggccgugaaagcuggcgccugcaugcuugaugggggaaauaugcuggagacaaucaaggucaccccucagacgauggacggcauucucaaaagcauccugaaggugaaaaagucucugggcauguucguuuccgauacacccggggaaagaaacccuuaugagaacauucucuacaagaucugucugagcggagacggcuggccguauauugcuucucggaccagcaucguggggcgcgccugggaaaauacaaccgucgaucuugaguccgacggaaaaccccagaaggugggcaccgcggggucuaacaaaagccugcaguccgccggauuuccuacaggccucacguacagccaacugaugacccugaaggauucuaugaugcagcuugaccccuccgcuaaaacauggauugauaucgagggcagaccugaagaccccguugagaucgcccucuaccagccggugagcgggugcuauauucacuucuuucgggaaccuaccgaccugaagcaguucaagcaagaugcuaaauacucucauggaaucgacgucgccgaucuguuucccgcccagccuggccucacauccgcugugauugaggcgcugcccagaaauaugguccuuaccugucaggggagcgacgauaucaagcgccugcucgacucccagggacggagagauauuaaacugaucgacaucgcccugucuaaggcugauagccgccgguucgaaaacgccgugugggaccaaugcaaagaucuuugucacaugcauacgggcguuguggucgagaagaagaaaagagggggcaaggaggaaauuacaccccacugcgcccucauggacuguaucauguaugaugcugccguguccggaggccugaauauuccuguucugcgcgcggugcucccgcgggacauggucuuuagaaccucuagccccaaaguggugcugugaggacuagucccuguucccagagcccacuuuuuuuucuuuuuuugaaauaaaauagccugucuuucagaucuaaaaaaaaaaaaaaaaaaaaaaaaaaaaaaaaaaaaaaaaaaaaaaaaaaaaaaaaaaaaaaaaaaaaaaaaaaaaaaaaaaaaaaaaaaaaaaaaaaaa

SEQ ID NO: 21114 - RNA, 2009 nt, Artificial Sequence
  mRNA product Design a-1 (A100) comprising derived and/or modified sequence from LASV(LASV221-NIG-2010;Clade II)__AIT17625__SP-IgE_NP(2-569) (opt5)
aggagagucccgcagucggcguccagcggcucugcuuguucgugugugugucguugcaggccuuauucaagcuuaccauggacuggaccuggauccuguuccucguggccgcugccacaagaguccacagcagcgccuccaaggaggugaaaucuuuccuguggacccagagccucagacgggaacuguccggcuacugcucuagcaucaaacuucaagucguuaaggacgcucaggcccugcuccacgggcuggauuuuuccgaggugucuaacgugcagcgccuuaugagaaagcagcggcgcgacgauagcgaccugaaaagacuccgggaucugaaucaagcggucaacaaucugguggaacucaaguccacacagcaaaagagcauucugcgcguuggaacgcuuaccucugacgaucugcucacacuggcugccgaccuugagaaacugaaguccaaagugaucagaaccgaacggccccucagcucuggcgucuauauggggaaccuguccacacagcagcuggagcagcgcagagcccuccugaauaugauuggaauggugggcggggcucagggaacccagccuggccgggauggcguugugcgcgucugggacgugaagaacccggaucuucugaauaaccaauucgggacaaugcccagccucacccuggccugucuuacgaaacagggacagguggaccugaaugaugcuguccucgcccugaccgaccugggccucaucuacacagcgaaguauccuaacucuuccgaccuggauagacuuagccaaucccaucccauucugaauaugguugacaccaagaaaucuagccucaacaucuccggguacaauuuuagccugggagccgcugugaaggccggcgcuugcaugcuugaugggggaaacaugcuggagacaaucaaagugaccccucagacggucgacggcauucucaagucuauccugaaagugaagcggucccugggcauguucguuagcgauacacccggggaacgcaauccuuaugagaacauucucuacaaaaucugucugucuggagacggcuggccguauauugccagcagaaccuccaucguggggcgggcgugggaaaacacaaccgucgaucuugagucugacggaaagccccagaaggugggcaccgccgggagcaauaaaucccugcagagcgcuggauuuccuacaggccucacguacucucaacugaugacccugaaggauuccaugaugcagcuugaccccagcgccaaaacauggauugauaucgagggcagaccugaagaccccguugagaucgcucucuaccagccgaugucugggugcuauauucacuucuuucgcgaaccuaccgaccugaagcaguucaaacaagaugccaaguacucccauggaaucgacguggccgaucuguuucccgcucagccuggccucacaagcgcggucauugaggcccugccccggaacauggugcuuaccugucagggguccgacgauaucaagagacugcucgacucucagggacgccgggauauuaaacugaucgacaucgcucugagcaaggccgauuccagaaaauucgaaaaugccgucugggaccaaugcaaggaucuuugucacaugcauacgggcgugguuguggagaaaaagaagcgcgggggcaaagaggaaauuacaccccacugcgcucucauggacuguaucauguaugaugccgcggucucuggaggccugaacauuccugugcugcgggcuguucucccgagagacaugguguuucgcaccagcucccccaaggucgugcugugaggacuagucccuguucccagagcccacuuuuuuuucuuuuuuugaaauaaaauagccugucuuucagaucuaaaaaaaaaaaaaaaaaaaaaaaaaaaaaaaaaaaaaaaaaaaaaaaaaaaaaaaaaaaaaaaaaaaaaaaaaaaaaaaaaaaaaaaaaaaaaaaaaaaa

SEQ ID NO: 21115 - RNA, 2009 nt, Artificial Sequence
  mRNA product Design a-1 (A100) comprising derived and/or modified sequence from LASV(LASV237-NIG-2010;Clade II)__AIT17639__SP-IgE_NP(2-569) (opt5)
aggagagucccgcagucggcguccagcggcucugcuuguucgugugugugucguugcaggccuuauucaagcuuaccauggacuggaccuggauccuguuccucguggccgcugccacaagaguccacagcagcgccuccaaggaggugaaaucuuuccuguggacccagagccucagacgggaacuguccggcuacugcucuaacaucaaacuucaagucguuaaggacgcucaggcccugcuccacgggcuggauuuuagcgagguguccaaugugcagcgccuuaugagaaagcagaaacgggacgauucugaccugaagcgccucagagaucugaaccaagcggucaauaaccugguggaacucaagagcacacagcagaaauccauucugcggguuggaacgcuuaccagcgacgaucugcucacacuggcugccgaccuugagaagcugaaaucuaaggugauccgcaccgaaagaccccucuccagcggcgucuauauggggaaucugucuacacagcaacuggagcagcggcgcgcccuccugaacaugauuggaauggugggcggggcucagggaacccagccuggcagagauggcguugugcgggucugggacgugaaaaauccggaucuucugaacaaucaauucgggacaaugcccucccucacccuggccugucuuacgaagcagggacagguggaccugaacgaugcuguccucgcccugaccgaccugggccucaucuacacagcgaaguauccuaauagcucugaccuggaucgccuuucccaaagccaucccauucugaacaugguugacaucaaaaaguccucucucaauaucagcggguacaacuuuucccugggagccgcugugaaagccggcgcuugcaugcuugaugggggaaauaugcuggagaccauuaaggugacaccucagaccauggacggcauccucaaaagcauucugaaggucaaaagaucucugggcauguucguguccgauacgcccggggaacggaacccuuaugagaacauccucuacaagauuugucugagcggagacggcuggccguauaucgccucucgcacaagcauuguugggagagcgugggaaaauaccacaguggaucuugaguccgacggaaagccccagaaagucggcucugccgggagcaacaagucccugcagagcgcuggauuuccuaccggccucaccuacucucaacugaugacacugaaagauuccaugaugcagcuugaccccagcgccaagacguggaucgauaucgagggccggccugaagaccccguggagauugcucucuaccagccgaugucugggugcuauauccacuucuuuagagaaccuaccgaccugaaacaguucaagcaagaugccaaguacucccauggaauugacguugccgaucuguuucccgcucagccuggccucacaagcgcggugaucgaggcccugccccgcaauaugguccuuaccugucagggguccgacgauauuaaacggcugcucgacucucagggaagacgcgauaucaagcugaucgacauugcucugagcaaagccgauucccggagauucgaaaacgccgugugggaccaaugcaaggaucuuugucacaugcauacaggcgucgugguugagaaaaagaagcgcgggggcaaagaggaaaucacgccccacugcgcucucauggacuguauuauguaugaugccgcggugucuggaggccugaauaucccuguccugcgggcugugcucccgagagacaugguuuuucgcaccagcucccccaaggugguccugugaggacuagucccuguucccagagcccacuuuuuuuucuuuuuuugaaauaaaauagccugucuuucagaucuaaaaaaaaaaaaaaaaaaaaaaaaaaaaaaaaaaaaaaaaaaaaaaaaaaaaaaaaaaaaaaaaaaaaaaaaaaaaaaaaaaaaaaaaaaaaaaaaaaaa

SEQ ID NO: 21116 - RNA, 2009 nt, Artificial Sequence
  mRNA product Design a-1 (A100) comprising derived and/or modified sequence from LASV(LASV253-NIG-2011;Clade II)__AIT17671__SP-IgE_NP(2-569) (opt5)
aggagagucccgcagucggcguccagcggcucugcuuguucgugugugugucguugcaggccuuauucaagcuuaccauggacuggaccuggauccuguuccucguggccgcugccacaagaguccacagcagcgccuccaaggaggugaaaucuuuccuguggacccagagccucagacgggaacuguccggcuacugcucuagcaucaaacuucaagucguuaaggacgcucaggcccugcuccacgggcuggauuuuuccgaggugucuaacgugcagcgccuuaugagaaagcagaaacgggacgauagcgaccugaagcgccucagagaucugaaucaagcggucaacaaucugguggaacucaaguccacccagcagaaaagcguucugcgggugggaacgcuuaccucugacgaucugcucacacuggcugccgaccuugagaagcugaaauccaaggucauucgcaccgaaagaccccucagcucuggcguguauauggggaaccuguccacacagcaacuggagcagcggcgcgcccuccugaauaugaucggaaugguuggcggggcucagggaacccagccuggcagagauggcgugguccgggugugggacgugaaaaacccggaucuucugaauaaccaauucgggacaaugcccagccucacccuggccugucuuacgaagcagggacaggucgaccugaaugauguugugcucgcucugaccgaccugggccucauuuacacagccaaguauccuaacucuuccgaccuggaucgccuuagccaaucccaucccauccugaauaugguggacaccaaaaagucuagccucaacauuuccggguacaauuuuagccugggagcggccgucaaagcuggcgccugcaugcuugaugggggaaacaugcuggagacaaucaaggugaccccucagacgauggacggcauccucaaaucuauucugaagguuaaaaagucccugggcauguucgugagcgauacacccggggaaagaaauccuuaugagaacauccucuacaagauuugucugucuggagacggcuggccguauaucgcuagccggaccuccauugucgggcgcgccugggaaaacacaaccguggaucuugagucugacggaaaaccccagaagguuggcaccgcggggagcaauaaaucccugcagagcgccggauuuccuacaggccucacguacucucaacugaugacccugaaggauuccaugaugcagcuugaccccagcgcuaaaacauggaucgauauugagggcagaccugaagaccccguggagaucgcccucuaccagccgaugucugggugcuauauccacuucuuucgggaaccuaccgaccugaagcaguucaagcaagaugcuaaauacucccauggaauugacgucacagaucuguuucccgcccagccuggccucaccagcgccgugaucgaggcucugcccagaaacaugguccuuacgugucagggguccgacgauauuaagcgccugcucgacucucagggacggagagauaucaaacugauugacaucgcgcugagcaaggccgauucccgccgguucgaaaaugcugugugggaccaaugcaaagaucuuugucacaugcauacaggcguuguggucgagaagaagaaaagagggggcaaggaggaaaucacaccccacugcgcccucauggacuguauuauguaugaugccgcugugucuggaggccugaacaucccuguucugcgcgccgugcucccgcgggacauggucuuuagaaccagcucccccaaaguggugcugugaggacuagucccuguucccagagcccacuuuuuuuucuuuuuuugaaauaaaauagccugucuuucagaucuaaaaaaaaaaaaaaaaaaaaaaaaaaaaaaaaaaaaaaaaaaaaaaaaaaaaaaaaaaaaaaaaaaaaaaaaaaaaaaaaaaaaaaaaaaaaaaaaaaaa

SEQ ID NO: 21117 - RNA, 2009 nt, Artificial Sequence
  mRNA product Design a-1 (A100) comprising derived and/or modified sequence from LASV(LASV254-NIG-2011;Clade II)__AIT17675__SP-IgE_NP(2-569) (opt5)
aggagagucccgcagucggcguccagcggcucugcuuguucgugugugugucguugcaggccuuauucaagcuuaccauggacuggaccuggauccuguuccucguggccgcugccacaagaguccacagcagcgccuccaaggaggugaaaucuuuccuguggacccagagccucagacgggaacuguccggcuacugcucuagcaucaaacuucaagucguuaaggacgcucaggcccugcuccacgggcuggauuuuuccgaggugucuaacgugcagcgccuuaugagaaagcagaaacgggacgauagcgaccugaagcgccucagagaucugaaucaagcggucaacaaucugguggaacucaaguccacacagcagaaaagcguucugcgggugggaacgcuuaccucugacgaucugcucacacuggcugccgaccuugagaagcugaaauccaaggucauucgcaccgaaagaccccucagcucuggcguguauauggggaaccuguccacacagcaacuggagcagcggcgcgcccuccugaauaugaucggaaugguuggcggggcucagggaacccagccuggcagagauggcgugguccgggugugggacgugaaaaacccggaucuucugaauaaccaauucgggacaaugcccagccucacccuggccugucuuacgaagcagggacaggucgaccugaaugaugcuguucucgcccugaccgaccugggccucauuuacacagcgaaguauccuaacucuuccgaccuggaucgccuuagccaaucccaucccauccugaauaugguggacaccaaaaagucuagccucaacauuuccggguacaauuuuagccugggagccgcugugaaagccggcgcuugcaugcuugaugggggaaacaugcuggagacaaucaaggucaccccucagacgauggacggcauccucaaaucuauucugaaggugaaaaagucccugggcauguucguuagcgauacacccggggaaagaaauccuuaugagaacauccucuacaagauuugucugucuggagacggcuggccguauaucgccagccggaccuccauuguggggcgcgcgugggaaaacacaaucgucgaucuugagucugacggaaaaccccagaaggugggcaccgccgggagcaauaaaucccugcagagcgcuggauuuccuaccggccucacauacucucaacugaugacgcugaaggauuccaugaugcagcuugaccccagcgccaaaaccuggauugauaucgagggcagaccugaagaccccguugagaucgcucucuaccagccgaugucugggugcuauauucacuucuuucgggaaccuacagaccugaagcaguucaagcaagaugccaaauacucccauggaaucgacguggccgaucuguuucccgcucagccuggccucaccagcgcggucauugaggcccugcccagaaacauggugcuuacaugucagggguccgacgauaucaagcgccugcucgacucucagggacggagagauauuaaacugaucgacaucgcucugagcaaggccgauucccgccgguucgaaaaugccgucugggaccaaugcaaagaucuuugucacaugcauaccggcgugguuguggagaagaagaaaagagggggcaaggaggaaauuacgccccacugcgcucucauggacuguaucauguaugaugccgcggucucuggaggccugaacauuccugugcugcgcgcuguucucccgcgggacaugguguuuagaacaagcucccccaaagucgugcugugaggacuagucccuguucccagagcccacuuuuuuuucuuuuuuugaaauaaaauagccugucuuucagaucuaaaaaaaaaaaaaaaaaaaaaaaaaaaaaaaaaaaaaaaaaaaaaaaaaaaaaaaaaaaaaaaaaaaaaaaaaaaaaaaaaaaaaaaaaaaaaaaaaaaa

SEQ ID NO: 21118 - RNA, 2009 nt, Artificial Sequence
  mRNA product Design a-1 (A100) comprising derived and/or modified sequence from LASV(Nig08-04;Clade II)__ADU56611__SP-IgE_NP(2-569) (opt5)
aggagagucccgcagucggcguccagcggcucugcuuguucgugugugugucguugcaggccuuauucaagcuuaccauggacuggaccuggauccuguuccucguggccgcugccacaagaguccacagcagcgccuccaaggaggugaaaucuuuccuguggacccagagccucagacgggaacuguccggcuacugcucuaacaucaaacuucaagucguuaaggacgcucaggcccugcuccacgggcuggauuuuagcgagguguccaaugugcagcgccuuaugagaaagcagaaacgggacgauggagaccugaagcgccucagagaucugaaccaagcggucaauaaccugguggaacucaagucuacccagcagaaaagcguucugcgggugggcacgcuuaccuccgacgaucugcucacacuggcugccgaccuugagaagcugaaaagcaaggucauucgcaccgaaagaccccucucuuccgggguguauaugggaaaucugagcacacagcaacuggagcagcggaaagcccuccugucuaugaucggcaugguugggggagcucagggcacccagccuggccgcgaugggguggucagagugugggacgugaagaacccggaucuucugaauaaccaauucggaacaaugcccucccucacccuggccugucuuacgaagcagggccaggucgaccugaaugaugcuguucucgcccugaccgaccuggggcucauuuacacagcgaaauauccuaacagcucugaccuggaucggcuuucccaaagccaucccauccugaauaugguggacaccaagaaauccucucucaacauuagcggauacaauuuuucccugggcgccgcugugaaggccggggcuugcaugcuugauggaggcaacaugcuggagacaaucaaagucaccccucagacgauggacggcauccucaagagcauucugaaagugaagcgcucucuggggauguucguuuccgauacacccggagaaagaaauccuuaugagaacauccucuacaagauuugucugagcggcgacggguggccguauaucgccucucggaccagcauugugggacgcgcgugggaaaacacaaccgucgaucuugaguccgacggcaaaccccagaagguggggaccgccggaucuaauaaaagccugcaguccgcuggcuuuccuacaggccucacguacagccaacugaugacccugaaggauucuaugaugcagcuugaccccuccgccaaaacauggaucgauauugaggggagaccugaagaccccguugagaucgcucucuaccagccgaugagcggaugcuauauccacuucuuucgggaaccuaccgaccugaagcaguucaagcaagaugccaaauacucucauggcauugacgugacagaucuguuuuccgcccagcccgggcucaccagcgcugucaucgaggcgcugccuagaaacauggugcuuacgugucagggauccgacgauauuaagaaacugcucgacucucagggccgccgggauaucaagcugauugacaucagccugaauaaagccgauuccagacgcuucgaaaacgcugucugggaccaaugcaaggaucuuugucacaugcauacaggggugguuguggagaagaaaaagcggggcggaaaagaggaaaucacaccccacugcgcccucauggacuguauuauguuugaugccgcugucucuggcgggcugaauauccccauucugagagccgugcucccucgcgacaugguuuuccggaccagcuccccgaaggugguccugugaggacuagucccuguucccagagcccacuuuuuuuucuuuuuuugaaauaaaauagccugucuuucagaucuaaaaaaaaaaaaaaaaaaaaaaaaaaaaaaaaaaaaaaaaaaaaaaaaaaaaaaaaaaaaaaaaaaaaaaaaaaaaaaaaaaaaaaaaaaaaaaaaaaaa

SEQ ID NO: 21119 - RNA, 2012 nt, Artificial Sequence
  mRNA product Design a-1 (A100) comprising derived and/or modified sequence from LASV(GA391;Clade III)__AAA46284__SP-IgE_NP(2-570) (opt5)
aggagagucccgcagucggcguccagcggcucugcuuguucgugugugugucguugcaggccuuauucaagcuuaccauggacuggaccuggauccuguuccucguggccgcugccacaagaguccacagcagcgccuccaaggaggugagaucuugccuguggacccagagccuccggcgcgaacuguccggcuacuguucuaacaucaaacuucaagucguuaaggacgcucaggcccugcuccacgggcuggauuucagcgagguguccaaugugcagagacuuaugcggaaacagaagcgcgacgauggagaccugaaaagacuccgggaucugaaccaagcggucaauaaccugguggaacucaagucuacacagcagaaaagcguucugcgcgugggcacgcuuuccagcgacgaucugcucauucuggcugccgaccuugagaaacugaagucuaaagucaccagaacagaacggccccucuccagcgggguguauaugggaaaucugucuucccagcaacuggaucagcgcagagcccuccugaacaugaucggcaugaccgggguuagcggaggcggcaagggggcuucuaauggaauugugcgggucugggacgugaaaaacgccgagcuucugaauaaccaguuuggcacaaugccuucccucacccuggcuugccuuacaaagcaggggcaaguggaucugaaugacgccguccaggcgcucaccgaucugggacugaucuacacggccaaguauccgaacagcuccgaccucgaccgccugucucagagccaucccauucuuaauaugaucgauaccaaaaaguccagccugaacaucucuggcuacaauuucucccucggggcugccguuaaagcuggagccuguaugcuggacggcggcaacaugcuugagacaauuaaggugagcccucaaaccauggaugggauccugaaaucuauucucaaggugaaaaagagccugggaauguuugucuccgacacacccggcgaaagaaacccuuaugagaauauccuguacaagauuugccucucuggggauggauggagcuauaucgcgucccggaccagcauugugggccgcgccugggaaaacacgguuguggaccuggagcaggauaauaaaccccagaagaucgggaacggaggcucuaauaaaucccuucagagcgcuggcuucgccgcugggcugaucuacucucaacucaugacacugaaggacuuuaaauguuucaaccugauuccuaaugccaagaccuggauggauaucgagggaagaccggaagaccccgucgagauugcccuuuaccagccuuccagcggcugcuaugugcacuuuuuccgggaacccacagaucucaagcaguuuaaacaggacgcuaaguacucccaugggagagacguuaccgaucuguucgcggcccaaccuggacugaccucugcugugaucgaggcccucccccgcaacauggucauuacaugucagggcagcgaagacauccggaaacugcuugagucccaggggagacgcgauaucaagcugauugacaucacgcucucuaaagccgauagccggaaguuugagaaugcugugugggaccaguucaaggaucugugccacaugcauaccggcgucgugguugaaaagaagaaaagaggaggcaaggaggaaauuacaccgcacugugcccugauggacugcaucauguuugaugcggcuguguccgggggacuugacgccaaaguccuccgcgugguucugccucgggauaugguguucagaaccagcacacccaaggucgugcugugaggacuagucccuguucccagagcccacuuuuuuuucuuuuuuugaaauaaaauagccugucuuucagaucuaaaaaaaaaaaaaaaaaaaaaaaaaaaaaaaaaaaaaaaaaaaaaaaaaaaaaaaaaaaaaaaaaaaaaaaaaaaaaaaaaaaaaaaaaaaaaaaaaaaa

SEQ ID NO: 21120 - RNA, 2009 nt, Artificial Sequence
  mRNA product Design a-1 (A100) comprising derived and/or modified sequence from LASV(Nig08-A19;Clade III)__ADU56619__SP-IgE_NP(2-569) (opt5)
aggagagucccgcagucggcguccagcggcucugcuuguucgugugugugucguugcaggccuuauucaagcuuaccauggacuggaccuggauccuguuccucguggccgcugccacaagaguccacagcagcgccuccaaggaggugaaaucuuuccuguggacccagagccucagacgggaacuguccggcuacugcucuaacaucaaacuucaagucguuaaggacgcucaggcccugcuccacgggcuggauuuuagcgagguguccaaugugcagcgccuuaugagaaagcagaaacgggacgauggagaccugaagcgccucagagaucugaaccaagcggucaauaaccugguggaacucaagucuacacagcagaaaagcguucugcgggugggcacgcuuuccagcgacgaucugcucguccuggcugccgaccuugagaagcugaaaucuaaggugguucgcaccgaaagaccccucuccagcgggauuuauaugggaaaucugucuucccagcaacuggaucagcggaaagcccuccugaacaugaucggcaugacagggggaaauggcggccgcaacaccacaagcgacgggauugugagagucugggaugugaagaaugcugagcuucugaacaaucaguucggaaccaugccuucucucacacuggccugucuuaccaagcagggccaaguggaccugaacgaugcuguccaggcccucacggaccuggggcugaucuacaccgcgaaauaucccaauuccagcgaccucgaucggcuggcccagucccauccgauucuuaacaugaucgacacaaagaaaucuagccugaauaucuccggauacaacuuuagccucggcgcugccguuaaggcuggggccugcaugcuggauggaggcaacaugcuugagaccauuaaagugucuccucaaacaauggacggcauccugaaguccauucucaaagugaagcgcagccuggggauguucaucucugauacccccggagaaagaaauccuuaugagaacauucuguacaagaucugucucagcggcgacggguggcccuauauugcgucccggacgucuaucgucggacgcgccugggaaaauacagugguugaucuggagagcgacaacaaaccucagaagaccggcaaugggggauccaacaaaagccuucagucugcuggcuuugccgcuggccugacauacucccagcucaugacccugaaggauagcaugcugcaacuugacccgaaugccaaaaccuggauggauaucgaggggagacccgaagacccuguggagauugcccucuaccagcccucuuccggaugcuauauccacuucuuucgggaaccuacagaccugaagcaguucaagcaggaugcuaaauacagccauggcauugacgucacggaucuguuugcggcccaacccgggcucaccuccgcugugaucgaggcccugccgagaaacaugguuauuacaugucagggaucugaagacauccgcaaacuucuggagagccagggccggagagauaucaagcucauugacaucucccugucuaagguggauagccgcaaauucgagaaugccgucugggaccaguuuaaggaucugugccacaugcauaccgggauuguggucgaaaagaaaaagcggggcggaaaagaggaaaucacaccucacugugcucuuauggacugcauuauguucgaugccgcgguguccggcgggguugacgcuaaggugcucagagccguccugccccgcgauaugguguuucggaccagcacgccuaaaguugugcugugaggacuagucccuguucccagagcccacuuuuuuuucuuuuuuugaaauaaaauagccugucuuucagaucuaaaaaaaaaaaaaaaaaaaaaaaaaaaaaaaaaaaaaaaaaaaaaaaaaaaaaaaaaaaaaaaaaaaaaaaaaaaaaaaaaaaaaaaaaaaaaaaaaaaa

SEQ ID NO: 21121 - RNA, 2009 nt, Artificial Sequence
  mRNA product Design a-1 (A100) comprising derived and/or modified sequence from LASV(G1180-SLE-2010;Clade IV)__AIT17169__SP-IgE_NP(2-569) (opt5)
aggagagucccgcagucggcguccagcggcucugcuuguucgugugugugucguugcaggccuuauucaagcuuaccauggacuggaccuggauccuguuccucguggccgcugccacaagaguccacagcagcgccuccaaggagaucaaaucuuuccuguggacccagagccucagacgggaacuguccggcuacugcucuaacauuaagcugcaaguggucaaagacgcucaggcccugcuccacgggcuggauuuuagcgagguuuccaaugugcagcgccuuaugagaaaggaacggcgcgacgauaacgaccugaaaagacuccgggaucugaaucaggcggugaacaaucuggucgagcucaagucuacacaacaaaagagcauccugcgcgugggaacgcuuaccuccgacgaucugcucauucuggcugccgaccuugaaaaacuuaagagcaaaguuaucagaacagagcggccccucucugccggcguguauauggggaaccuguccagccagcagcuggaucagcgcagagcucuccugucuaugauuggaauguccagcggcaaucagcgggcccaggcugggcgcgacggagucgugagaguuugggaugugaagaacgucgagcuucugaauaaccaguucggcaccaugccuucucucacacuggccugucuuaccaaacaaggccagguggaccugaaugaugcggugcaggcccucacagaccuggggcugaucuacaccgcuaaguauccgaacacguccgaccucgaucggcugacccaaagccaucccauccuuaauaugauugacacaaagaaauccucucugaacaucagcggauacaauuuuucccucggcgccgcugucaaggccggggcgugcaugcuggauggaggcaacaugcuugaaaccauuaaaguuagcccucagacaauggacgggauccugaagucuauucucaaagugaagaaagcccugggaauguucaucuccgauacccccggcgagcgcaacccuuaugaaaauauucuguacaagaucugucucagcggcgacggguggcccuauaucgcuucuagaacgagcauuacaggacgggccugggagaacaccguggucgaucuggaguccgacggcaagccucagaaagcugggucuaauaacagcaauaagucccuucagagcgugggauuuacagccggccugaccuacucucaacucaugacccugaaagaugccaugcugcagcuugacccgaacgcuaagacauggauggauaucgaagggagacccgaggacccuguugaaauugcgcucuaccagcccuccagcggaugcuauauccacuucuuucgcgagccuacggaccugaaacaguucaagcaagaugccaaguacucucauggcauugacgugaccgaucuguuugcugcccagcccggccucacauccgccgucaucgacgcucugccgcggaauauggugaucaccugucaggggagcgaugacauuagaaaacuucuggaaucccagggacgcaaggauaucaaacucauugacaucgcccugucuaagacagauagccggaaauaugagaacgcgguuugggaccaauacaaggaucugugccacaugcauaccggcguggucguggagaagaaaaagagagggggaaaagaagagauuacgccucacugugcucuuauggacugcaucauguucgaugccgccgucuccggcgggcucaauacaucugugcugcgcgcuguucugccccgggacaugguguuuagaaccagcaccccucgcgucgugcucugaggacuagucccuguucccagagcccacuuuuuuuucuuuuuuugaaauaaaauagccugucuuucagaucuaaaaaaaaaaaaaaaaaaaaaaaaaaaaaaaaaaaaaaaaaaaaaaaaaaaaaaaaaaaaaaaaaaaaaaaaaaaaaaaaaaaaaaaaaaaaaaaaaaaa

SEQ ID NO: 21122 - RNA, 2009 nt, Artificial Sequence
  mRNA product Design a-1 (A100) comprising derived and/or modified sequence from LASV(G1442-SLE-2011;Clade IV)__AIT17181__SP-IgE_NP(2-569) (opt5)
aggagagucccgcagucggcguccagcggcucugcuuguucgugugugugucguugcaggccuuauucaagcuuaccauggacuggaccuggauccuguuccucguggccgcugccacaagaguccacagcagcgccuccaaggaggugaaaucuuuccuguggacccagagccucagacgggaacuguccggcuacugcucuaacaucaaacuucaagucguuaaggacgcucaggcccugcuccacgggcuggauuuuagcgagguguccaaugugcagcgccuuaugagaaagcagcggcgcgacgauaacgaccugaaaagacuccgggaucugaaucaagcggucaacaaucugguggaacucaagucuacacagcaaaagagcguucugcgcgugggaacgcuuaccuccgacgaucugcucguccuggcugccgaccuugagaaacuuaagagcaaagugauuagaacagaacggccccucucugccggcguuuauauggggaaccuguccagccagcagcuggaucagcgcagagcucuccugaauaugaucggaaugucuggcgggauucagggaacccggacaggccgcgacggcguggucagagugugggaugugaagaacgccgaccuucugaauaaccaguucgggaccaugccuucccucacacuggcuugucuuaccaaacaaggacaggucgaucugaaugacguugugcaggcccucacggaccugggccugaucuacaccgcgaaguauccgaacgccagcgaucucgaccggcugacacaaucucaucccauucuuaauaugaucgauaccaagaaauccagccugaacaucuccggguacaauuuuucucucggagcugccgugaaggcuggcgccugcaugcuggacgggggaaacaugcuugagacaauuaaagucagcccucagaccauggauggcauccugaaguccauucucaaagugaagaaaacgcugggcauguucaucagcgacacacccggggagcgcaacccuuaugaaaauauucuguacaagaucugucucucuggagauggcuggcccuauauugcguccagaaccagcaucacagggcgggccugggagaacaccguuguggaccuggaaucugauggaaagccucagaaagcuggcagcaauaacuccaauaagucucuucagagcgccggguuugcugccggacugaccuacucccaacucaugacacugaaagacgccaugcugcagcuugauccgaacgcuaagacguggauggacaucgagggcagacccgaggacccugucgaaauugcgcucuaccagcccagcucuggcugcuauauccacuucuuucgcgagccuaccgaucugaaacaguucaagcaagacgccaaguacucccaugggauugaugugacagaccuguuugcugcccagcccggacucaccagcgccguuaucgaagcucugccgcggaauauggugauuacaugucagggcucugaugacaucaaaaagcugcuggagucccaggggagaaaagauaucaagcucauugacaucgcccugagcaaaaccgauucccgcaaguaugaaaacgcggucugggaccaauacaaggaucugugccacaugcauacgggaguggucguggagaaaaagaaacggggcgggaaggaggaaauuacaccucacugugcucuuauggacugcaucauguucgaugccgccguuucuggcggacucaauacccuggugcugagagcuguccucccccgcgacaugguguuucggaccagcacaccuagaguugugcugugaggacuagucccuguucccagagcccacuuuuuuuucuuuuuuugaaauaaaauagccugucuuucagaucuaaaaaaaaaaaaaaaaaaaaaaaaaaaaaaaaaaaaaaaaaaaaaaaaaaaaaaaaaaaaaaaaaaaaaaaaaaaaaaaaaaaaaaaaaaaaaaaaaaaa

SEQ ID NO: 21123 - RNA, 2009 nt, Artificial Sequence
  mRNA product Design a-1 (A100) comprising derived and/or modified sequence from LASV(G3010-SLE-2013;Clade IV)__AIT17345__SP-IgE_NP(2-569) (opt5)
aggagagucccgcagucggcguccagcggcucugcuuguucgugugugugucguugcaggccuuauucaagcuuaccauggacuggaccuggauccuguuccucguggccgcugccacaagaguccacagcagcgccuccaaggagaucaaaucuuuccuguggacccagagccucagacgggaacuguccggcuacugcucuaacauuaaacuucaaguggucaaagacgcucaggcccugcuccacgggcuggauuuuagcgagguuuccaaugugcagcgccuuaugagaaaggaacggcgcgacgauaacgaccugaaaagacuccgggaucugaaucaggcggugaacaaucuggucgagcucaagucuacacaacaaaagagcauccugcgcgugggaacgcuuaccuccgacgaucugcucauucuggcugccgaccuugaaaaacuuaagagcaaaguuacaagaaccgagcggccccucucugccggcguguauauggggaaccuguccagccagcagcuggaucagcgcagagcucuccugucuaugaucggaauguccagcggcguccagggggcccgggcuggacgcgacggcgugguuagagugugggaugucaagaaugccgagcuucugaacaaucaguucggcacaaugccuucucucacccuggcgugucuuacaaaacaggggcaaguggaccugaacgaugugguccaggcccucaccgaccugggacugauuuacacggcuaaguauccgaauaccuccgaccucgaucggcugacacagagccaucccauccuuaacaugaucgacaccaagaaauccucucugaauauuagcggcuacaacuuuucccucggggccgcuguuaaggccggagcgugcaugcuggauggcgggaauaugcuugaaacaaucaaagugagcccucaaaccauggacggcauucugaagucuauccucaaagugaagaaagcccugggaauguucauuuccgagacgcccggcgaacgcaacccuuaugagaacauccuguacaagauuugucucagcggggauggauggcccuauaucgcuucuagaacaagcaucaccggccgggccugggagaauacagucguggaccuggaauccgaugggaagccucagaaagcuggaucuaacaauagcaacaagucccuucagagcgccggcuuuaccgccgggcugaccuacucucagcucaugacacugaaagacgcuaugcugcaacuugauccgaaugcgaagacguggauggacauugagggaagacccgaagauccuguugagguggcccucuaccagcccuccagcggcugcuauauccacuucuuucgcgaaccuaccgaccugaaacaguucaagcaggacgcuaaguacucucauggcauugaugucacagaccuguuugccgcccaacccgggcucaccuccgcugugaucgaugcccugccgcggaacaugguuauuacaugucagggaagcgacgauaucaaaaagcugcuggagucccagggcagaaaagacaucaagcucauugauaucgcgcugucuaaaaccgacagccgcaaguaugagaaugcugugugggaucaguacaaggaccugugccacaugcauacgggggucguggucgaaaagaagaaacggggaggcaaggaggaaauuacaccucacugugcccuuauggauugcaucauguucgacgccgcuguguccgggggccucaacaccucuguucugagagccgugcugccccgcgauauggucuuucggaccagcacaccuagagugguucucugaggacuagucccuguucccagagcccacuuuuuuuucuuuuuuugaaauaaaauagccugucuuucagaucuaaaaaaaaaaaaaaaaaaaaaaaaaaaaaaaaaaaaaaaaaaaaaaaaaaaaaaaaaaaaaaaaaaaaaaaaaaaaaaaaaaaaaaaaaaaaaaaaaaaa

SEQ ID NO: 21124 - RNA, 2009 nt, Artificial Sequence
  mRNA product Design a-1 (A100) comprising derived and/or modified sequence from LASV(G502-SLE-2009;Clade IV)__AIT17127__SP-IgE_NP(2-569) (opt5)
aggagagucccgcagucggcguccagcggcucugcuuguucgugugugugucguugcaggccuuauucaagcuuaccauggacuggaccuggauccuguuccucguggccgcugccacaagaguccacagcagcgccuccaaggagaucaaaucuuuccuguggacccagagccucagacgggaacuguccggcuacugcucuaacauuaagcugcaaguggucaaagacgcucaggcccugcuccacgggcuggauuuuagcgagguuuccaaugugcagcgccuuaugagaaaggaacggcgcgacgauaacgaccugaaaagacuccgggaucugaaucaggcggugaacaaucuggucgagcucaagucuacacaacaaaagagcauccugcgcgugggaacgcuuaccuccgacgaucugcucauucuggcugccgaccuugaaaaacuuaagagcaaaguuaucagaacagagcggccccucucugccggcguguauauggggaaccuguccagccagcagcuggaucagcgcagagcucuccugucuaugauuggaauguccggcgggaaucagggaguccgggccggcaaggacggcgugguucgcgugugggaugucaaaaacgcugagcuucugaauaaccaguucgggaccaugccuagccucacacuggccugucuuaccaagcagggacaaguggaccugaaugaugcggugcaggcccucacagaccugggccugaucuacaccgcuaaguauccgaacacgucugaccucgauagacugacccagucccaucccauccuuaauaugauugacaccaaaaagagcucccugaacaucucuggguacaauuuuagccucggagccgcugucaaagccggcgcgugcaugcuggaugggggaaacaugcuugaaacaauuaagguuuccccucaaacaauggacggcauccugaaaagcauucucaaggugaaaaaggcccugggcauguucaucucugauacccccggggagcggaacccuuaugaaaauauucuguacaagaucugucucuccggagacggcuggcccuauaucgcuagccgcacgucuauuacagggagagccugggagaacaccguggucgaucuggagagcgacggaaaaccucagaaggcuggcuccaauaacucuaauaaaagccuucaguccgccggguuuacagccggacugaccuacagccagcucaugacccugaaggaugcuaugcugcaacuugacccgaacacaaaaacguggauggauaucgaaggccggcccgaggacccuguggaaauugcgcucuaccagcccucuuccggcugcuauauccacuucuuuagagagccuaccgaccugaagcaguucaagcaggaugccaaauacagccaugggauugacguuacagaucuguuugcugcccaacccggacucaccucugccgugaucgacgcucugccgcgcaauauggucaucacaugucagggcuccgaugacauucggaaacuucuggaaagccaggggagaaaggauaucaagcucauugacaucgcccugaacaaaaccgauucccgcaaguaugagaaugcggugugggaccaguacaaggaucugugccacaugcauacgggaguuguggucgagaaaaagaaacggggcgggaaggaagagauuacaccucacugugcucuuauggacugcaucauguucgaugccgccgugucuggcggacucaacaccagcguccugagagcugugcugccccgcgacaugguuuuucggaccuccacaccuagagugguccucugaggacuagucccuguucccagagcccacuuuuuuuucuuuuuuugaaauaaaauagccugucuuucagaucuaaaaaaaaaaaaaaaaaaaaaaaaaaaaaaaaaaaaaaaaaaaaaaaaaaaaaaaaaaaaaaaaaaaaaaaaaaaaaaaaaaaaaaaaaaaaaaaaaaaa

SEQ ID NO: 21125 - RNA, 2009 nt, Artificial Sequence
  mRNA product Design a-1 (A100) comprising derived and/or modified sequence from LASV(G733-SLE-2010;Clade IV)__AIT17155__SP-IgE_NP(2-569) (opt5)
aggagagucccgcagucggcguccagcggcucugcuuguucgugugugugucguugcaggccuuauucaagcuuaccauggacuggaccuggauccuguuccucguggccgcugccacaagaguccacagcagcgccuccaaggagaucaaaucuuuccuguggacccagagccucagacgggaacuguccggcuacugcucuaacauuaagcugcaaguggucaaagacgcucaggcccugcuccacgggcuggauuuuagcgagguuuccaaugugcagcgccuuaugagaaaggaacggcgcgacgauaacgaccugaaaagacuccgggaucugaaucaggcggugaacaaucuggucgagcucaagucuacacaacaaaagagcgugcugcgcguuggaacgcuuaccuccgacgaacugcucgugcuggcugccgaucuugagaaacuuaagagcaaagucaucagaacagagcggccccucucugccggcguguauauggggaaccuguccagccagcagcuggaccagcgcagagcucuccugucuaugauuggaauguccggcgggaaucagggagcccggaccggccgcgauggcguugugagagucugggacgugaagaacgcugaacuucugaauaaccaguucgggacaaugccuagccucacccuggccugucuuacaaaacagggacaaguggaucugaaugacgcgguccaggcccucaccgaucugggccugaucuacacggcuaaguauccgaacaccucugaccucgaccggcugacacagucccaucccauucuuaauaugaucgauaccaagaaaagcucccugaacaucucuggguacaauuuuagccucggagccgcuguuaaggccggcgcgugcaugcuggacgggggaaacaugcuugagacaauuaaaguguccccucaaaccauggauggcauccucaagagcauucugaaagugaagaaagcccugggcauguucaucucugacacgcccggggaacgcaacccuuaugagaauauucuguacaagaucugucucuccggagauggcuggcccuauauugcuagcagaacaucuaucaccgggcgggccugggagaacacagucguggaccuggaaagcgauggaaagccucagaaagcuggcuccaauaacucuaauaagagccuucaguccgccggguuuaccgccggacugaccuacagccagcucaugacacugaaagacgcuaugcugcaacuugauccgaacgcgaagacguggauggacaucgagggcagacccgaagauccuguugagauugcccucuaccagcccucuuccggcugcuauauccacuucuuucgcgaaccuaccgaccugaaacaguucaagcaggacgcuaaguacagccaugggauugaugugacagaccuguuugccgcccaacccggacucaccucugcugucaucgaugcccugccgcggaauauggugauuacaugucagggcuccgacgauaucagaaaacuucuggagagccaggggcgcaaggacaucaaacucauugauaucgcgcuguccaagauugacucucggaaauaugagaacgcuguuugggaucaguacaaggaccugugccacaugcauaccggaguggucguggaaaagaaaaagagaggcgggaaagaggaaaucacgccucacugugcccuuauggauugcauuauguucgacgccgcugucagcggcggacucaauucccuggugcugcgcgccguucucccccgggauaugguguuuagaacaucuaccccucgcgucgugcugugaggacuagucccuguucccagagcccacuuuuuuuucuuuuuuugaaauaaaauagccugucuuucagaucuaaaaaaaaaaaaaaaaaaaaaaaaaaaaaaaaaaaaaaaaaaaaaaaaaaaaaaaaaaaaaaaaaaaaaaaaaaaaaaaaaaaaaaaaaaaaaaaaaaaa

SEQ ID NO: 21126 - RNA, 2009 nt, Artificial Sequence
  mRNA product Design a-1 (A100) comprising derived and/or modified sequence from MOPV/LASV reassortant(IGS-1;Clade IV)__AFY05578__SP-IgE_NP(2-569) (opt5)
aggagagucccgcagucggcguccagcggcucugcuuguucgugugugugucguugcaggccuuauucaagcuuaccauggacuggaccuggauccuguuccucguggccgcugccacaagaguccacagcagcgccuccaaggagaucaaaucuuuccuguggacccagagccucagacgggaacuguccggcuacugcucuaacauuaaacuucaaguggucaaggacgcucaggcccugcuccacgggcuggauuuuagcgagguuuccaaugugcagcgccuuaugagaaaggaacggcgcgacgauaacgaccugaaaagacuccgggaucugaaucaggcggugaacaaucuggucgagcucaagucuacacaacaaaagagcauccugcgcgugggaacgcuuaccuccgacgaucugcucauucuggcugccgaccuugaaaaacugagaagcaagguuauccggacagagcgcccccucucugccggcguguauauggggaaccuguccagccagcagcuggaucagagacgggcucuccugaauaugauuggaaugucuggcgggaaccagggagcccgcgcuggcagagacggcgucgugcggguuugggaugugaaaaaugccgagcuucuguccaaccaguucgggaccaugccuagccucacacuggcgugucuuaccaagcagggacaagucgaccugaaugaugccgugcaggcucucacagaccugggccugaucuacaccgccaaauauccgaacacgucugaccucgaucgccugacccagucccaucccauccuuaauaugauugacacaaagaaaagcucccugaacaucucuggguacaauuuuagccucggagcugccgugaaggcgggcgccugcaugcuggaugggggaaacaugcuugaaaccauuaaggucuccccucaaacaauggacggcauccugaaaagcauucucaagguuaaaaaggcucugggcauguucaucucugauacccccggggagagaaacccuuaugaaaauauucuguacaaaaucugucucuccggagacggcuggcccuauaucgccagccggacgucuauuacagggagagcuugggagaacaccgugguggaucuggagagcgacggaaagccucagaaggccgauuccaauaacucuagcaaaucccuucagagcgccggcuuuacagcugggcugaccuacucucagcucaugacccugaaggacgcgaugcugcaacuugauccgaaugccaaaacauggauggacaucgaaggacgccccgaggacccugucgaaauugcucucuaccagcccuccagcggcugcuauauccacuucuuucgggagccuacggaucugaagcaguucaaacaggacgccaaguacucucauggcauugaugugaccgaccuguuugccacacaacccgggcucaccuccgcuguuaucgaugcccugccgagaaacauggugaucacaugucagggaagcgacgauauucgcaaacuucuggaaucccagggccggaaggacaucaagcucauugauaucgaccugucuaaaaccgauagcagaaaguaugagaaugcggucugggaccaguacaaagaucugugccacaugcauacgggggugguuguggagaagaagaaacgcggaggcaaggaagagauuacaccucacugugcucuuauggacugcaucauguucgacgccgccgucuccgggggccucaacaccucugugcugcgggcuguccugcccagagauaugguguuucgcaccagcacaccucggguugugcucugaggacuagucccuguucccagagcccacuuuuuuuucuuuuuuugaaauaaaauagccugucuuucagaucuaaaaaaaaaaaaaaaaaaaaaaaaaaaaaaaaaaaaaaaaaaaaaaaaaaaaaaaaaaaaaaaaaaaaaaaaaaaaaaaaaaaaaaaaaaaaaaaaaaaa

SEQ ID NO: 21127 - RNA, 2009 nt, Artificial Sequence
  mRNA product Design a-1 (A100) comprising derived and/or modified sequence from LASV(LM765-SLE-2012;Clade IV)__AIT17815__SP-IgE_NP(2-569) (opt5)
aggagagucccgcagucggcguccagcggcucugcuuguucgugugugugucguugcaggccuuauucaagcuuaccauggacuggaccuggauccuguuccucguggccgcugccacaagaguccacagcagcgccuccaaggagaucaaaucuuuccuguggacccagagccucagacgggaacuguccggcuacugcucuaacauuaagcugcaaguggucaaagacgcucaggcccugcuccacgggcuggauuuuagcgagguuuccaaugugcagcgccuuaugagaaaggaacggcgcgacgauaacgaccugaaaagacuccgggaucugaaucaggcggugaacaaucuggucgagcucaagucuacacaacaaaagagcauccugcgcgugggaacgcuuaccuccgacgaucugcucauucuggcugccgaccuugaaaaacuuaagagcaaaguuacaagaaccgagcggccccucucugccggcguguauauggggaaccuguccagccagcagcuggaucagcgcagagcucuccuggacaugaucggaaugucuggcuccaaucagggggcccgggcuggacgcgauggcgucgugagaguuugggacgugaagaacgccgagcuucugaauaaccaguucggcacaaugccuagccucacccuggcgugucuuacaaaacaggggcaagucgaucugaaugacgccgugcaggcucucaccgaccugggacugauuuacacggccaaguauccgaacaccucugaucucgaccggcugacacagucccaucccauccuuaauaugaucgauaccaagaaaagcucccugaacauuucuggcuacaauuuuagccucggggcugccgugaaggcgggagccugcaugcuggacggcgggaacaugcuugaaacaaucaaagucuccccucaaaccauggauggcauucucaagagcauccugaaaguuaagaaagcucugggaauguucauuucugacgcccccggcgagcgcaacccuuaugaaaauauccuguacaagauuugucucuccggggauggauggcccuauaucgcuagcagaacgucuaucacaggccgggccugggagaacaccgugguggaccuggagagcgaugggaagccucagaaagccggauccaauggcucuaacaagagccuucaguccgcuggguuuacagcgggacugaccuacagccagcucaugacccugaaagacgccaugcugcaacuugauccgaaugcuaagacauggauggacauugaaggcagacccgaggacccugucgaaaucgcccucuaccagcccucuuccggcugcuauauucacuucuuucgcgagccuacggaucugaaacaguucaagcaggacgccaaguacagccaugggaucgaugugaccgaccuguuugcugcccaacccggacucacaucugcgguuauugaugcucugccgcggaacauggugaucaccugucagggcuccgacgauaucagaaaacuuuucgaaagccaggggcgcaaggacauuaaacugaucgauauugcccucuccaagacagacucucggaaauaugagaaugccgucugggaucaguacaaggaccugugccacaugcauaccggaaucgugguugagaagaaaaagagaggcgggaaagaagagauuacgccucacugugcucugauggauugcaucauguuugacgccgcugugagcggcggacuuaacacauccguccuccgcgccgugcugccccgggacauggucuucagaaccucuaccccucgcgugguucugugaggacuagucccuguucccagagcccacuuuuuuuucuuuuuuugaaauaaaauagccugucuuucagaucuaaaaaaaaaaaaaaaaaaaaaaaaaaaaaaaaaaaaaaaaaaaaaaaaaaaaaaaaaaaaaaaaaaaaaaaaaaaaaaaaaaaaaaaaaaaaaaaaaaaa

SEQ ID NO: 21128 - RNA, 2009 nt, Artificial Sequence
  mRNA product Design a-1 (A100) comprising derived and/or modified sequence from LASV(LM776-SLE-2012;Clade IV)__AIT17825__SP-IgE_NP(2-569) (opt5)
aggagagucccgcagucggcguccagcggcucugcuuguucgugugugugucguugcaggccuuauucaagcuuaccauggacuggaccuggauccuguuccucguggccgcugccacaagaguccacagcagcgccuccaaggagaucaaaucuuuccuguggacccagagccucagacgggaacuguccucuuacugcagcaacauuaaacuucaaguggucaaggacgcucaggcccugcuccacggccuggauuuuuccgagguuucuaaugugcagcgccuuaugagaaaggaacggcgcgacgauaacgaccugaaaagacuccgggaucugaaucaggcggugaacaaucuggucgagcucaagagcacacaacagaaguccauccugcgcguggggacgcuuaccagcgacgaucugcucauucuggcugccgaccuugaaaaacugaagucuaaaguuacaagaaccgagcggccccucuccgccggaguguauaugggcaaccugagcucucagcagcuggaucaacgcagagcucuccuguccaugaucgggaugagcggaucuaaucagggcgcccgggcugggcgcgacggagucgugagaguuugggaugugaagaacgccgagcuucugaauaaccaguucggcacaaugccuucccucacccuggcgugucuuacaaaacagggccaagucgaccugaaugaugccgugcaggcucucaccgaccuggggcugauuuacacggccaaguauccgaacaccagcgaccucgaucggcugacacagucccaucccauccuuaauaugaucgacaccaagaaaucuagccugaacauuuccggauacaauuuuagccucggcgcugccgugaaggcgggggccugcaugcuggauggaggcaacaugcuugaaacaaucaaagucucuccucaaaccauggacgggauucugaaguccauccucaaaguuaagaaagcucugggaauguucauuagcgauacgcccggcgagcgcaacccuuaugaaaauauccuguacaagauuugucucucuggcgacggguggcccuauaucgccagcagaacauccaucaccggacgggcuugggagaacacagugguggaucuggagucugacggcaagccucagaaagccgggagcaauaacuccaauaagagccuucagucugccggauuuaccgcuggccugaccuacucccagcucaugacacugaaagaugcgaugcugcaacuugacccgaacgccaagacguggauggauauugaagggagacccgaggacccugucgaaguggcucucuaccagcccagcucuggaugcuauauccacuucuuucgcgagccuaccgaccugaaacaguucaagcaggaugccaaguacucccauggcauugacguuacagaucuguuugccgcucaacccggccucaccagcgccgugaucgacgcgcugccgcggaauauggucauuacaugucagggguccgaugacaucagaaaacuucuggaaucucagggacgcaaggauaucaaacucauugacaucgcucugagcaagaccgauucccggaaauaugagaacgccgugugggaccaguacaaggaucugugccacaugcauacgggcguuguggucgagaagaaaaagagagggggaaaagaagagauuacaccucacugugcccuuauggacugcaucauguucgaugcugccgugucuggcgggcucaauaccagcguccugcgcgcugugcugccccgggacaugguuuuuagaaccuccacaccucgcgugguccucugaggacuagucccuguucccagagcccacuuuuuuuucuuuuuuugaaauaaaauagccugucuuucagaucuaaaaaaaaaaaaaaaaaaaaaaaaaaaaaaaaaaaaaaaaaaaaaaaaaaaaaaaaaaaaaaaaaaaaaaaaaaaaaaaaaaaaaaaaaaaaaaaaaaaa

SEQ ID NO: 21129 - RNA, 2009 nt, Artificial Sequence
  mRNA product Design a-1 (A100) comprising derived and/or modified sequence from LASV(Mad39;Clade IV)__ANH09723__SP-IgE_NP(2-569) (opt5)
aggagagucccgcagucggcguccagcggcucugcuuguucgugugugugucguugcaggccuuauucaagcuuaccauggacuggaccuggauccuguuccucguggccgcugccacaagaguccacagcagcgccuccaaggagaucaaaucuuuccuguggacccagagccucagacgggaacuguccggcuacugcucuaacauuaagcugcaaguggucaaagacgcucaggcccugcuccacgggcuggauuuuagcgagguuuccaaugugcagcgccuuaugagaaagcagcggcgcgacgauaacgaccugaaaagacuccgggaucugaaucaagcggugaacaaucuggucgaacucaagucuacacagcaaaagagcgugcugcgcguuggaacgcuuaccuccgacgaucugcucacacuggcugccgaccuugagaaacuuaagagcaaagugaccagaacagaacggccccucaccgccggcgucuauauggggaaccugucuucccagcagcuggaucagcgcagagcucuccugaauaugaucggaaugagcggcgggaaccagggagcccggacaggccgcgacggcgugguuagagugugggaugucaagaaugcugagcuucugaacaaucaguucgggaccaugccuucucucacgcuggccugucuuaccaaacaaggacagguggaccugaacgaugugguccaggcgcucacagaccugggccugauuuacaccgccaaguauccgaauacauccgaccucgaucggcugacccaaagccaucccauccuuaacaugauugacacgaauaagucuucccugaacaucagcggguacaacuuuucccucggagcugccguuaaagcuggcgccugcaugcuggaugggggaaauaugcuugagacaaucaaggugucuccucagaccauggacggcauucugaaaagcauccucaaggugaaaaagucccugggcauguucauuagcgauacacccggggaacgcaacccuuaugagaauauccuguacaaaauuugucucucuggagacggcuggcccuauaucgcguccagaaccagcauuaccgggcgggccugggaaaacacagucguggaucuggagucuggaggcaagccucagaaggcugggagcaauaacuccaauaaaucucuucagagcgccggauuugcugccggccugacguacucccaacucaugacccugaaggacgccaugcugcagcuugauccgaacgcuaaaacauggauggacaucgagggcagacccgaagauccuguugagaucgcgcucuaccagcccauuagcgggugcuauauccacuucuuucgcgaaccuaccgaccugaagcaguucaaacaagacgccaaguacucucauggaauugaugugacagaccuguuugcugcccagcccggccucaccuccgccgucaucgaggcucugccgcggaauauggugauuacgugucaggggagcgaugacaucagaaaacuuuucgaaucucagggacgcaaggauaucaagcugauugacaucgcccucuccaaaacagauagccggaaguaugagaacgcgguuugggaccaauacaaagaucugugccacaugcauaccggcguggucguggagaagaagaaaaagggcgggaaagaagagauuaccccucacugugcucugauggacugcaucauguuugaugccgccgucuccggaggccuuaauacacucgugcugagagcuguucugccccgcgacaugguguuccggaccucuacaccuaaggucgugcucugaggacuagucccuguucccagagcccacuuuuuuuucuuuuuuugaaauaaaauagccugucuuucagaucuaaaaaaaaaaaaaaaaaaaaaaaaaaaaaaaaaaaaaaaaaaaaaaaaaaaaaaaaaaaaaaaaaaaaaaaaaaaaaaaaaaaaaaaaaaaaaaaaaaaa

SEQ ID NO: 21130 - RNA, 2009 nt, Artificial Sequence
  mRNA product Design a-1 (A100) comprising derived and/or modified sequence from LASV(Z0947-SLE-2011;Clade IV)__AIT17841__SP-IgE_NP(2-569) (opt5)
aggagagucccgcagucggcguccagcggcucugcuuguucgugugugugucguugcaggccuuauucaagcuuaccauggacuggaccuggauccuguuccucguggccgcugccacaagaguccacagcagcgccuccaaggagaucaaaucuuuccuguggacccagagccucagacgggaacuguccggcuacugcucuaacauuaagcugcaaguggucaaagacgcucaggcccugcuccacgggcuggauuuuagcgagguuuccaaugugcagcgccuuaugagaaaggaacggcgcgacgauaacgaccugaaaagacuccgggaucugaaucaggcggugaacaaucuggucgagcucaagucuacacaacaaaagagcauccugcgcgugggaacgcuuaccuccgacgaucugcucauucuggcugccgaccuugaaaaacuuaagagcaaaguuacaagaaccgagcggccccucucugccggcguguauauggggaaccuguccagccagcagcuggaucagcgcagagcucuccugaauaugaucggaaugucuggcuccaaccagggggcccggacaggacgcgacggcgucgugagaguuugggaugugaagaaugcugagcuucugaacaaucaguucggcaccaugccuagccucacacuggccugucuuaccaaacaggggcaagucgaccugaacgaugcggugcaggcccucacggaccugggacugauuuacaccgcuaaguauccgaauacaucugaccucgaucggcugacccagucccaucccauccuuaacaugaucgacacaaagaaaagcucccugaauauuucuggcuacaacuuuagccucggggccgcugugaaggccggagcgugcaugcuggauggcgggaacaugcuugaaaccaucaaagucuccccucaaacgauggacggcauucucaagagcauccugaaaguuaagaaagcccugggaauguucauuucugaugcucccggcgagcgcaauccuuaugaaaacauccuguacaagauuugucucuccggggacggauggcccuauaucgccagcagaacaucuaucaccggccgggcuugggagaauacagugguggaucuggagagcgacgggaagccucagaaagccggauccaacggcucuaauaagagccuucaguccgccggguuuaccgcuggacugaccuacagccagcucaugacacugaaagaugcgaugcugcaacuugacccgaacgccaagacguggauggauauugaaggcagacccgaggacccugucgaaaucgcucucuaccagcccucuuccggcugcuauauucacuucuuucgcgagccuaccgaccugaaacaguucaagcaggaugccaaguacagccaugggaucgacgugacagaucuguuugccgcucaacccggacucaccucugccguuauugacgcgcugccgcggaauauggugaucacaugucagggcuccgaugacaucagaaaacuuuucgaaagccaggggcgcaaggauauuaaacugaucgacauugcucucuccaagaccgauucucggaaauaugagaacgccgucugggaccaguacaaggaucugugccacaugcauacgggaaucgugguugagaagaaaaagagaggcgggaaagaagagauuacaccucacugugcccugauggacugcaucauguuugaugcugccgugagcggcggacuuaauaccuccguccuccgcgcugugcugccccgggacauggucuucagaaccucuacaccucgcgugguucugugaggacuagucccuguucccagagcccacuuuuuuuucuuuuuuugaaauaaaauagccugucuuucagaucuaaaaaaaaaaaaaaaaaaaaaaaaaaaaaaaaaaaaaaaaaaaaaaaaaaaaaaaaaaaaaaaaaaaaaaaaaaaaaaaaaaaaaaaaaaaaaaaaaaaa

SEQ ID NO: 21131 - RNA, 2021 nt, Artificial Sequence
  mRNA product Design a-2 (hSL-A64-N5) comprising derived and/or modified sequence from LASV(Josiah;Clade IV)__NP_694869__SP-IgE_NP(2-569) (opt1)
aggagaguccgcucagccagguugcagaagcggcuuagcguguguccuaaucuucucucugcguguagguaggccugugccgcaaacaagcuuaccauggacuggaccuggauccuguuccucguggccgccgcgacccgcguccacagcagcgccuccaaggagaucaagagcuuccuguggacccagucccuccgccgggagcugagcggcuacugcuccaacaucaagcuccagguggucaaggacgcccaggcgcugcugcacgggcuggacuucagcgagguguccaacgugcagcgccucaugcggaaggagcgccgggacgacaacgaccugaagcgccugcgggaccucaaccaggccgucaacaaccugguggagcucaagagcacccagcagaaguccauccugcgcgugggcacccugaccagcgacgaccugcucauccuggccgccgaccuggagaagcucaaguccaaggucauccggaccgagcgcccccugagcgccgggguguacaugggcaaccuguccagccagcagcucgaccagcggcgcgcgcugcugaacaugaucgggauguccggcggcaaccagggggcccgggccggccgcgacggggugguccgggugugggacgugaagaacgccgagcuccugaacaaccaguucggcaccaugccgagccugacgcucgcgugccugaccaagcaggggcaggucgaccugaacgacgccgugcaggcccucaccgaccugggccugaucuacaccgccaaguaccccaacacguccgaccucgaccgccugacccagagccaccccauccugaacaugaucgacaccaagaaguccagccucaacaucagcggcuacaacuucucccugggggccgcggugaaggccggcgccugcaugcuggacgggggcaacaugcucgagaccaucaaggucagcccccagacgauggacggcauccugaaguccauccugaaggugaagaaggcccucgggauguucaucagcgacaccccgggcgagcggaaccccuacgagaacauccuguacaagaucugccuguccggggacggcuggcccuacaucgccagccgcaccuccaucaccgggcgggcgugggagaacacgguggucgaccucgagagcgacggcaagccccagaaggccgacuccaacaacagcuccaagagccugcaguccgccggcuucaccgccgggcugaccuacagccagcucaugacccugaaggacgccaugcugcagcuggacccgaacgcgaagacguggauggacaucgagggccgccccgaggaccccguggagaucgcccucuaccagcccuccagcgggugcuacauccacuucuuccgggagccgaccgaccugaagcaguucaagcaggacgccaaguacucccacggcaucgacgugaccgaccuguucgccacccagcccgggcucacgagcgccgucaucgacgcgcugccccgcaacauggugaucacgugccagggcuccgacgacauccgcaagcugcucgagagccagggccggaaggacaucaagcugaucgacaucgcccugagcaagaccgacucccgcaaguacgagaacgccgugugggaccaguacaaggaccucugccacaugcacaccggggucguggucgagaagaagaagcggggcgggaaggaggagaucaccccgcacugcgcccugauggacugcaucauguucgacgcggccgugagcggcgggcugaacaccuccgugcuccgcgccguccugccccgggacaugguguuccgcaccagcacgccccgggugguccugugaggacuagucccuguucccagagcccacuuuuuuuucuuuuuuugaaauaaaauagccugucuuucagaucucaaaggcucuuuucagagccaccaaaaaaaaaaaaaaaaaaaaaaaaaaaaaaaaaaaaaaaaaaaaaaaaaaaaaaaaaaaaaaaaagaauu

SEQ ID NO: 21132 - RNA, 2021 nt, Artificial Sequence
  mRNA product Design a-2 (hSL-A64-N5) comprising derived and/or modified sequence from LASV(LP;Clade I)__AAF86702__SP-IgE_NP(2-569) (opt1)
aggagaguccgcucagccagguugcagaagcggcuuagcguguguccuaaucuucucucugcguguagguaggccugugccgcaaacaagcuuaccauggacuggaccuggauccuguuccucguggccgccgcgacccgcguccacagcagcaacuccaaggagaucaagagcuuccuguggacccagucccuccgccgggagcugagcggcuacugcuccaacaucaagcuccagguggucaaggacgcccaggcccugcugcacgggcuggacuucagcgagguguccaacgugcagcgccucaugcggaagcagaagcgcgacgacgcggaccugaagcggcugcgcgaccucaaccaggccgucaacaaccugguggagcucaagagcacccagcagaagaacgugcugcgggucggcacgcuguccagcgacgaccugaucacccucgccgccgaccuggagaagcugaaguccaaggugauccgcaccgagcggccccucagcuccgggguguacaugggcaaccugagcucccagcagcuggaccagcgccgggcccuccugagcaugaucgggauguccggcggcccgcaggggaaccgcaccggcggggacggcgucgugcgggugugggacgucaagaacgcggagcugcucaacaaccaguucgggacgaugcccagccugacccuggccugccucaccaagcagggccagguggaccugaacgacgccgugcaggcccugaccgaccucggccugaucuacacggcgaaguaccccaacuccagcgaccuggacaugcucacccagagccaccccauccuggggauggucgacaccaagaaguccagccugaacaucuccggcuacaacuucagccucggggccgccgugaaggccggcgccugcaugcuggacggcgggaacaugcuggagaccaucaagguguccccgcagacgauggacggcauccucaagagcauccugaaggucaagcgcucccuggggauguucaucagcgacacccccggcgagcggaaccccuacgagaacauccucuacaagaucugccuguccggggagggcuggcccuacaucgcgagccgcaccuccaucaccggccgggccugggagaacacgcugguggaccucgagagcgacaacaagccgcccaagcugaacuccgccgggagcaacaagucccugcaggccgccggccucaacgcggggcugaccuacagccagcugaugacccugaaggacugcaugcuccagcuggaccccuccagcaagaccuggaucgacaucgagggccgccccgaggacccgguggagaucgcccuguuccagcccuccagcgggugcuacauccacuucuuccgggagcccacggaccucaagcaguucaagcaggacgccaaguacagccacggcaucgacgucaccgaccuguucuccacccagcccggccugaccagcgccgugaucgaggcccucccgcgcaacauggugcugacgugccagggguccgacgacaucaagaagcugcucgagagccagggccggcgcgacaucaagcugaucgacaucucccugagcaaggcggacucccgcaaguucgagaacgccgucugggaccaguacaaggaccucugccacaugcacaccgggguggucguggagaagaagaagcggggcgggaaggaggagaucacgccccacugcgcccugcuggacugcaucauguucgacgccgccaccaccggcagccucaacaucaccacccugcgcgcggugcugccccgggacauggucuuccgcaccuccacgcccaagguggugcucugaggacuagucccuguucccagagcccacuuuuuuuucuuuuuuugaaauaaaauagccugucuuucagaucucaaaggcucuuuucagagccaccaaaaaaaaaaaaaaaaaaaaaaaaaaaaaaaaaaaaaaaaaaaaaaaaaaaaaaaaaaaaaaaaagaauu

SEQ ID NO: 21133 - RNA, 2021 nt, Artificial Sequence
  mRNA product Design a-2 (hSL-A64-N5) comprising derived and/or modified sequence from LASV(803213;Clade II)__AAF86704__SP-IgE_NP(2-569) (opt1)
aggagaguccgcucagccagguugcagaagcggcuuagcguguguccuaaucuucucucugcguguagguaggccugugccgcaaacaagcuuaccauggacuggaccuggauccuguuccucguggccgccgcgacccgcguccacagcagcgccuccaaggaggugaaguccuuccuguggacccagagccuccgccgggagcugagcggcuacugcuccaacaucaagcugcaggucgugaaggacgcccaggcgcuccugcacgggcuggacuucagcgaggugaacaacguccagcgccucaugcggaagcagaagcgcgacgacggcgaccugaagcggcugcgcgaccucaaccaggccgugaacaaccugguggagcugaaguccacccagcagaaguccauccuccgggucgggacgcugaccagcgacgaccugcucacccuggccgccgaccuggagaagcucaagagcaaggugauccgcaccgagcggccccuguccagcggcguguacauggggaaccuguccacgcagcagcucgagcagcgccgggcccugcugaacaugaucggcauggucggcggggcgcagggcacccagccggggcgcgacggcguggugcgggucugggacgugaagaaccccgaccuccugaacaaccaguucgggaccaugcccagccugacccucgccugccugacgaagcagggccagguggaccugaacgacgccguccucgcccugaccgaccugggccucaucuacaccgcgaaguaccccaacuccagcgaccuggaccgccugucccagagccacccgauccucaacaugguggacaccaagaaguccagccugaacaucagcggguacaacuucucccugggcgccgccgugaaggccggggccugcaugcucgacggcggcaacaugcuggagacgaucaaggucacgccccagaccauggacgggauccucaagagcauccugaaggugaagcggucccugggcauguucgugagcgacacccccggggagcgcaaccccuacgagaacauccuguacaagaucugccucuccggcgacggguggccguacaucgcgagccggaccuccaucgucggccgcgccugggagaacaccaccguggaccuggagagcgacggcaagccccagaagguggggaccgccggcuccaacaagagccugcaguccgccggguuccccacgggccucaccuacagccagcugaugacccugaaggacuccaugaugcagcuggaccccagcgccaagaccuggaucgacaucgaggggcggccggaggaccccgucgagaucgcgcucuaccagcccauguccggcugcuacauccacuucuuccgcgagcccacggaccugaagcaguucaagcaggacgccaaguacagccacggcaucgacguggccgaccuguucccggcccagcccgggcucaccuccgccgucaucgaggcgcugccccggaacauggugcugaccugccagggcagcgacgacaucaagaagcuccuggacucccaggggcgccgcgacaucaagcugaucgacaucagccucagcaagguggacucccggaaguucgagaacgccgucugggaccagugcaaggaccugugccacaugcacaccggcgugguggucgagaagaagaagcgcgggggcaaggaggagaucacgccccacugcgcccugauggacugcaucauguucgacgccgccgugagcggcgggcucaacaucccggugcugcgggcgguccugccccgcgacaugguguuccggaccuccagccccaaggugguccucugaggacuagucccuguucccagagcccacuuuuuuuucuuuuuuugaaauaaaauagccugucuuucagaucucaaaggcucuuuucagagccaccaaaaaaaaaaaaaaaaaaaaaaaaaaaaaaaaaaaaaaaaaaaaaaaaaaaaaaaaaaaaaaaaagaauu

SEQ ID NO: 21134 - RNA, 2024 nt, Artificial Sequence
  mRNA product Design a-2 (hSL-A64-N5) comprising derived and/or modified sequence from LASV(GA391;Clade III)__CAA36646__SP-IgE_NP(2-570) (opt1)
aggagaguccgcucagccagguugcagaagcggcuuagcguguguccuaaucuucucucugcguguagguaggccugugccgcaaacaagcuuaccauggacuggaccuggauccuguuccucguggccgccgcgacccgcguccacagcagcgccuccaaggaggugcgcagcuuccuguggacccagucccuccggcgcgagcugagcggcuacugcuccaacaucaagcugcaggucgugaaggacgcccaggcgcuccugcacgggcuggacuucagcgagguguccaacguccagcggcucaugcgcaagcagaagcgggacgacggcgaccugaagcgccugcgggaccucaaccaggccgugaacaaccugguggagcucaagagcacccagcagaaguccguccugcgcguggggacccugagcuccgacgaccugcucauccuggccgccgaccuggagaagcucaagagcaaggugacccggaccgagcgcccccuguccagcggcgucuacauggggaaccuguccagccagcagcucgaccagcggcgcgcccugcugaacaugaucggcaugaccggcguguccgggggcgggaagggcgcgagcgacgggaucgugcgggucugggacgugaagaacgccgagcuccugaacaaccaguucggcacgaugccgucccugacccucgccugccugaccaagcagggccagguggaccugaacgacgccguccaggcgcucaccgaccuggggcugaucuacacggccaaguaccccaacagcagcgaccucgaccgccugucccagagccaccccauccugaacaugaucgacaccaagaaguccagccucaacaucuccggcuacaacuucagccugggggccgccgugaaggccggcgcgugcaugcuggacggcgggaacaugcucgagaccaucaaggugagcccccagaccauggacggcauccucaaguccauccugaaggucaagaagucccuggggauguucgugagcgacacgccgggcgagcggaaccccuacgagaacauccuguacaagaucugccuguccggggacggcuggcccuacaucgccagccgcaccuccaucgugggccgggccugggagaacaccgucguggaccucgagcaggacaacaagccccagaagaucgggaacggcgggagcaacaagucccugcagagcgccggcuucgccgcggggcugaccuacucccagcucaugacgcugaaggacuucaagugcuucaaccugaucccgaacgccaagaccuggauggacaucgagggccgccccgaggaccccguggagaucgcccuguaccagcccagcuccggcugcuacguccacuucuuccgggagccgaccgaccucaagcaguucaagcaggacgccaaguacagccacgggaucgacgugaccgaccuguucgccgcgcagcccggccugacgagcgccgucaucgaggcccucccccgcaacauggugaucacgugccagggguccgaggacauccggaagcugcuggagagccagggccgccgcgacaucaagcucaucgacaucacccuguccaaggccgacagccggaaguucgagaacgccgugugggaccaguucaaggaccugugccacaugcacaccggggucgugguggagaagaagaagcgcggcggcaaggaggagaucacgccccacugcgcgcucauggacugcaucauguucgacgccgccgucuccgggggccuggacgccaaggugcugcgggugguccucccgcgcgacaugguguuccggaccagcacccccaaggugguccugugaggacuagucccuguucccagagcccacuuuuuuuucuuuuuuugaaauaaaauagccugucuuucagaucucaaaggcucuuuucagagccaccaaaaaaaaaaaaaaaaaaaaaaaaaaaaaaaaaaaaaaaaaaaaaaaaaaaaaaaaaaaaaaaaagaauu

SEQ ID NO: 21135 - RNA, 2021 nt, Artificial Sequence
  mRNA product Design a-2 (hSL-A64-N5) comprising derived and/or modified sequence from LASV(AV;Clade V)__CCA30315__SP-IgE_NP(2-569) (opt1)
aggagaguccgcucagccagguugcagaagcggcuuagcguguguccuaaucuucucucugcguguagguaggccugugccgcaaacaagcuuaccauggacuggaccuggauccuguuccucguggccgccgcgacccgcguccacagcagcgccuccaaggaggugaaguccuuccuguggacccagagccuccgccgggagcugagcggcuacugcuccaacaucaagcugcaggucgugaaggacgcccaggcgcuccugcacgggcuggacuucagcgagguguccaacguccagcgccucaugcggaagcagcgccgggacgacagcgaccugaagcgccugcgggaccucaaccaggccgugaacaaccugguggagcugaaguccacccagcagaaguccguccuccgcgugggcacgcugagcagcgacgaccugcucacccuggccgccgaccuggagaagcucaaguccaaggugacccggaccgagcgcccccugagcuccggggucuacaugggcaaccugagcucccagcagcucgaccagcggcgcgcccugcugaaccucaucgggaugacgaacggcagccagggcucccaggcggggcgggacggcguggugcgcgucugggacgugaagaacgccgagcugcugaacaaccaguucgggaccaugccgagccucacccuggccugccugaccaagcagggccagguggaccucaacgacgucgugcaggcccugacggaccuggggcucaucuacaccgcgaaguaccccaacaccagcgaccuggaccggcugacccagucccaccccauccucaacaugaucgacacgaagaaguccagccugaacaucagcggcuacaacuucucccugggcgccgccgugaaggccggggccugcaugcucgacggcgggaacaugcuggagaccaucaaggucagcccccaguccauggacggcauccucaagagcauccugaaggugaagcgcgcgcugggcauguucguguccgacaccccgggggagcggaaccccuacgagaacauccuguacaagaucugccucagcggcgacggguggcccuacaucgccucccgcaccagcaucgucggccgggccugggagaacacggugguggaccuggagaccgacgggaagccccagaagaucggcuccggcaacagcaacaagucccugcagagcgccggguucuccgccggccucaccuacagccagcugaugacccugaaggacgcgaugcugcagcucgacccgaacgccaagacguggauggacaucgaggggcgccccgaggaccccgucgagguggcccuguaccagcccaucuccggcugcuacauccacuucuuccgggagccgaccgaccugaagcaguucaagcaggacgccaaguacagccacgggaucgacaucgccgaccucuucgcggcccagcccggccugaccagcgccgucaucgaggcccugccccgcaacauggugaucacgugccagggcuccgaggacaucaagaagcuccuggagagccaggggcgcaaggacaucaagcugaucgacaucgcccucuccaagaucgacagccggaaguucgagaacgcggugugggaccaguacaaggaccugugccacaugcacaccggcgucgugguggagaagaagaagcgcgggggcaaggaggagaucaccccgcacugcgcccugauggacugcaucauguucgacgccgccgucuccgggggccucaacacccuggugcugcgggcggugcucccccgcgacauggucuuccggaccagcacgccccgcguggugcugugaggacuagucccuguucccagagcccacuuuuuuuucuuuuuuugaaauaaaauagccugucuuucagaucucaaaggcucuuuucagagccaccaaaaaaaaaaaaaaaaaaaaaaaaaaaaaaaaaaaaaaaaaaaaaaaaaaaaaaaaaaaaaaaaagaauu

SEQ ID NO: 21136 - RNA, 2021 nt, Artificial Sequence
  mRNA product Design a-2 (hSL-A64-N5) comprising derived and/or modified sequence from LASV(Togo/2016/7082;Clade VI)__AMR44578__SP-IgE_NP(2-569) (opt1)
aggagaguccgcucagccagguugcagaagcggcuuagcguguguccuaaucuucucucugcguguagguaggccugugccgcaaacaagcuuaccauggacuggaccuggauccuguuccucguggccgccgcgacccgcguccacagcagcaacuccaaggaggugaaguccuuccuguggacccagagccuccgccgggagcugagcggcuacugcuccaacaucaagcugcaggucgugaaggacgcccaggcccuccugcacgggcuggacuucagcgagguguccaacguccagcgccucaugcggaagcagaagcgcgacgacggcgaccugaagcggcugcgcgaccucaaccaggcggugaacaaccugguggagcucaagagcguccagcagaaguccauccugcggguggggacccugaccagcgacgaccugcucacccuggccgccgaccuggagaagcucaaguccaaggugacccgcaccgagcggccccugagcuccggcgucuacauggggaaccugagcucccagcagcucgaccagcgccgggcccugcugagcaugaucggcauguccggcgggaaccagaacagccagccgaagggcgacgggguggugcgcgucugggacgugaagaacgccgaccuccugaacaaccaguucggcacgaugcccucccugacccucgcgugccugaccaagcagggccagguggaccugaacgacgccguccaggcccucaccgaccuggggcugaucuacacggccaaguaccccaacagcagcgaccucgaccggcugucccagagccaccccauccugaacaugaucgacaccaagaaguccagccucaacaucuccggcuacaacuucagccugggggcggccaucaagaccggcgccugcaugcuggacgggggcaacaugcucgagaccaucaaggugacgccgcagaccauggacggcauccugaaguccauccugaaggugaagcgcagccucgggauguucaucuccgacacccccggcgagcggaaccccuacgagaacauccuguacaagaucugccugagcggggacggcuggcccuacaucgccucccgcaccgccaucaucgggcgggcgugggagaacacggucguggaccucgagagcgacuccaagccgcagaagaucggcagcaacggcuccaacaagagccugcaguccgccggguucgcccccggccugaccuacagccagcucaugacccugaaggacuccaugcugcagcuggaccccaacgccaagaccuggaucgacaucgaggggcgccccgaggacccgguggaggucgcccucuuccagcccaucagcggcugcuacauccacuucuuccgggagcccacggaccugaagcaguucaagcaggacgcgaaguacagccacgggaucgacgugaccgaccuguucgccgcccagcccggccucaccuccgccgugaucgaggcccugccgcgcaacaugguccugaccugccagggcagcgacgacaucaagaagcuccuggacucccaggggcggcgcgacaucaagcugaucgacgugagccucaacaagaucgacucccgcaaguucgagaacgcggucugggaccaguacaaggaccugugccacaugcacacgggcgugguggucgagaagaagaagaagggcgggaaggaggagaucacgccccacugcgcccugcucgacugcaucauguucgacgccgccgugagcgggggccugaacgccaccgugcugcgggcgguccucccccgcgacaugguguuccggaccuccagccccaaggugguccugugaggacuagucccuguucccagagcccacuuuuuuuucuuuuuuugaaauaaaauagccugucuuucagaucucaaaggcucuuuucagagccaccaaaaaaaaaaaaaaaaaaaaaaaaaaaaaaaaaaaaaaaaaaaaaaaaaaaaaaaaaaaaaaaaagaauu

SEQ ID NO: 21137 - RNA, 2021 nt, Artificial Sequence
  mRNA product Design a-2 (hSL-A64-N5) comprising derived and/or modified sequence from LASV(KAK-428;Clade n.d. (VII))__ANH09741__SP-IgE_NP(2-569) (opt1)
aggagaguccgcucagccagguugcagaagcggcuuagcguguguccuaaucuucucucugcguguagguaggccugugccgcaaacaagcuuaccauggacuggaccuggauccuguuccucguggccgccgcgacccgcguccacagcagcaacuccaaggaggugaaguccuuccuguggacccagagccuccgccgggagcugagcggcuacugcaccaacaucaagcugcaggucgugaaggacgcccaggcccuccugcacgggcuggacuucuccgaggugagcaacguccagcgccucaugcggaagcagaagcgcgacgacaacgaccugaagcggcugcgcgaccucaaccaggcggugaacaaccugguggagcugaaguccguccagcagaaguccgugcucaaggugggcacgcugaacagcgacgaccugcucacccuggccgccgaccuggagaagcucaagagcaaggucgugcggaccgagcgcccccuguccagcgggguguacaugggcaaccuguccagccagcagcucgaccagcggcgcgcccugcugaacaugaucgggauggccggcggcucccaggggaaccagccgagccgggacggcgucgugcgcgugugggacgucaagaacgcggaccuccugaacaaccaguucgggaccaugcccucccugacgcucgccugccugaccaagcagggccagguggaccugaacgacgugguccucgcccugaccgaccuggggcucaucuacaccgccaaguaccccaacagcuccgaccuggaccggcugagccagaaccaccccgugcucaacaugaucgacgugaacaagagcucccugaacaucagcggcuacaacuucucccugggcgcggccgucaaggccggggccugcaugcucgacggcgggaacaugcuggagacgaucaagaucagcccgcagaccguggacggcauccugaaguccauccucaaggugaagcgcgcccugggcauguucgucagcgacacccccggggagcggaaccccuacgagaacauccuguacaaggugugccucuccggcaacggguggcccuacaucgcgagccgcaccuccaucgucggccgggccugggagaacacggugguggaccuggagagcaacaagaaccagccgaaggucgggaacaacggcuccaacaagaugcugcagagcuccggcuucgccaccgggcucaccuacagccagcugaugacccugcgcgacuccaugcugcagcucgaccccacggccaagaccuggaucgacaucgagggccggcccgaggaccccguggagcuggcccuguuccagccgagcuccgggugcuacauccacuucuuccgcgagcccaccgaccucaagcaguucaagcaggacgcgaaguacagccacggcaucgacgugaacgaccuguucuccgcccagcccgggcugaccagcgccguccucgaggcccugccccggaacauggugcugacgugccagggcagcgacgacauccgcaagcuccuggacucccaggaccgcaaggacaucaagcugaucgacaucagccucuccaaggccgacgcgcggaaguucgagaacgacgugugggaccaguucaaggaccugugccacaugcacaccggcaucgucguggagaagaagaagaagggcgggaagcaggagaugaccccgcacugcgcccugcucgacugcaucauguucgacgccgccgugagcgggggccugaacguccccacccugcgcgccgugcuccccacggacaugguguuccggaccaucaccaccaaggucgugcugugaggacuagucccuguucccagagcccacuuuuuuuucuuuuuuugaaauaaaauagccugucuuucagaucucaaaggcucuuuucagagccaccaaaaaaaaaaaaaaaaaaaaaaaaaaaaaaaaaaaaaaaaaaaaaaaaaaaaaaaaaaaaaaaaagaauu

SEQ ID NO: 21138 - RNA, 2021 nt, Artificial Sequence; identical to SEQ ID NO: 21132
  mRNA product Design a-2 (hSL-A64-N5) comprising derived and/or modified sequence from LASV(Pinneo-NIG-1969;Clade I)__AIT17837__SP-IgE_NP(2-569) (opt1)

SEQ ID NO: 21139 - RNA, 2021 nt, Artificial Sequence
  mRNA product Design a-2 (hSL-A64-N5) comprising derived and/or modified sequence from LASV(ISTH0009-NIG-2011;Clade II)__AIT17405__SP-IgE_NP(2-569) (opt1)
aggagaguccgcucagccagguugcagaagcggcuuagcguguguccuaaucuucucucugcguguagguaggccugugccgcaaacaagcuuaccauggacuggaccuggauccuguuccucguggccgccgcgacccgcguccacagcagcguguccaaggaggucaagagcuuccuguggacccagucccuccgccgggagcugagcggcuacugcuccaacaucaagcuccagguggugaaggacgcccaggcccugcugcacgggcuggacuucagcgaggucuccaacgugcagcgccucaugcggaagcagaagcgcgacgacagcgaccugaagcggcugcgcgaccucaaccaggcggugaacaaccuggucgagcugaaguccacccagcagaaguccauccuccgggugggcacccugaccagcgacgaccugcucacccuggccgccgaccuggagaagcucaagagcaaggugauccgcaccgagcggccccuguccagcggggucuacaugggcaaccuguccacgcagcagcucgagcagcgccgggcccugcugaacaugaucgggauggugggcggcgcccaggggacccagccgggccgcgacggggugguccgggugugggacgugaagaaccccgaccuccugaacaaccaguucggcaccaugcccagccugacccucgcgugccugacgaagcaggggcaggucgaccugaacgacgccgugcucgcccugaccgaccugggccucaucuacaccgccaaguaccccaacuccagcgaccuggaccgccugucccagagccacccgauccucaacaugguggacaucaagaaguccagccugaacaucagcggcuacaacuucucccugggggcggccgucaaggccggcgccugcaugcucgacgggggcaacaugcuggagaccaucaaggugacgccccagaccauggacggcauccucaagagcauccugaaggugaagcggucccuggggauguucgucagcgacacccccggcgagcgcaaccccuacgagaacauccuguacaagaucugccucuccggggacggcuggccguacaucgccagccggaccuccaucguggggcgcgcgugggagaacacgaccguggaccuggagagcgacggcaagccccagaaggucggcuccgccgggagcaacaagucccugcagagcgccggcuuccccaccgggcucaccuacucccagcugaugacgcugaaggacagcaugaugcagcuggaccccuccgccaagaccuggaucgacaucgagggccggccggaggaccccguggagaucgcccucuaccagcccaugagcgggugcuacauccacuucuuccgcgagcccaccgaccugaagcaguucaagcaggacgcgaaguacucccacggcaucgacgucgccgaccuguucccggcccagcccggccucaccagcgccgugaucgaggcccugccccggaacauggugcugacgugccaggggagcgacgacaucaagcgccuccuggacucccagggccgccgggacaucaagcugaucgacaucgcgcucagcaaggccgacucccgccgguucgagaacgccgucugggaccagugcaaggaccugugccacaugcacaccggggugguggucgagaagaagaagcgcggcgggaaggaggagaucacgccccacugcgcccugauggacugcaucauguacgacgccgcggugagcggcggccucaacaucccggugcugcgggccguccugccccgcgacaugguguuccggaccuccagccccaaggugguccucugaggacuagucccuguucccagagcccacuuuuuuuucuuuuuuugaaauaaaauagccugucuuucagaucucaaaggcucuuuucagagccaccaaaaaaaaaaaaaaaaaaaaaaaaaaaaaaaaaaaaaaaaaaaaaaaaaaaaaaaaaaaaaaaaagaauu

SEQ ID NO: 21140 - RNA, 2021 nt, Artificial Sequence
  mRNA product Design a-2 (hSL-A64-N5) comprising derived and/or modified sequence from LASV(ISTH2010-NIG-2012;Clade II)__AIT17483__SP-IgE_NP(2-569) (opt1)
aggagaguccgcucagccagguugcagaagcggcuuagcguguguccuaaucuucucucugcguguagguaggccugugccgcaaacaagcuuaccauggacuggaccuggauccuguuccucguggccgccgcgacccgcguccacagcagcgccuccaaggaggugaaguccuuccuguggacccagagccuccgccgggagcugagcggcuacugcuccaacaucaagcugcaggucgugaaggacgcccaggcgcuccugcacgggcuggacuucagcgagguguccaacguccagcgccucaugcggaagcagaagcgcgacgacagcgaccugaagcggcugcgcgaccucaaccaggccgugaacaaccugguggagcugaaguccacccagcagaaguccauccuccgggucggcacgcugaccagcgacgaccugcucacccuggccgccgaccuggagaagcucaagagcaaggugauccgcaccgagcggccccuguccagcgggguguacaugggcaaccuguccacgcagcagcucgagcagcgccgggcccugcugaaccucaucgggauggucggcggcgcgcaggggacccagccgggccgcgacgggguggugcgggucugggacgugaagaaccccgaccugcugaacaaccaguucggcaccaugcccagccucacccuggccugccugacgaagcagggccagguggaccucaacgacgccguccuggcccugaccgaccucgggcugaucuacaccgcgaaguaccccaacuccagcgaccuggaccgccucucccagagccacccgauccugaacaugguggacaccaagaaguccagccugaacaucagcggcuucaacuucucccucggggccgccgugaaggccggcgccugcaugcuggacgggggcaacaugcuggagacgaucaaggucacgccccagaccauggacggcauccucaagagcauccugaaggugaagaagucccuggggauguucgugagcgacacccccggcgagcggaaccccuacgagaacauccucuacaagaucugccuguccggggacggcuggccguacaucgcgagccgcaccuccaucgucgggcgggccugggagaacaccaccguggaccuggagagcgacggcaagccccacaaggugggcaccgccggguccaacaagagccuccaguccgccggcuuccccacggggcugaccuacagccagcugaugacccugaaggacuccaugaugcagcucgaccccagcgccaagaccuggaucgacaucgagggccgcccggaggaccccgucgagaucgcgcuguaccagcccauguccgggugcuacauccacuucuuccgggagcccacggaccugaagcaguucaagcaggacgccaaguacagccacggcaucgacguggccgaccucuucccggcccagcccggccugaccuccgccgucaucgaggcgcugccccgcaacauggugcugaccugccaggggagcgacgacaucaagcggcuccuggacagccagggccgccgcgacaucaagcucaucgacaucgcccuguccaaggccgacagccggcgcuucgagaacgccgugugggaccagugcaaggaccugugccacaugcacaccggggucgugguggagaagaagaagcggggcgggaaggaggagaucacgccccacugcgcccucauggacugcaucauguacgacgcggccgucuccggcggccugaacaucccggugcugcgcgccgugcucccccgggacauggucuuccgcaccagcucccccaagguggugcugugaggacuagucccuguucccagagcccacuuuuuuuucuuuuuuugaaauaaaauagccugucuuucagaucucaaaggcucuuuucagagccaccaaaaaaaaaaaaaaaaaaaaaaaaaaaaaaaaaaaaaaaaaaaaaaaaaaaaaaaaaaaaaaaaagaauu

SEQ ID NO: 21141 - RNA, 2021 nt, Artificial Sequence
  mRNA product Design a-2 (hSL-A64-N5) comprising derived and/or modified sequence from LASV(Lassa virus/H.sapiens-wt/NGA/2015/ISTH_0543;Clade II)__AVO03640__SP-IgE_NP(2-569) (opt1)
aggagaguccgcucagccagguugcagaagcggcuuagcguguguccuaaucuucucucugcguguagguaggccugugccgcaaacaagcuuaccauggacuggaccuggauccuguuccucguggccgccgcgacccgcguccacagcagcgccuccaaggaggugaaguccuuccuguggacccagagccuccgccgggagcugagcggcuacugcuccaacaucaagcugcaggucgugaaggacgcccaggcgcuccugcacgggcuggacuucagcgagguguccaacguccagcgccucaugcggaagcagaagcgcgacgacagcgaccugaagcggcugcgcgaccucaaccaggccgugaacaaccugguggagcugaaguccacccagcagaaguccauccuccgggucggcacgcugaccagcgacgaccugcucacccuggccgccgaccuggagaagcucaagagcaaggugauccgcaccgagcggccccuguccagcgggguguacaugggcaaccuguccacgcagcagcucgagcagcgccgggcccugcugaacaugaucgggauggucggcggcgcgcaggggacccagccgggccgcgacgggguggugcgggucugggacgugaagaaccccgaccuccugaacaaccaguucggcaccaugcccagccugacccucgccugccugacgaagcagggccagguggaccugaacgacgccguccucgcccugaccgaccuggggcucaucuacaccgcgaaguaccccaacuccagcgaccuggaccgccugucccagagccacccgauccucaacaugguggacaccaagaaguccagccugaacaucagcggcuacaacuucucccugggggccgccgugaaggccggcgccugcaugcucgacgggggcaacaugcuggagacgaucaaggucacgccccagaccauggacggcauccucaagagcauccugaaggugaagaagucccuggggauguucgugagcgacacccccggcgagcggaaccccuacgagaacauccuguacaagaucugccucuccggggacggcuggccguacaucgcgagccgcaccuccaucgucgggcgggccugggagaacaccaccguggaccuggagagcgacggcaagccccagaaggugggcuccgccgggagcaacaagucccugcagagcgccggcuuccccaccgggcucacguacucccagcugaugacccugaaggacagcaugaugcagcuggaccccuccgccaagaccuggaucgacaucgagggccgcccggaggaccccgucgagaucgcgcucuaccagcccaugagcgggugcuacauccacuucuuccgggagcccaccgaccugaagcaguucaagcaggacgccaaguacucccacggcaucgacguggccgaccuguucccggcccagcccggccucacgagcgccgucaucgaggcgcugccccgcaacauggugcugaccugccaggggagcgacgacaucaagcggcuccuggacucccagggccgcaaggacaucaagcugaucgacaucgcccucagcaaggccgacucccgccgguucgagaacgccgugugggaccagugcaaggaccugugccacaugcacaccggggucgugguggagaagaagaagcgcggcgggaaggaggagaucacgccccacugcgcccugauggacugcaucauguacgacgcggccgucagcggcggccucaacaucccggugcugcgggccgugcugccccgcgacauggucuuccggaccuccagccccaagguggugcucugaggacuagucccuguucccagagcccacuuuuuuuucuuuuuuugaaauaaaauagccugucuuucagaucucaaaggcucuuuucagagccaccaaaaaaaaaaaaaaaaaaaaaaaaaaaaaaaaaaaaaaaaaaaaaaaaaaaaaaaaaaaaaaaaagaauu

SEQ ID NO: 21142 - RNA, 2021 nt, Artificial Sequence
  mRNA product Design a-2 (hSL-A64-N5) comprising derived and/or modified sequence from LASV(Lassa virus/H.sapiens-wt/NGA/2016/ISTH_0009;Clade II)__AVO03572__SP-IgE_NP(2-569) (opt1)
aggagaguccgcucagccagguugcagaagcggcuuagcguguguccuaaucuucucucugcguguagguaggccugugccgcaaacaagcuuaccauggacuggaccuggauccuguuccucguggccgccgcgacccgcguccacagcagcgccuccaaggaggugaaguccuuccuguggacccagagccuccgccgggagcugagcggcuacugcuccaacaucaagcugcaggucgugaaggacgcccaggcgcuccugcacgggcuggacuucagcgagguguccaacguccagcgccucaugcggaagcagaagcgcgacgacagcgaccugaagcggcugcgcgaccucaaccaggccgugaacaaccugguggagcugaaguccacccagcagaaguccauccuccgggucggcacgcugaccagcgacgaccugcucacccuggccgccgaccuggagaagcucaagagcaaggugauccgcaccgagcggccccuguccagcgggguguacaugggcaaccuguccacgcagcagcucgagcagcgccgggcccugcugaacaugaucgggauggucggcggcgcgcaggggacccagccgggccgcgacgggguggugcgggucugggacgugaagaaccccgaccuccugaacaaccaguucggcaccaugcccagccugacccucgccugccugacgaagcagggccagguggaccugaacgacgccguccucgcccugaccgaccuggggcucaucuacaccgcgaaguaccccaacuccagcgaccuggaccgccugucccagagccacccgauccucaacaugguggacaccaagaaguccagccugaacaucagcggcuacaacuucucccugggggccgccgugaaggccggcgccugcaugcucgacgggggcaacaugcuggagacgaucaaggucacgccccagaccauggacggcauccucaagagcauccugaaggugaagaagucccuggggauguucgugagcgacacccccggcgagcggaaccccuacgagaacauccuguacaagaucugccucuccggggacggcuggccguacaucgcgagccgcaccuccaucgucgggcgggccugggagaacaccaccguggaccuggagagcgacggcaagccccagaaggugggcuccgccgggagcaacaagucccugcagagcgccggcuuccccaccgggcucacguacucccagcugaugacccugaaggacagcaugaugcagcuggaccccuccgccaagaccuggaucgacaucgagggccgcccggaggaccccgucgagaucgcgcucuaccagcccaugagcgggugcuacauccacuucuuccgggagcccaccgaccugaagcaguucaagcaggacgccaaguacucccacggcaucgacguggccgaccuguucccggcccagcccggccucacgagcgccgucaucgaggcgcugccccgcaacauggugcugaccugccaggggagcgacgacaucaagcggcuccuggacucccagggccgccgcgacaucaagcugaucgacaucgcccucagcaaggccgacucccggcgcuucgagaacgccgugugggaccagugcaaggaccugugccacaugcacaccggggucgugguggagaagaagaagcggggcgggaaggaggagaucacgccccacugcgcccugauggacugcaucauguacgacgcggccgucagcggcggccucaacaucccggugcugcgcgccgugcugccccgggacauggucuuccgcaccuccagccccaagguggugcucugaggacuagucccuguucccagagcccacuuuuuuuucuuuuuuugaaauaaaauagccugucuuucagaucucaaaggcucuuuucagagccaccaaaaaaaaaaaaaaaaaaaaaaaaaaaaaaaaaaaaaaaaaaaaaaaaaaaaaaaaaaaaaaaaagaauu

SEQ ID NO: 21143 - RNA, 2021 nt, Artificial Sequence
  mRNA product Design a-2 (hSL-A64-N5) comprising derived and/or modified sequence from LASV(Lassa virus/H.sapiens-wt/NGA/2016/ISTH_0017;Clade II)__AVO03568__SP-IgE_NP(2-569) (opt1)
aggagaguccgcucagccagguugcagaagcggcuuagcguguguccuaaucuucucucugcguguagguaggccugugccgcaaacaagcuuaccauggacuggaccuggauccuguuccucguggccgccgcgacccgcguccacagcagcgccuccaaggaggugaaguccuuccuguggacccagagccuccgccgggagcugagcggcuacugcuccagcaucaagcugcaggucgugaaggacgcccaggcgcuccugcacgggcuggacuucuccgaggugagcaacguccagcgccucaugcggaagcagaagcgcgacgacuccgaccugaagcggcugcgcgaccucaaccaggccgugaacaaccugguggagcucaagagcacccagcagaaguccauccugcgggucggcacgcugaccagcgacgaccugcucacccuggccgccgaccuggagaagcucaaguccaaggugauccgcaccgagcggccccugagcuccgggguguacaugggcaaccugagcacgcagcagcucgagcagcgccgggcccugcugaacaugaucgggauggcgggcggcgcccaggggacccagccgggccgcgacggggucgugcgggugugggacgucaagaaccccgaccuccugaacaaccaguucggcaccaugcccucccugacccucgccugccugacgaagcagggccagguggaccugaacgacgccgugcucgcgcugaccgaccuggggcucaucuacaccgccaaguaccccaacagcuccgaccuggaccgccugagccagagccacccgauccucaacauggucgacaccaagaaguccagccugaacaucuccggcuacaacuucagccugggggccgccgugaaggccggcgcgugcaugcucgacgggggcaacaugcuggagacgaucaaggugacgccccagaccauggacggcauccugaaguccauccucaaggucaagcggagccuggggauguucguguccgacgcccccggcgagcgcaaccccuacgagaacauccuguacaagaucugccucagcggggacggcuggccguacaucgccucccggaccagcaucguggggcgcgccugggagaacaccaccgucgaccuggaguccgacggcaagccccagaaggugggcgccaccgggagcaacaagucccugcagagcgcgggcuuccccaccgggcucacguacucccagcugaugacccugaaggacagcaugaugcagcuggaccccuccgccaagaccuggaucgacaucgagggccggccggaggaccccguggaggucgcccucuaccagcccgugagcgggugcuacauccacuucuuccgcgagcccaccgaccugaagcaguucaagcaggacgccaaguacucccacggcaucgacgucgccgaccuguucccggcgcagcccggccucacgagcgccgugaucgaggcccugccccggaacauggugcugaccugccaggggagcgacgacaucaagaagcuccuggacucccagggccgcaaggacaucaagcugaucgacaucgcccucagcaaggccgacucccgccgguucgagaacgcggucugggaccagugcaaggaccugugccacaugcacaccggggugguggucgagaagaagaagcgcggcgggaaggaggagaucacgccccacugcgcccugauggacugcaucauguacgacgccgccgugagcggcggccucaacaucccggugcugcgggcgguccugccccgcgacaugguguuccggaccuccagccccaaggugguccucugaggacuagucccuguucccagagcccacuuuuuuuucuuuuuuugaaauaaaauagccugucuuucagaucucaaaggcucuuuucagagccaccaaaaaaaaaaaaaaaaaaaaaaaaaaaaaaaaaaaaaaaaaaaaaaaaaaaaaaaaaaaaaaaaagaauu

SEQ ID NO: 21144 - RNA, 2021 nt, Artificial Sequence
  mRNA product Design a-2 (hSL-A64-N5) comprising derived and/or modified sequence from LASV(Lassa virus/H.sapiens-wt/NGA/2018/ISTH_0959;Clade II)__AVV65100__SP-IgE_NP(2-569) (opt1)
aggagaguccgcucagccagguugcagaagcggcuuagcguguguccuaaucuucucucugcguguagguaggccugugccgcaaacaagcuuaccauggacuggaccuggauccuguuccucguggccgccgcgacccgcguccacagcagcgccuccaaggaggugaaguccuuccuguggacccagagccuccgccgggagcugagcggcuacugcuccaacaucaagcugcaggucgugaaggacgcccaggcgcuccugcacgggcuggacuucagcgagguguccaacguccagcgccucaugcggaagcagaagcgcgacgacagcgaccugaagcggcugcgcgaccucaaccaggccgugaacaaccugguggagcugaaguccacccagcagaaguccauccuccgggucggcacccugaccagcgacgaccugcucacccuggccgccgaccuggagaagcucaagagcaaggugauccgcaccgagcggccccuguccagcgggguguacaugggcaaccuguccacgcagcagcucgagcagcgccgggcccugcugaaccucaucgggauggucggcggcgcgcaggggacccagccgggccgcgacgggguggugcgggucugggacgugaagaaccccgaccugcugaacaaccaguucggcaccaugcccagccucacccuggccugccugacgaagcagggccagguggaccucaacgacgucgugcuggcccugaccgaccucgggcugaucuacaccgccaaguaccccaacuccagcgaccuggaccgccucucccagagccacccgauccugaacaugguggacaccaagaaguccagccugaacaucagcggcuucaacuucucccucggggcggccgucaaggccggcgccugcaugcuggacgggggcaacaugcuggagacgaucaaggugacgccccagaccauggacggcauccucaagagcauccugaaggugaagaagucccuggggauguucgucagcgacacccccggcgagcggaaccccuacgagaacauccucuacaagaucugccuguccggggacggcuggccguacaucgccagccgcaccuccaucguggggcgggcgugggagaacaccaccguggaccuggagagcgacggcaagccccacaaggucggcaccgccggguccaacaagagccuccaguccgccggcuuccccacggggcugaccuacagccagcugaugacccugaaggacuccaugaugcagcucgaccccagcgccaagaccuggaucgacaucgagggccgcccggaggaccccguggagaucgcccuguaccagcccauguccgggugcuacauccacuucuuccgggagcccacggaccugaagcaguucaagcaggacgcgaaguacagccacggcaucgacgucgccgaccucuucccggcccagcccggccugaccuccgccgugaucgaggcccugccccgcaacauggugcugaccugccaggggagcgacgacaucaagcggcuccuggacagccagggccgcaaggacaucaagcucaucgacaucgcgcuguccaagaccgacagccgccgguucgagaacgccgucugggaccagugcaaggaccugugccacaugcacacgggggugguggucgagaagaagaagcgcggcgggaaggaggagaucacgccccacugcgcccucauggacugcaucauguacgacgccgccguguccggcggccugaacaucccggugcugcgggcgguccucccccgcgacaugguguuccggaccagcucccccaaggugguccugugaggacuagucccuguucccagagcccacuuuuuuuucuuuuuuugaaauaaaauagccugucuuucagaucucaaaggcucuuuucagagccaccaaaaaaaaaaaaaaaaaaaaaaaaaaaaaaaaaaaaaaaaaaaaaaaaaaaaaaaaaaaaaaaaagaauu

SEQ ID NO: 21145 - RNA, 2021 nt, Artificial Sequence
  mRNA product Design a-2 (hSL-A64-N5) comprising derived and/or modified sequence from LASV(LASV003-NIG-2008;Clade II)__AIT17581__SP-IgE_NP(2-569) (opt1)
aggagaguccgcucagccagguugcagaagcggcuuagcguguguccuaaucuucucucugcguguagguaggccugugccgcaaacaagcuuaccauggacuggaccuggauccuguuccucguggccgccgcgacccgcguccacagcagcgccuccaaggaggugaaguccuuccuguggacccagagccuccgccgggagcugagcggcuacugcuccagcaucaagcugcaggucgugaaggacgcccaggcgcuccugcacgggcuggacuucuccgaggugagcaacguccagcgccucaugcggaagcagaagcgcgacgacuccgaccugaagcggcugcgcgaccucaaccaggccgugaacaaccugguggagcucaagagcacccagcagaaguccguccugcgggugggcacccugaccagcgacgaccugcucacccuggccgccgaccuggagaagcucaaguccaaggugauccgcaccgagcggccccugagcuccggggucuacaugggcaaccugagcgcccagcagcucgagcagcgccggacgcugcugaacaugaucgggauggugggcggcgcgcaggggacccagccgggccgcgacggggugguccgggugugggacgugaagaaccccgaccuccugaacaaccaguucggcaccaugcccucccugacccucgccugccugacgaagcaggggcaggucgaccugaacgacguggugcucgcccugaccgaccugggccucaucuacaccgccaaguaccccaacagcuccgaccuggaccgccugagccagagccacccgauccucuccauggucgacaccaagaaguccagccugaacaucagcggcuacaacuucucccugggggcggccgugaaggccggcgccugcaugcucgacgggggcaacaugcuggagacgaucaaggugacgccccagaccauggacggcauccucaagagcauccugaaggucaagaagucccuggggauguucgugagcgacacccccggcgagcggaaccccuacgagaacauccuguacaagaucugccucuccggggacggcuggccguacaucgccagccgcaccuccaucguggggcgggcgugggagaacaccaccgucgaccuggagagcgacggcaagccccagaaggugggcaccgccggguccaacaagagccugcaguccgccggcuuccccacggggcucaccuacagccagcugaugacccugaaggacuccaugaugcagcuggaccccagcgccaagaccuggaucgacaucgagggccgcccggaggaccccgucgagaucgcccucuaccagcccauguccgggugcuacauccacuucuuccgggagcccacggaccugaagcaguucaagcaggacgcgaaguacagccacggcaucgacgugaccgaccuguucccggcccagcccggccucaccagcgccgugaucgaggcccugccccgcaacaugguccugaccugccagggguccgacgacaucaagcggcuccuggacagccagggccgccgcgacaucaagcugaucgacaucgcccucuccaaggcggacagccggcgcuucgagaacgccgugugggaccagugcaaggaccugugccacaugcacacggggguggucguggagaagaagaagcggggcgggaaggaggagaucacgccccacugcgcccugauggacugcaucauguacgacgccgccguguccggcggccucaacaucccgguccugcgcgcggugcugccccgggacaugguguuccgcaccagcucccccaaggucgugcucugaggacuagucccuguucccagagcccacuuuuuuuucuuuuuuugaaauaaaauagccugucuuucagaucucaaaggcucuuuucagagccaccaaaaaaaaaaaaaaaaaaaaaaaaaaaaaaaaaaaaaaaaaaaaaaaaaaaaaaaaaaaaaaaaagaauu

SEQ ID NO: 21146 - RNA, 2021 nt, Artificial Sequence
  mRNA product Design a-2 (hSL-A64-N5) comprising derived and/or modified sequence from LASV(LASV035-NIG-2009;Clade II)__AIT17589__SP-IgE_NP(2-569) (opt1)
aggagaguccgcucagccagguugcagaagcggcuuagcguguguccuaaucuucucucugcguguagguaggccugugccgcaaacaagcuuaccauggacuggaccuggauccuguuccucguggccgccgcgacccgcguccacagcagcgccuccaaggaggugaaguccuuccuguggacccagagccuccgccgggagcugagcggcuacugcuccagcaucaagcugcaggucgugaaggacgcccaggcgcuccugcacgggcuggacuucuccgaggugagcaacguccagcgccucaugcggaagcagaagcgcgacgacuccgaccugaagcggcugcgcgaccucaaccaggccgugaacaaccugguggagcucaagagcacccagcagaaguccauccugcgggucggcacgcugaccagcgacgaccugcucacccuggccgccgaccuggagaagcucaaguccaaggugauccgcaccgagcggccccugagcuccgggguguacaugggcaaccugagcgcccagcagcucgagcagcgccgggcgcugcugaacaugaucgggauggucggcggcgcccaggggacgcagccgggccgcgacgggguggugcgggucugggacgugaagaaccccgaccuccugaacaaccaguucggcaccaugcccucccugacccucgccugccugaccaagcagggccagguggaccugaacgacgccguccucgcgcugacggaccuggggcucaucuacaccgccaaguaccccaacagcuccgaccuggaccgccugagccagagccacccgauccucaacaugguggacaccaagaaguccagccugaacaucuccggcuacaacuucagccugggggccgccgugaaggccggcgcgugcaugcucgacgggggcaacaugcuggagaccaucaaggucacgccccagaccauggacggcauccugaaguccauccucaaggugaagcggagccuggggauguucguguccgacacccccggcgagcgcaaccccuacgagaacauccuguacaagaucugccucagcggggacggcuggccguacaucgccucccggaccagcaucgucgggcgcgccugggagaacacgaccguggaccuggaguccgacggcaagccccagaaggugggcaccaccgggagcaacaagucccugcagagcgccggcuuccccacggggcucaccuacucccagcugaugacccugaaggacagcaugaugcagcuggaccccuccgccaagaccuggaucgacaucgagggccggccggaggaccccgucgagaucgcgcucuaccagcccaugagcgggugcuacauccacuucuuccgcgagcccacggaccugaagcaguucaagcaggacgccaaguacucccacggcaucgacguggccgaccuguucccggcccagcccggccucaccagcgccgucaucgaggcgcugccccggaacauggugcugaccugccaggggagcgacgacaucaagaagcuccuggacucccagggccgccgcgacaucaagcugaucgacaucgcccucagcaaggccgacucccggaaguucgagaacgccgugugggaccagugcaaggaccugugccacaugcacaccggggucgugguggagaagaagaagcgcggcgggaaggaggagaucacgccccacugcgcccugauggacugcaucauguacgacgcggccgucagcggcggccucaacaucccggugcugcgggccgugcugccccgcgacauggucuuccggaccuccagccccaagguggugcucugaggacuagucccuguucccagagcccacuuuuuuuucuuuuuuugaaauaaaauagccugucuuucagaucucaaaggcucuuuucagagccaccaaaaaaaaaaaaaaaaaaaaaaaaaaaaaaaaaaaaaaaaaaaaaaaaaaaaaaaaaaaaaaaaagaauu

SEQ ID NO: 21147 - RNA, 2021 nt, Artificial Sequence
  mRNA product Design a-2 (hSL-A64-N5) comprising derived and/or modified sequence from LASV(LASV1000-NIG-2009;Clade II)__AIT17783__SP-IgE_NP(2-569) (opt1)
aggagaguccgcucagccagguugcagaagcggcuuagcguguguccuaaucuucucucugcguguagguaggccugugccgcaaacaagcuuaccauggacuggaccuggauccuguuccucguggccgccgcgacccgcguccacagcagcgccuccaaggaggugaaguccuuccuguggacccagagccuccgccgggagcugagcggcuacugcuccaacaucaagcugcaggucgugaaggacgcccaggcgcuccugcacgggcuggacuucagcgagguguccaacguccagcgccucaugcggaagcagaagcgcgacgacagcgaccugaagcggcugcgcgaccucaaccaggccgugaacaaccugguggagcugaaguccacccagcagaaguccauccuccgggucggcacgcugaccagcgacgaccugcucacccuggccgccgaccuggagaagcucaagagcaaggugauccgcaccgagcggccccuguccagcgggguguacaugggcaaccuguccacgcagcagcucgagcagcgccgggcccugcugaacaugaucgggauggucggcggcgcgcaggggacccagccgggccgcgacgggguggugcgggucugggacgugaagaaccccgaccuccugaacaaccaguucggcaccaugcccagccugacccucgccugccugacgaagcagggccagguggaccugaacgacgucgugcucgcccugaccgaccuggggcucaucuacaccgccaaguaccccaacuccagcgaccuggaccgccugucccagagccacccgauccucaacaugguggacaccaagaaguccagccugaacaucagcggcuacaacuucucccugggggcggccgucaaggccggcgccugcaugcucgacgggggcaacaugcuggagacgaucaaggugacgccccagaccauggacggcauccucaagagcauccugaaggugaagaagucccuggggauguucgucagcgacacccccggcgagcggaaccccuacgagaacauccuguacaagaucugccucuccggggacggcuggccguacaucgccagccgcaccuccaucguggggcgggcgugggagaacaccaccguggaccuggagagcgacggcaagccccagaaggucggcaccgccggguccaacaagagccugcaguccgccggcuuccccacggggcucaccuacagccagcugaugacccugaaggacuccaugaugcagcuggaccccagcgccaagaccuggaucgacaucgagggccgcccggaggaccccguggagaucgcccucuaccagcccgucuccgggugcuacauccacuucuuccgggagcccacggaccugaagcaguucaagcaggacgcgaaguacagccacggcaucgacguggccgaccuguucccggcccagcccggccucaccuccgccgugaucgaggcccugccccgcaacaugguccugaccugccaggggagcgacgacaucaagcggcuccuggacagccagggccgccgcgacaucaagcugaucgacaucgcgcucuccaaggccgacagccggcgcuucgagaacgccgugugggaccagugcaaggaccugugccacaugcacaccgggguggucguggagaagaagaagcggggcgggaaggaggagaucacgccccacugcgcccugauggacugcaucauguacgacgccgcgguguccggcggccucaacaucccgguccugcgcgccgugcugccccgggacaugguguuccgcaccagcucccccaaggucgugcucugaggacuagucccuguucccagagcccacuuuuuuuucuuuuuuugaaauaaaauagccugucuuucagaucucaaaggcucuuuucagagccaccaaaaaaaaaaaaaaaaaaaaaaaaaaaaaaaaaaaaaaaaaaaaaaaaaaaaaaaaaaaaaaaaagaauu

SEQ ID NO: 21148 - RNA, 2021 nt, Artificial Sequence
  mRNA product Design a-2 (hSL-A64-N5) comprising derived and/or modified sequence from LASV(LASV221-NIG-2010;Clade II)__AIT17625__SP-IgE_NP(2-569) (opt1)
aggagaguccgcucagccagguugcagaagcggcuuagcguguguccuaaucuucucucugcguguagguaggccugugccgcaaacaagcuuaccauggacuggaccuggauccuguuccucguggccgccgcgacccgcguccacagcagcgccuccaaggaggugaaguccuuccuguggacccagagccuccgccgggagcugagcggcuacugcuccagcaucaagcugcaggucgugaaggacgcccaggcgcuccugcacgggcuggacuucuccgaggugagcaacguccagcgccucaugcggaagcagcgccgggacgacuccgaccugaagcgccugcgggaccucaaccaggccgugaacaaccugguggagcucaagagcacccagcagaaguccauccugcgcgucggcacgcugaccagcgacgaccugcucacccuggccgccgaccuggagaagcucaaguccaaggugauccggaccgagcgcccccugagcuccgggguguacaugggcaaccugagcacgcagcagcucgagcagcggcgcgcccugcugaacaugaucgggauggucggcggcgcgcaggggacccagccgggccgggacgggguggugcgcgucugggacgugaagaaccccgaccuccugaacaaccaguucggcaccaugcccucccugacccucgccugccugacgaagcagggccagguggaccugaacgacgccguccucgcccugaccgaccuggggcucaucuacaccgcgaaguaccccaacagcuccgaccuggaccggcugagccagagccacccgauccucaacaugguggacaccaagaaguccagccugaacaucuccggcuacaacuucagccugggggccgccgugaaggccggcgccugcaugcucgacgggggcaacaugcuggagacgaucaaggucacgccccagaccguggacggcauccugaaguccauccucaaggugaagcgcagccuggggauguucgucuccgacacccccggcgagcggaaccccuacgagaacauccuguacaagaucugccucagcggggacggcuggccguacaucgcgucccgcaccagcaucguggggcgggccugggagaacaccaccguggaccuggaguccgacggcaagccccagaaggucggcaccgccgggagcaacaagucccugcagagcgccggcuuccccacggggcucaccuacucccagcugaugacccugaaggacagcaugaugcagcuggaccccuccgccaagaccuggaucgacaucgagggccgcccggaggaccccguggagaucgcgcucuaccagcccaugagcgggugcuacauccacuucuuccgggagcccacggaccugaagcaguucaagcaggacgccaaguacucccacggcaucgacgucgccgaccuguucccggcccagcccggccucaccagcgccgugaucgaggcgcugccccgcaacauggugcugaccugccaggggagcgacgacaucaagcgccuccuggacucccagggccggcgcgacaucaagcugaucgacaucgcccucagcaaggccgacucccggaaguucgagaacgccgucugggaccagugcaaggaccugugccacaugcacaccggggugguggucgagaagaagaagcgcggcgggaaggaggagaucacgccccacugcgcccugauggacugcaucauguacgacgcggccgugagcggcggccucaacaucccggugcugcgggccguccugccccgcgacaugguguuccggaccuccagccccaaggugguccucugaggacuagucccuguucccagagcccacuuuuuuuucuuuuuuugaaauaaaauagccugucuuucagaucucaaaggcucuuuucagagccaccaaaaaaaaaaaaaaaaaaaaaaaaaaaaaaaaaaaaaaaaaaaaaaaaaaaaaaaaaaaaaaaaagaauu

SEQ ID NO: 21149 - RNA, 2021 nt, Artificial Sequence
  mRNA product Design a-2 (hSL-A64-N5) comprising derived and/or modified sequence from LASV(LASV237-NIG-2010;Clade II)__AIT17639__SP-IgE_NP(2-569) (opt1)
aggagaguccgcucagccagguugcagaagcggcuuagcguguguccuaaucuucucucugcguguagguaggccugugccgcaaacaagcuuaccauggacuggaccuggauccuguuccucguggccgccgcgacccgcguccacagcagcgccuccaaggaggugaaguccuuccuguggacccagagccuccgccgggagcugagcggcuacugcuccaacaucaagcugcaggucgugaaggacgcccaggcgcuccugcacgggcuggacuucagcgagguguccaacguccagcgccucaugcggaagcagaagcgcgacgacagcgaccugaagcggcugcgcgaccucaaccaggccgugaacaaccugguggagcugaaguccacccagcagaaguccauccuccgggucggcacccugaccagcgacgaccugcucacccuggccgccgaccuggagaagcucaagagcaaggugauccgcaccgagcggccccuguccagcgggguguacaugggcaaccuguccacgcagcagcucgagcagcgccgggcccugcugaacaugaucgggauggucggcggcgcgcaggggacccagccgggccgcgacgggguggugcgggucugggacgugaagaaccccgaccuccugaacaaccaguucggcaccaugcccagccugacccucgccugccugacgaagcagggccagguggaccugaacgacgccguccucgcccugaccgaccuggggcucaucuacaccgcgaaguaccccaacuccagcgaccuggaccgccugucccagagccacccgauccucaacaugguggacaucaagaaguccagccugaacaucagcggcuacaacuucucccugggggccgccgugaaggccggcgccugcaugcucgacgggggcaacaugcuggagaccaucaaggucacgccccagaccauggacggcauccucaagagcauccugaaggugaagcggucccuggggauguucgugagcgacacccccggcgagcgcaaccccuacgagaacauccuguacaagaucugccucuccggggacggcuggccguacaucgcgagccggaccuccaucgucgggcgcgccugggagaacacgaccguggaccuggagagcgacggcaagccccagaaggugggcuccgccgggagcaacaagucccugcagagcgccggcuuccccaccgggcucaccuacucccagcugaugacgcugaaggacagcaugaugcagcuggaccccuccgccaagaccuggaucgacaucgagggccggccggaggaccccgucgagaucgcgcucuaccagcccaugagcgggugcuacauccacuucuuccgcgagcccaccgaccugaagcaguucaagcaggacgccaaguacucccacggcaucgacguggccgaccuguucccggcccagcccggccucaccagcgccgucaucgaggcgcugccccggaacauggugcugacgugccaggggagcgacgacaucaagcgccuccuggacucccagggccgccgggacaucaagcugaucgacaucgcccucagcaaggccgacucccgccgguucgagaacgccgugugggaccagugcaaggaccugugccacaugcacaccggggucgugguggagaagaagaagcgcggcgggaaggaggagaucacgccccacugcgcccugauggacugcaucauguacgacgcggccgucagcggcggccucaacaucccggugcugcgggccgugcugccccgcgacauggucuuccggaccuccagccccaagguggugcucugaggacuagucccuguucccagagcccacuuuuuuuucuuuuuuugaaauaaaauagccugucuuucagaucucaaaggcucuuuucagagccaccaaaaaaaaaaaaaaaaaaaaaaaaaaaaaaaaaaaaaaaaaaaaaaaaaaaaaaaaaaaaaaaaagaauu

SEQ ID NO: 21150 - RNA, 2021 nt, Artificial Sequence
  mRNA product Design a-2 (hSL-A64-N5) comprising derived and/or modified sequence from LASV(LASV253-NIG-2011;Clade II)__AIT17671__SP-IgE_NP(2-569) (opt1)
aggagaguccgcucagccagguugcagaagcggcuuagcguguguccuaaucuucucucugcguguagguaggccugugccgcaaacaagcuuaccauggacuggaccuggauccuguuccucguggccgccgcgacccgcguccacagcagcgccuccaaggaggugaaguccuuccuguggacccagagccuccgccgggagcugagcggcuacugcuccagcaucaagcugcaggucgugaaggacgcccaggcgcuccugcacgggcuggacuucuccgaggugagcaacguccagcgccucaugcggaagcagaagcgcgacgacuccgaccugaagcggcugcgcgaccucaaccaggccgugaacaaccugguggagcucaagagcacccagcagaaguccguccugcgggugggcacccugaccagcgacgaccugcucacccuggccgccgaccuggagaagcucaaguccaaggugauccgcaccgagcggccccugagcuccggggucuacaugggcaaccugagcacgcagcagcucgagcagcgccgggcccugcugaacaugaucgggauggugggcggcgcgcaggggacccagccgggccgcgacggggugguccgggugugggacgugaagaaccccgaccuccugaacaaccaguucggcaccaugcccucccugacccucgccugccugacgaagcaggggcaggucgaccugaacgacguggugcucgcccugaccgaccugggccucaucuacaccgccaaguaccccaacagcuccgaccuggaccgccugagccagagccacccgauccucaacauggucgacaccaagaaguccagccugaacaucuccggcuacaacuucagccugggggcggccgugaaggccggcgccugcaugcucgacgggggcaacaugcuggagacgaucaaggugacgccccagaccauggacggcauccugaaguccauccucaaggucaagaagucccuggggauguucgugagcgacacccccggcgagcggaaccccuacgagaacauccuguacaagaucugccucagcggggacggcuggccguacaucgccucccgcaccagcaucguggggcgggcgugggagaacaccaccgucgaccuggaguccgacggcaagccccagaaggugggcaccgccgggagcaacaagucccugcagagcgccggcuuccccacggggcucaccuacucccagcugaugacccugaaggacagcaugaugcagcuggaccccuccgccaagaccuggaucgacaucgagggccgcccggaggaccccgucgagaucgcccucuaccagcccaugagcgggugcuacauccacuucuuccgggagcccacggaccugaagcaguucaagcaggacgcgaaguacucccacggcaucgacgugaccgaccuguucccggcccagcccggccucaccagcgccgugaucgaggcccugccccgcaacaugguccugaccugccaggggagcgacgacaucaagcggcuccuggacucccagggccgccgcgacaucaagcugaucgacaucgcccucagcaaggcggacucccggcgcuucgagaacgccgugugggaccagugcaaggaccugugccacaugcacacggggguggucguggagaagaagaagcggggcgggaaggaggagaucacgccccacugcgcccugauggacugcaucauguacgacgccgccgugagcggcggccucaacaucccgguccugcgcgcggugcugccccgggacaugguguuccgcaccuccagccccaaggucgugcucugaggacuagucccuguucccagagcccacuuuuuuuucuuuuuuugaaauaaaauagccugucuuucagaucucaaaggcucuuuucagagccaccaaaaaaaaaaaaaaaaaaaaaaaaaaaaaaaaaaaaaaaaaaaaaaaaaaaaaaaaaaaaaaaaagaauu

SEQ ID NO: 21151 - RNA, 2021 nt, Artificial Sequence
  mRNA product Design a-2 (hSL-A64-N5) comprising derived and/or modified sequence from LASV(LASV254-NIG-2011;Clade II)__AIT17675__SP-IgE_NP(2-569) (opt1)
aggagaguccgcucagccagguugcagaagcggcuuagcguguguccuaaucuucucucugcguguagguaggccugugccgcaaacaagcuuaccauggacuggaccuggauccuguuccucguggccgccgcgacccgcguccacagcagcgccuccaaggaggugaaguccuuccuguggacccagagccuccgccgggagcugagcggcuacugcuccagcaucaagcugcaggucgugaaggacgcccaggcgcuccugcacgggcuggacuucuccgaggugagcaacguccagcgccucaugcggaagcagaagcgcgacgacuccgaccugaagcggcugcgcgaccucaaccaggccgugaacaaccugguggagcucaagagcacccagcagaaguccguccugcgggugggcacgcugaccagcgacgaccugcucacccuggccgccgaccuggagaagcucaaguccaaggugauccgcaccgagcggccccugagcuccggggucuacaugggcaaccugagcacgcagcagcucgagcagcgccgggcccugcugaacaugaucgggauggugggcggcgcgcaggggacccagccgggccgcgacggggugguccgggugugggacgugaagaaccccgaccuccugaacaaccaguucggcaccaugcccucccugacccucgccugccugacgaagcaggggcaggucgaccugaacgacgccgugcucgcccugaccgaccugggccucaucuacaccgcgaaguaccccaacagcuccgaccuggaccgccugagccagagccacccgauccucaacaugguggacaccaagaaguccagccugaacaucuccggcuacaacuucagccugggggccgccgucaaggccggcgccugcaugcucgacgggggcaacaugcuggagacgaucaaggugacgccccagaccauggacggcauccugaaguccauccucaaggugaagaagucccuggggauguucgucagcgacacccccggcgagcggaaccccuacgagaacauccuguacaagaucugccucagcggggacggcuggccguacaucgcgucccgcaccagcaucguggggcgggccugggagaacaccaucguggaccuggaguccgacggcaagccccagaaggucggcaccgccgggagcaacaagucccugcagagcgccggcuuccccaccgggcucacguacucccagcugaugacccugaaggacagcaugaugcagcuggaccccuccgccaagaccuggaucgacaucgagggccgcccggaggaccccguggagaucgcgcucuaccagcccaugagcgggugcuacauccacuucuuccgggagcccaccgaccugaagcaguucaagcaggacgccaaguacucccacggcaucgacgucgccgaccuguucccggcccagcccggccucacgagcgccgugaucgaggcgcugccccgcaacauggugcugaccugccaggggagcgacgacaucaagcggcuccuggacucccagggccgccgcgacaucaagcugaucgacaucgcccucagcaaggccgacucccggcgcuucgagaacgccgucugggaccagugcaaggaccugugccacaugcacaccggggugguggucgagaagaagaagcggggcgggaaggaggagaucacgccccacugcgcccugauggacugcaucauguacgacgcggccgugagcggcggccucaacaucccggugcugcgcgccguccugccccgggacaugguguuccgcaccuccagccccaaggugguccucugaggacuagucccuguucccagagcccacuuuuuuuucuuuuuuugaaauaaaauagccugucuuucagaucucaaaggcucuuuucagagccaccaaaaaaaaaaaaaaaaaaaaaaaaaaaaaaaaaaaaaaaaaaaaaaaaaaaaaaaaaaaaaaaaagaauu

SEQ ID NO: 21152 - RNA, 2021 nt, Artificial Sequence
  mRNA product Design a-2 (hSL-A64-N5) comprising derived and/or modified sequence from LASV(Nig08-04;Clade II)__ADU56611__SP-IgE_NP(2-569) (opt1)
aggagaguccgcucagccagguugcagaagcggcuuagcguguguccuaaucuucucucugcguguagguaggccugugccgcaaacaagcuuaccauggacuggaccuggauccuguuccucguggccgccgcgacccgcguccacagcagcgccuccaaggaggugaaguccuuccuguggacccagagccuccgccgggagcugagcggcuacugcuccaacaucaagcugcaggucgugaaggacgcccaggcgcuccugcacgggcuggacuucagcgagguguccaacguccagcgccucaugcggaagcagaagcgcgacgacggcgaccugaagcggcugcgcgaccucaaccaggccgugaacaaccugguggagcucaagagcacccagcagaaguccguccugcggguggggacccugaccagcgacgaccugcucacccuggccgccgaccuggagaagcucaaguccaaggugauccgcaccgagcggccccugagcuccggcgucuacauggggaaccugagcacgcagcagcucgagcagcgcaaggcccugcuguccaugaucggcauggugggcggggcgcagggcacccagccggggcgggacggcgugguccgcgugugggacgugaagaaccccgaccuccugaacaaccaguucgggaccaugcccagccugacccucgccugccugacgaagcagggccaggucgaccugaacgacgccgugcucgcccugaccgaccugggccucaucuacaccgcgaaguaccccaacuccagcgaccuggaccggcugucccagagccacccgauccucaacaugguggacaccaagaaguccagccugaacaucagcggguacaacuucucccugggcgccgccgucaaggccggggccugcaugcucgacggcggcaacaugcuggagacgaucaaggugacgccccagaccauggacgggauccucaagagcauccugaaggugaagcgcucccugggcauguucgucagcgacacccccggggagcggaaccccuacgagaacauccuguacaagaucugccucuccggcgacggguggccguacaucgcgagccgcaccuccaucgugggccgggccugggagaacaccaccguggaccuggagagcgacggcaagccccagaaggucgggaccgccggcuccaacaagagccugcaguccgccggguuccccacgggccucaccuacagccagcugaugacccugaaggacuccaugaugcagcuggaccccagcgccaagaccuggaucgacaucgaggggcgcccggaggaccccguggagaucgcgcucuaccagcccauguccggcugcuacauccacuucuuccgggagcccacggaccugaagcaguucaagcaggacgccaaguacagccacggcaucgacgucaccgaccuguucuccgcccagccggggcucaccagcgccgugaucgaggcccugccccgcaacauggugcugaccugccagggcagcgacgacaucaagaagcuccuggacucccaggggcggcgcgacaucaagcugaucgacaucagccucaacaaggcggacucccgccgguucgagaacgccgucugggaccagugcaaggaccugugccacaugcacacgggcgugguggucgagaagaagaagcgcgggggcaaggaggagaucacgccccacugcgcccugauggacugcaucauguucgacgccgccgugagcggcgggcucaacauccccauccugcgggcggugcugccgcgcgacauggucuuccggaccuccagccccaagguggugcucugaggacuagucccuguucccagagcccacuuuuuuuucuuuuuuugaaauaaaauagccugucuuucagaucucaaaggcucuuuucagagccaccaaaaaaaaaaaaaaaaaaaaaaaaaaaaaaaaaaaaaaaaaaaaaaaaaaaaaaaaaaaaaaaaagaauu

SEQ ID NO: 21153 - RNA, 2024 nt, Artificial Sequence
  mRNA product Design a-2 (hSL-A64-N5) comprising derived and/or modified sequence from LASV(GA391;Clade III)__AAA46284__SP-IgE_NP(2-570) (opt1)
aggagaguccgcucagccagguugcagaagcggcuuagcguguguccuaaucuucucucugcguguagguaggccugugccgcaaacaagcuuaccauggacuggaccuggauccuguuccucguggccgccgcgacccgcguccacagcagcgccuccaaggaggugcgcagcugccuguggacccagucccuccggcgcgagcugagcggcuacugcuccaacaucaagcugcaggucgugaaggacgcccaggcgcuccugcacgggcuggacuucagcgagguguccaacguccagcggcucaugcgcaagcagaagcgggacgacggcgaccugaagcgccugcgggaccucaaccaggccgugaacaaccugguggagcugaaguccacccagcagaaguccguccuccgcguggggacgcugagcuccgacgaccugcucauccuggccgccgaccuggagaagcucaagagcaaggugacccggaccgagcgcccccuguccagcggcgucuacauggggaaccuguccagccagcagcucgaccagcggcgcgcccugcugaacaugaucggcaugaccggcguguccgggggcgggaagggcgcgagcaacgggaucgugcgggucugggacgugaagaacgccgagcuccugaacaaccaguucggcacgaugccgucccugacccucgccugccugaccaagcagggccagguggaccugaacgacgccguccaggcgcucaccgaccuggggcugaucuacacggccaaguaccccaacagcagcgaccucgaccgccugucccagagccaccccauccugaacaugaucgacaccaagaaguccagccucaacaucuccggcuacaacuucagccugggggccgccgugaaggccggcgcgugcaugcuggacggcgggaacaugcucgagaccaucaaggugagcccccagaccauggacggcauccucaagagcauccugaaggucaagaagucccuggggauguucgugagcgacacgccgggcgagcggaaccccuacgagaacauccuguacaagaucugccuguccggggacggcuggagcuacaucgccucccgcaccagcaucgugggccgggccugggagaacaccgucguggaccucgagcaggacaacaagccccagaagaucgggaacggcggguccaacaagagccugcaguccgccggcuucgccgcggggcugaucuacagccagcucaugacccugaaggacuucaagugcuucaaccugauccccaacgccaagacguggauggacaucgagggccgcccggaggaccccguggagaucgcccuguaccagcccuccagcggcugcuacguccacuucuuccgggagcccaccgaccucaagcaguucaagcaggacgccaaguacagccacgggcgcgacgugaccgaccuguucgccgcgcagccgggccugaccuccgccgucaucgaggcccucccccggaacauggugaucacgugccaggggagcgaggacauccgcaagcugcuggagucccagggccgccgggacaucaagcucaucgacaucacccugagcaaggccgacucccgcaaguucgagaacgccgugugggaccaguucaaggaccugugccacaugcacaccggggucgugguggagaagaagaagcggggcggcaaggaggagaucacgccccacugcgcgcucauggacugcaucauguucgacgccgccgucagcgggggccuggacgccaaggugcugcgcgugguccucccccgggacaugguguuccgcaccuccaccccgaaggugguccugugaggacuagucccuguucccagagcccacuuuuuuuucuuuuuuugaaauaaaauagccugucuuucagaucucaaaggcucuuuucagagccaccaaaaaaaaaaaaaaaaaaaaaaaaaaaaaaaaaaaaaaaaaaaaaaaaaaaaaaaaaaaaaaaaagaauu

SEQ ID NO: 21154 - RNA, 2021 nt, Artificial Sequence
  mRNA product Design a-2 (hSL-A64-N5) comprising derived and/or modified sequence from LASV(Nig08-A19;Clade III)__ADU56619__SP-IgE_NP(2-569) (opt1)
aggagaguccgcucagccagguugcagaagcggcuuagcguguguccuaaucuucucucugcguguagguaggccugugccgcaaacaagcuuaccauggacuggaccuggauccuguuccucguggccgccgcgacccgcguccacagcagcgccuccaaggaggugaaguccuuccuguggacccagucccuccgccgggagcugagcggcuacugcuccaacaucaagcugcaggucgugaaggacgcccaggcgcuccugcacgggcuggacuucagcgagguguccaacguccagcgccucaugcggaagcagaagcgcgacgacggcgaccugaagcggcugcgcgaccucaaccaggccgugaacaaccugguggagcucaagagcacccagcagaaguccguccugcggguggggacccugagcuccgacgaccugcucgugcuggccgccgaccuggagaagcucaagagcaaggucgugcgcaccgagcggccccuguccagcggcaucuacauggggaaccuguccagccagcagcucgaccagcgcaaggcccugcugaacaugaucggcaugaccggcgggaacggcgggcggaacaccacguccgacggcaucgugcgcgucugggacgugaagaacgcggagcuccugaacaaccaguucgggaccaugccgagccugacccucgccugccugaccaagcagggccagguggaccugaacgacgccguccaggcccucacggaccugggccugaucuacaccgcgaaguaccccaacuccagcgaccucgaccggcuggcccagagccaccccauccugaacaugaucgacaccaagaaguccagccucaacaucuccggguacaacuucagccugggcgccgccgugaaggccggggcgugcaugcuggacggcggcaacaugcucgagaccaucaaggugagcccccagacgauggacgggauccucaagagcauccugaaggucaagcgcucccugggcauguucaucagcgacaccccgggggagcggaaccccuacgagaacauccuguacaagaucugccuguccggcgacggguggcccuacaucgccagccgcaccuccaucgugggccgggccugggagaacaccguggucgaccucgagagcgacaacaagccccagaagacgggcaacgggggcuccaacaagagccugcaguccgccggguucgccgcgggccugaccuacagccagcucaugacccugaaggacuccaugcugcagcuggacccgaacgccaagaccuggauggacaucgaggggcgccccgaggaccccguggagaucgcccucuaccagcccagcuccggcugcuacauccacuucuuccgggagccgacggaccugaagcaguucaagcaggacgccaaguacagccacggcaucgacgugaccgaccuguucgccgcgcagcccgggcucaccagcgccgucaucgaggcccugccccgcaacauggugaucacgugccagggcuccgaggacauccggaagcugcucgagagccaggggcgccgcgacaucaagcugaucgacaucucccugagcaaggucgacucccggaaguucgagaacgccgugugggaccaguucaaggaccucugccacaugcacaccggcaucguggucgagaagaagaagcgcgggggcaaggaggagaucacgccccacugcgcccugauggacugcaucauguucgacgcggccgugagcggcgggguggacgccaagguccugcgggccgugcucccgcgcgacaugguguuccggaccuccacccccaaggucgugcugugaggacuagucccuguucccagagcccacuuuuuuuucuuuuuuugaaauaaaauagccugucuuucagaucucaaaggcucuuuucagagccaccaaaaaaaaaaaaaaaaaaaaaaaaaaaaaaaaaaaaaaaaaaaaaaaaaaaaaaaaaaaaaaaaagaauu

SEQ ID NO: 21155 - RNA, 2021 nt, Artificial Sequence
  mRNA product Design a-2 (hSL-A64-N5) comprising derived and/or modified sequence from LASV(G1180-SLE-2010;Clade IV)__AIT17169__SP-IgE_NP(2-569) (opt1)
aggagaguccgcucagccagguugcagaagcggcuuagcguguguccuaaucuucucucugcguguagguaggccugugccgcaaacaagcuuaccauggacuggaccuggauccuguuccucguggccgccgcgacccgcguccacagcagcgccuccaaggagaucaagagcuuccuguggacccagucccuccgccgggagcugagcggcuacugcuccaacaucaagcuccagguggucaaggacgcccaggcgcugcugcacgggcuggacuucagcgagguguccaacgugcagcgccucaugcggaaggagcgccgggacgacaacgaccugaagcgccugcgggaccucaaccaggccgucaacaaccugguggagcucaagagcacccagcagaaguccauccugcgcgugggcacccugaccagcgacgaccugcucauccuggccgccgaccuggagaagcucaaguccaaggucauccggaccgagcgcccccugagcgccgggguguacaugggcaaccuguccagccagcagcucgaccagcggcgcgcgcugcuguccaugaucgggaugagcuccggcaaccagcgggcccaggccggccgcgacggggugguccgggugugggacgugaagaacgucgagcuccugaacaaccaguucggcaccaugccgagccugacgcucgccugccugaccaagcagggccagguggaccugaacgacgcggugcaggcccucaccgaccuggggcugaucuacaccgccaaguaccccaacacguccgaccucgaccgccugacccagagccaccccauccugaacaugaucgacaccaagaaguccagccucaacaucagcggguacaacuucucccugggcgccgccgucaaggcgggcgccugcaugcuggacgggggcaacaugcucgagaccaucaaggugagcccccagacgauggacgggauccugaaguccauccugaaggugaagaaggcccucggcauguucaucagcgacaccccgggcgagcggaaccccuacgagaacauccuguacaagaucugccuguccggggacggcuggcccuacaucgccagccgcaccuccaucaccgggcgggccugggagaacacggucguggaccucgagagcgacggcaagccccagaaggcgggguccaacaacagcaacaagucccugcagagcgugggcuucaccgccggccugaccuacucccagcucaugacccugaaggacgccaugcugcagcuggacccgaacgccaagacguggauggacaucgaggggcgccccgaggaccccgucgagaucgcccucuaccagcccagcuccggcugcuacauccacuucuuccgggagccgaccgaccugaagcaguucaagcaggacgcgaaguacagccacgggaucgacgugaccgaccuguucgccgcccagcccggccucaccuccgccgugaucgacgcccugccccgcaacauggucaucacgugccaggggagcgacgacauccgcaagcugcucgagagccagggccggaaggacaucaagcugaucgacaucgcgcuguccaagaccgacagccgcaaguacgagaacgccgugugggaccaguacaaggaccucugccacaugcacaccggcgucgugguggagaagaagaagcgcgggggcaaggaggagaucacgccccacugcgcccugauggacugcaucauguucgacgccgcggucuccgggggccugaacaccagcgugcuccgggccgugcugccgcgggacauggucuuccgcaccuccacgccccggguggugcugugaggacuagucccuguucccagagcccacuuuuuuuucuuuuuuugaaauaaaauagccugucuuucagaucucaaaggcucuuuucagagccaccaaaaaaaaaaaaaaaaaaaaaaaaaaaaaaaaaaaaaaaaaaaaaaaaaaaaaaaaaaaaaaaaagaauu

SEQ ID NO: 21156 - RNA, 2021 nt, Artificial Sequence
  mRNA product Design a-2 (hSL-A64-N5) comprising derived and/or modified sequence from LASV(G1442-SLE-2011;Clade IV)__AIT17181__SP-IgE_NP(2-569) (opt1)
aggagaguccgcucagccagguugcagaagcggcuuagcguguguccuaaucuucucucugcguguagguaggccugugccgcaaacaagcuuaccauggacuggaccuggauccuguuccucguggccgccgcgacccgcguccacagcagcgccuccaaggaggugaaguccuuccuguggacccagagccuccgccgggagcugagcggcuacugcuccaacaucaagcugcaggucgugaaggacgcccaggcgcuccugcacgggcuggacuucagcgagguguccaacguccagcgccucaugcggaagcagcgccgggacgacaacgaccugaagcgccugcgggaccucaaccaggccgugaacaaccugguggagcucaagagcacccagcagaaguccguccugcgcgugggcacccugaccagcgacgaccugcucgugcuggccgccgaccuggagaagcucaaguccaaggucauccggaccgagcgcccccugagcgccgggguguacaugggcaaccuguccagccagcagcucgaccagcggcgcgcgcugcugaacaugaucgggauguccggcggcauccaggggacccggacgggccgcgacggggugguccgggugugggacgugaagaacgccgaccuccugaacaaccaguucggcaccaugccgagccugacccucgccugccugaccaagcaggggcaggucgaccugaacgacguggugcaggcccucacggaccugggccugaucuacaccgcgaaguaccccaacgccuccgaccucgaccgccugacccagagccaccccauccugaacaugaucgacaccaagaaguccagccucaacaucagcggcuacaacuucucccugggggccgccgucaaggccggcgcgugcaugcuggacgggggcaacaugcucgagacgaucaaggugagcccccagaccauggacggcauccugaaguccauccugaaggugaagaagacccucgggauguucaucagcgacaccccgggcgagcggaaccccuacgagaacauccuguacaagaucugccuguccggggacggcuggcccuacaucgccagccgcacguccaucaccgggcgggccugggagaacaccgucguggaccucgagagcgacggcaagccccagaaggccggcuccaacaacagcaacaagucccugcagagcgccggguucgcggccggccugaccuacucccagcucaugacgcugaaggacgccaugcugcagcuggacccgaacgccaagaccuggauggacaucgaggggcgccccgaggaccccguggagaucgcccucuaccagcccagcuccggcugcuacauccacuucuuccgggagccgaccgaccugaagcaguucaagcaggacgcgaaguacagccacgggaucgacgucaccgaccuguucgccgcccagcccggccucacguccgccgugaucgaggcccugccccgcaacauggucaucacgugccagggcagcgacgacaucaagaagcugcucgagucccaggggcgcaaggacaucaagcugaucgacaucgcgcugagcaagaccgacagccggaaguacgagaacgccgugugggaccaguacaaggaccucugccacaugcacaccggcguggucguggagaagaagaagcgcgggggcaaggaggagaucaccccgcacugcgcccugauggacugcaucauguucgacgccgcgguguccgggggccugaacacccucguccugcgggccgugcugccccgcgacaugguguuccggaccagcacgccccgcgucgugcucugaggacuagucccuguucccagagcccacuuuuuuuucuuuuuuugaaauaaaauagccugucuuucagaucucaaaggcucuuuucagagccaccaaaaaaaaaaaaaaaaaaaaaaaaaaaaaaaaaaaaaaaaaaaaaaaaaaaaaaaaaaaaaaaaagaauu

SEQ ID NO: 21157 - RNA, 2021 nt, Artificial Sequence
  mRNA product Design a-2 (hSL-A64-N5) comprising derived and/or modified sequence from LASV(G3010-SLE-2013;Clade IV)__AIT17345__SP-IgE_NP(2-569) (opt1)
aggagaguccgcucagccagguugcagaagcggcuuagcguguguccuaaucuucucucugcguguagguaggccugugccgcaaacaagcuuaccauggacuggaccuggauccuguuccucguggccgccgcgacccgcguccacagcagcgccuccaaggagaucaagagcuuccuguggacccagucccuccgccgggagcugagcggcuacugcuccaacaucaagcuccagguggucaaggacgcccaggcgcugcugcacgggcuggacuucagcgagguguccaacgugcagcgccucaugcggaaggagcgccgggacgacaacgaccugaagcgccugcgggaccucaaccaggccgucaacaaccugguggagcucaagagcacccagcagaaguccauccugcgcgugggcacccugaccagcgacgaccugcucauccuggccgccgaccuggagaagcucaaguccaaggucacccggaccgagcgcccccugagcgccgggguguacaugggcaaccuguccagccagcagcucgaccagcggcgcgcgcugcuguccaugaucgggaugagcuccggcgugcagggcgcccgggccgggcgcgacggcgucgugcgggugugggacgucaagaacgccgagcuccugaacaaccaguucgggacgaugccgagccugacccucgcgugccugaccaagcagggccagguggaccugaacgacgugguccaggcccucaccgaccuggggcugaucuacacggccaaguaccccaacaccuccgaccucgaccgccugacccagagccaccccauccugaacaugaucgacaccaagaaguccagccucaacaucagcggcuacaacuucucccugggcgccgccgugaaggcgggggccugcaugcuggacggcgggaacaugcucgagacgaucaaggugagcccccagaccauggacggcauccugaaguccauccugaaggucaagaaggcccucggcauguucaucagcgagaccccgggggagcggaaccccuacgagaacauccuguacaagaucugccuguccggcgacggguggcccuacaucgccagccgcaccuccaucacgggccgggccugggagaacaccgugguggaccucgagagcgacgggaagccccagaaggcgggcuccaacaacagcaacaagucccugcagagcgccggcuucaccgccgggcugaccuacucccagcucaugacgcugaaggacgccaugcugcagcuggacccgaacgccaagaccuggauggacaucgagggccgccccgaggaccccgucgagguggcgcucuaccagcccagcuccgggugcuacauccacuucuuccgggagccgaccgaccugaagcaguucaagcaggacgccaaguacagccacggcaucgacgugaccgaccuguucgccgcccagcccgggcucacguccgccgucaucgacgcgcugccccgcaacauggugaucacgugccagggcagcgacgacaucaagaagcugcucgagagccagggccgcaaggacaucaagcugaucgacaucgcccuguccaagaccgacagccggaaguacgagaacgccgucugggaccaguacaaggaccucugccacaugcacaccggggugguggucgagaagaagaagcgcggcgggaaggaggagaucaccccgcacugcgcccugauggacugcaucauguucgacgcggccguguccggcgggcugaacaccagcgugcuccgggccguccugccccgcgacaugguguuccggaccuccacgccccgcgugguccugugaggacuagucccuguucccagagcccacuuuuuuuucuuuuuuugaaauaaaauagccugucuuucagaucucaaaggcucuuuucagagccaccaaaaaaaaaaaaaaaaaaaaaaaaaaaaaaaaaaaaaaaaaaaaaaaaaaaaaaaaaaaaaaaaagaauu

SEQ ID NO: 21158 - RNA, 2021 nt, Artificial Sequence
  mRNA product Design a-2 (hSL-A64-N5) comprising derived and/or modified sequence from LASV(G502-SLE-2009;Clade IV)__AIT17127__SP-IgE_NP(2-569) (opt1)
aggagaguccgcucagccagguugcagaagcggcuuagcguguguccuaaucuucucucugcguguagguaggccugugccgcaaacaagcuuaccauggacuggaccuggauccuguuccucguggccgccgcgacccgcguccacagcagcgccuccaaggagaucaagagcuuccuguggacccagucccuccgccgggagcugagcggcuacugcuccaacaucaagcuccagguggucaaggacgcccaggcgcugcugcacgggcuggacuucagcgagguguccaacgugcagcgccucaugcggaaggagcgccgggacgacaacgaccugaagcgccugcgggaccucaaccaggccgucaacaaccugguggagcucaagagcacccagcagaaguccauccugcgcgugggcacccugaccagcgacgaccugcucauccuggccgccgaccuggagaagcucaaguccaaggucauccggaccgagcgcccccugagcgccgggguguacaugggcaaccuguccagccagcagcucgaccagcggcgcgcgcugcuguccaugaucgggaugagcggcggcaaccagggggugcgggccggcaaggacggggucgugcgcgugugggacgucaagaacgccgagcuccugaacaaccaguucggcaccaugccgucccugacgcucgccugccugaccaagcagggccagguggaccugaacgacgcggugcaggcccucaccgaccuggggcugaucuacaccgccaaguaccccaacacgagcgaccucgaccggcugacccagucccaccccauccugaacaugaucgacaccaagaaguccagccucaacaucuccggcuacaacuucagccugggggccgccgucaaggcgggcgccugcaugcuggacgggggcaacaugcucgagaccaucaaggugagcccccagacgauggacggcauccucaagagcauccugaaggugaagaaggcccuggggauguucaucuccgacaccccgggcgagcgcaaccccuacgagaacauccuguacaagaucugccugagcggggacggcuggcccuacaucgccucccggaccagcaucaccgggcgcgccugggagaacacggucguggaccucgaguccgacggcaagccccagaaggcgggcagcaacaacuccaacaagagccugcaguccgccggguucaccgccggccugaccuacagccagcucaugacccugaaggacgccaugcugcagcuggacccgaacacgaagaccuggauggacaucgaggggcggcccgaggaccccguggagaucgcccucuaccagcccuccagcggcugcuacauccacuucuuccgcgagccgaccgaccugaagcaguucaagcaggacgcgaaguacucccacgggaucgacgucaccgaccuguucgccgcccagcccggccucacgagcgccgugaucgacgcccugccccggaacauggugaucacgugccagggcuccgacgacauccgcaagcugcucgagagccaggggcgcaaggacaucaagcugaucgacaucgcgcugaacaagaccgacagccggaaguacgagaacgccgucugggaccaguacaaggaccucugccacaugcacaccggcguggucguggagaagaagaagcgcgggggcaaggaggagaucaccccgcacugcgcccugauggacugcaucauguucgacgccgcgguguccgggggccugaacaccagcguccuccgggccgugcugccccgcgacaugguguuccggaccuccacgccccgcgucgugcugugaggacuagucccuguucccagagcccacuuuuuuuucuuuuuuugaaauaaaauagccugucuuucagaucucaaaggcucuuuucagagccaccaaaaaaaaaaaaaaaaaaaaaaaaaaaaaaaaaaaaaaaaaaaaaaaaaaaaaaaaaaaaaaaaagaauu

SEQ ID NO: 21159 - RNA, 2021 nt, Artificial Sequence
  mRNA product Design a-2 (hSL-A64-N5) comprising derived and/or modified sequence from LASV(G733-SLE-2010;Clade IV)__AIT17155__SP-IgE_NP(2-569) (opt1)
aggagaguccgcucagccagguugcagaagcggcuuagcguguguccuaaucuucucucugcguguagguaggccugugccgcaaacaagcuuaccauggacuggaccuggauccuguuccucguggccgccgcgacccgcguccacagcagcgccuccaaggagaucaagagcuuccuguggacccagucccuccgccgggagcugagcggcuacugcuccaacaucaagcuccagguggucaaggacgcccaggcgcugcugcacgggcuggacuucagcgagguguccaacgugcagcgccucaugcggaaggagcgccgggacgacaacgaccugaagcgccugcgggaccucaaccaggccgucaacaaccugguggagcucaagagcacccagcagaaguccgugcugcgcgucggcacccugaccagcgacgagcugcucgugcuggccgccgaccuggagaagcucaaguccaaggugauccggaccgagcgcccccugagcgccggggucuacaugggcaaccuguccagccagcagcucgaccagcggcgcgcgcugcuguccaugaucgggaugagcggcggcaaccagggggcccggaccggccgcgacgggguggugcgggucugggacgugaagaacgccgagcuccugaacaaccaguucggcaccaugccgucccugacccucgccugccugaccaagcagggccagguggaccugaacgacgcgguccaggcccucaccgaccuggggcugaucuacacggccaaguaccccaacaccagcgaccucgaccgccugacccagucccaccccauccugaacaugaucgacaccaagaaguccagccucaacaucuccggcuacaacuucagccugggggccgccgugaaggcgggcgccugcaugcuggacgggggcaacaugcucgagacgaucaaggugagcccccagaccauggacggcauccucaagagcauccugaaggucaagaaggcccuggggauguucaucuccgacaccccgggcgagcggaaccccuacgagaacauccuguacaagaucugccugagcggggacggcuggcccuacaucgccucccgcaccagcaucacggggcgggccugggagaacaccgugguggaccucgaguccgacggcaagccccagaaggcgggcagcaacaacuccaacaagagccugcaguccgccggguucaccgccggccugaccuacagccagcucaugacgcugaaggacgccaugcugcagcuggacccgaacgccaagaccuggauggacaucgaggggcgccccgaggaccccgucgagaucgcgcucuaccagcccuccagcggcugcuacauccacuucuuccgggagccgaccgaccugaagcaguucaagcaggacgccaaguacucccacgggaucgacgugaccgaccuguucgccgcccagcccggccucacgagcgccgugaucgacgcgcugccccgcaacauggucaucacgugccagggcuccgacgacauccgcaagcugcucgagagccaggggcggaaggacaucaagcugaucgacaucgcccugagcaagaucgacucccgcaaguacgagaacgccgugugggaccaguacaaggaccucugccacaugcacaccggcgucgugguggagaagaagaagcgcgggggcaaggaggagaucacgccccacugcgcccugauggacugcaucauguucgacgcggccgucagcgggggccugaacucccucgugcugcgggccgugcugccgcgggacauggucuuccgcaccagcacgccccggguggugcucugaggacuagucccuguucccagagcccacuuuuuuuucuuuuuuugaaauaaaauagccugucuuucagaucucaaaggcucuuuucagagccaccaaaaaaaaaaaaaaaaaaaaaaaaaaaaaaaaaaaaaaaaaaaaaaaaaaaaaaaaaaaaaaaaagaauu

SEQ ID NO: 21160 - RNA, 2021 nt, Artificial Sequence
  mRNA product Design a-2 (hSL-A64-N5) comprising derived and/or modified sequence from MOPV/LASV reassortant(IGS-1;Clade IV)__AFY05578__SP-IgE_NP(2-569) (opt1)
aggagaguccgcucagccagguugcagaagcggcuuagcguguguccuaaucuucucucugcguguagguaggccugugccgcaaacaagcuuaccauggacuggaccuggauccuguuccucguggccgccgcgacccgcguccacagcagcgccuccaaggagaucaagagcuuccuguggacccagucccuccgccgggagcugagcggcuacugcuccaacaucaagcuccagguggucaaggacgcccaggcgcugcugcacgggcuggacuucagcgagguguccaacgugcagcgccucaugcggaaggagcgccgggacgacaacgaccugaagcgccugcgggaccucaaccaggccgucaacaaccugguggagcucaagagcacccagcagaaguccauccugcgcgugggcacccugaccagcgacgaccugcucauccuggccgccgaccuggagaagcuccgguccaaggucauccgcaccgagcggccccugagcgccgggguguacaugggcaaccuguccagccagcagcucgaccagcgccgggcgcugcugaacaugaucgggauguccggcggcaaccagggggcccgcgccggccgggacggggugguccgcgugugggacgugaagaacgccgagcuccugagcaaccaguucggcaccaugccgucccugacgcucgcgugccugaccaagcaggggcaggucgaccugaacgacgccgugcaggcccucaccgaccugggccugaucuacaccgccaaguaccccaacacgagcgaccucgaccggcugacccagucccaccccauccugaacaugaucgacaccaagaaguccagccucaacaucuccggcuacaacuucagccugggggccgcggugaaggccggcgccugcaugcuggacgggggcaacaugcucgagaccaucaaggucagcccccagacgauggacggcauccucaagagcauccugaaggugaagaaggcccuggggauguucaucuccgacaccccgggcgagcgcaaccccuacgagaacauccuguacaagaucugccugagcggggacggcuggcccuacaucgccucccggaccagcaucaccgggcgcgcgugggagaacacgguggucgaccucgaguccgacggcaagccccagaaggccgacagcaacaacuccagcaagucccugcagagcgccggcuucaccgccgggcugaccuacucccagcucaugacccugaaggacgccaugcugcagcuggacccgaacgcgaagacguggauggacaucgagggccggcccgaggaccccguggagaucgcccucuaccagcccagcuccgggugcuacauccacuucuuccgcgagccgaccgaccugaagcaguucaagcaggacgccaaguacagccacggcaucgacgugaccgaccuguucgccacccagcccgggcucacguccgccgucaucgacgcgcugccccgcaacauggugaucacgugccagggcagcgacgacauccggaagcugcucgagagccagggccgcaaggacaucaagcugaucgacaucgaccuguccaagaccgacagccggaaguacgagaacgccgugugggaccaguacaaggaccucugccacaugcacaccggggucguggucgagaagaagaagcgcggcgggaaggaggagaucaccccgcacugcgcccugauggacugcaucauguucgacgccgcgguguccggcgggcugaacaccagcgugcuccgggccguccugccccgcgacaugguguuccggaccuccacgccccgcgugguccugugaggacuagucccuguucccagagcccacuuuuuuuucuuuuuuugaaauaaaauagccugucuuucagaucucaaaggcucuuuucagagccaccaaaaaaaaaaaaaaaaaaaaaaaaaaaaaaaaaaaaaaaaaaaaaaaaaaaaaaaaaaaaaaaaagaauu

SEQ ID NO: 21161 - RNA, 2021 nt, Artificial Sequence
  mRNA product Design a-2 (hSL-A64-N5) comprising derived and/or modified sequence from LASV(LM765-SLE-2012;Clade IV)__AIT17815__SP-IgE_NP(2-569) (opt1)
aggagaguccgcucagccagguugcagaagcggcuuagcguguguccuaaucuucucucugcguguagguaggccugugccgcaaacaagcuuaccauggacuggaccuggauccuguuccucguggccgccgcgacccgcguccacagcagcgccuccaaggagaucaagagcuuccuguggacccagucccuccgccgggagcugagcggcuacugcuccaacaucaagcuccagguggucaaggacgcccaggcgcugcugcacgggcuggacuucagcgagguguccaacgugcagcgccucaugcggaaggagcgccgggacgacaacgaccugaagcgccugcgggaccucaaccaggccgucaacaaccugguggagcucaagagcacccagcagaaguccauccugcgcgugggcacccugaccagcgacgaccugcucauccuggccgccgaccuggagaagcucaaguccaaggucacccggaccgagcgcccccugagcgccgggguguacaugggcaaccuguccagccagcagcucgaccagcggcgcgcgcugcuggacaugaucgggauguccggcagcaaccagggcgcccgggccgggcgcgacggcgugguccgggugugggacgugaagaacgccgagcuccugaacaaccaguucgggacgaugccgucccugacccucgcgugccugaccaagcagggccaggucgaccugaacgacgccgugcaggcccucaccgaccuggggcugaucuacacggccaaguaccccaacaccagcgaccucgaccgccugacccagucccaccccauccugaacaugaucgacaccaagaaguccagccucaacaucuccggcuacaacuucagccugggcgccgcggugaaggccggggccugcaugcuggacggcgggaacaugcucgagacgaucaaggucagcccccagaccauggacggcauccucaagagcauccugaaggugaagaaggcccugggcauguucaucuccgacgccccgggggagcggaaccccuacgagaacauccuguacaagaucugccugagcggcgacggguggcccuacaucgcgucccgcaccagcaucaccggccgggccugggagaacacgguggucgaccucgaguccgacgggaagccccagaaggccggcagcaacggcuccaacaagagccugcaguccgccggguucaccgccggccugaccuacagccagcucaugacccugaaggacgcgaugcugcagcuggacccgaacgccaagacguggauggacaucgaggggcgccccgaggaccccguggagaucgcccucuaccagcccuccagcggcugcuacauccacuucuuccgggagccgaccgaccugaagcaguucaagcaggacgccaaguacucccacgggaucgacgugaccgaccuguucgccgcgcagcccggccucaccagcgccgucaucgacgcccugccccgcaacauggugaucacgugccagggcuccgacgacauccgcaagcuguucgagagccaggggcggaaggacaucaagcucaucgacaucgcccugagcaagaccgacucccgcaaguacgagaacgcggugugggaccaguacaaggaccugugccacaugcacaccggcaucgucguggagaagaagaagcgcgggggcaaggaggagaucacgccccacugcgcccucauggacugcaucauguucgacgccgccgucagcgggggccugaacaccuccgugcugcgggccgugcucccgcgggacauggucuuccgcaccagcacgccccggguggugcugugaggacuagucccuguucccagagcccacuuuuuuuucuuuuuuugaaauaaaauagccugucuuucagaucucaaaggcucuuuucagagccaccaaaaaaaaaaaaaaaaaaaaaaaaaaaaaaaaaaaaaaaaaaaaaaaaaaaaaaaaaaaaaaaaagaauu

SEQ ID NO: 21162 - RNA, 2021 nt, Artificial Sequence
  mRNA product Design a-2 (hSL-A64-N5) comprising derived and/or modified sequence from LASV(LM776-SLE-2012;Clade IV)__AIT17825__SP-IgE_NP(2-569) (opt1)
aggagaguccgcucagccagguugcagaagcggcuuagcguguguccuaaucuucucucugcguguagguaggccugugccgcaaacaagcuuaccauggacuggaccuggauccuguuccucguggccgccgcgacccgcguccacagcagcgccuccaaggagaucaagagcuuccuguggacccagucccuccgccgggagcugagcuccuacugcagcaacaucaagcuccagguggucaaggacgcccaggcgcugcugcacggccuggacuucuccgaggugagcaacgugcagcgccucaugcggaaggagcgccgggacgacaacgaccugaagcgccugcgggaccucaaccaggccgucaacaaccugguggagcugaaguccacccagcagaaguccauccuccgcguggggacccugaccuccgacgaccugcucauccuggccgccgaccuggagaagcucaagagcaaggucacccggaccgagcgcccccuguccgccggcguguacauggggaaccugagcucccagcagcucgaccagcggcgcgcgcugcugagcaugaucggcauguccgggagcaaccagggcgcccgggccggccgcgacggggugguccgggugugggacgugaagaacgccgagcuccugaacaaccaguucggcacgaugccgucccugacccucgcgugccugaccaagcaggggcaggucgaccugaacgacgccgugcaggcccucaccgaccugggccugaucuacacggccaaguaccccaacaccagcgaccucgaccgccugacccagagccaccccauccugaacaugaucgacaccaagaaguccagccucaacaucuccggguacaacuucagccugggcgccgcggugaaggccggcgccugcaugcuggacgggggcaacaugcucgagacgaucaaggucagcccccagaccauggacgggauccucaagagcauccugaaggugaagaaggcccugggcauguucaucuccgacaccccgggcgagcggaaccccuacgagaacauccuguacaagaucugccugagcggggacggcuggcccuacaucgccucccgcaccagcaucacggggcgggcgugggagaacaccguggucgaccucgaguccgacggcaagccccagaaggccgggagcaacaacuccaacaagagccugcaguccgccggcuucaccgccggccugaccuacagccagcucaugacgcugaaggacgccaugcugcagcuggacccgaacgcgaagaccuggauggacaucgaggggcgccccgaggaccccguggagguggcccucuaccagcccuccagcggcugcuacauccacuucuuccgggagccgaccgaccugaagcaguucaagcaggacgccaaguacucccacgggaucgacgucaccgaccuguucgccgcccagcccggccucacgagcgcggugaucgacgcccugccccgcaacauggugaucacgugccaggggagcgacgacauccgcaagcugcucgagucccagggccggaaggacaucaagcugaucgacaucgcccugagcaagaccgacucccgcaaguacgagaacgccgucugggaccaguacaaggaccucugccacaugcacaccggcguggucguggagaagaagaagcgcgggggcaaggaggagaucaccccgcacugcgcgcugauggacugcaucauguucgacgccgccgugagcgggggccugaacaccuccguccuccgggccgugcugccccgggacaugguguuccgcaccagcacgccccgggucgugcugugaggacuagucccuguucccagagcccacuuuuuuuucuuuuuuugaaauaaaauagccugucuuucagaucucaaaggcucuuuucagagccaccaaaaaaaaaaaaaaaaaaaaaaaaaaaaaaaaaaaaaaaaaaaaaaaaaaaaaaaaaaaaaaaaagaauu

SEQ ID NO: 21163 - RNA, 2021 nt, Artificial Sequence
  mRNA product Design a-2 (hSL-A64-N5) comprising derived and/or modified sequence from LASV(Mad39;Clade IV)__ANH09723__SP-IgE_NP(2-569) (opt1)
aggagaguccgcucagccagguugcagaagcggcuuagcguguguccuaaucuucucucugcguguagguaggccugugccgcaaacaagcuuaccauggacuggaccuggauccuguuccucguggccgccgcgacccgcguccacagcagcgccuccaaggagaucaagagcuuccuguggacccagucccuccgccgggagcugagcggcuacugcuccaacaucaagcuccagguggucaaggacgcccaggcgcugcugcacgggcuggacuucagcgagguguccaacgugcagcgccucaugcggaagcagcgccgggacgacaacgaccugaagcgccugcgggaccucaaccaggccgucaacaaccugguggagcugaaguccacccagcagaaguccgugcuccgcgucggcacgcugaccagcgacgaccugcucacccuggccgccgaccuggagaagcucaaguccaaggugacccggacggagcgcccccugaccgccgggguguacaugggcaaccugagcucccagcagcucgaccagcggcgcgcgcugcugaacaugaucgggaugagcggcggcaaccagggggcccggaccggccgcgacggggucgugcgggugugggacgucaagaacgccgagcuccugaacaaccaguucggcaccaugccgucccugacgcucgccugccugaccaagcagggccagguggaccugaacgacgugguccaggcgcucaccgaccuggggcugaucuacaccgccaaguaccccaacacgagcgaccucgaccgccugacccagucccaccccauccugaacaugaucgacaccaacaagagcucccucaacaucagcggcuacaacuucagccugggggccgccgugaaggccggcgcgugcaugcuggacgggggcaacaugcucgagaccaucaaggugagcccccagacgauggacggcauccucaagagcauccugaaggucaagaagucccuggggauguucaucagcgacaccccgggcgagcggaaccccuacgagaacauccuguacaagaucugccuguccggggacggcuggcccuacaucgccagccgcaccuccaucaccgggcgggccugggagaacacggugguggaccucgagagcggcggcaagccccagaaggccggguccaacaacagcaacaagucccugcagagcgccggcuucgcggccgggcugaccuacucccagcucaugacccugaaggacgccaugcugcagcuggacccgaacgccaagaccuggauggacaucgagggccgccccgaggaccccgucgagaucgcccucuaccagcccaucagcgggugcuacauccacuucuuccgggagccgacggaccugaagcaguucaagcaggacgcgaaguacucccacggcaucgacgugaccgaccuguucgccgcccagcccggccucaccagcgccgugaucgaggcccugccccgcaacauggucaucacgugccagggguccgacgacauccgcaagcuguucgagagccagggccggaaggacaucaagcucaucgacaucgcgcuguccaagaccgacagccgcaaguacgagaacgccgugugggaccaguacaaggaccugugccacaugcacaccggggucgugguggagaagaagaagaagggcgggaaggaggagaucacgccccacugcgcccucauggacugcaucauguucgacgccgcggucagcggcggccugaacacccuggugcuccgggccgugcugccgcgcgacauggucuuccggaccuccacccccaagguggugcugugaggacuagucccuguucccagagcccacuuuuuuuucuuuuuuugaaauaaaauagccugucuuucagaucucaaaggcucuuuucagagccaccaaaaaaaaaaaaaaaaaaaaaaaaaaaaaaaaaaaaaaaaaaaaaaaaaaaaaaaaaaaaaaaaagaauu

SEQ ID NO: 21164 - RNA, 2021 nt, Artificial Sequence
  mRNA product Design a-2 (hSL-A64-N5) comprising derived and/or modified sequence from LASV(Z0947-SLE-2011;Clade IV)__AIT17841__SP-IgE_NP(2-569) (opt1)
aggagaguccgcucagccagguugcagaagcggcuuagcguguguccuaaucuucucucugcguguagguaggccugugccgcaaacaagcuuaccauggacuggaccuggauccuguuccucguggccgccgcgacccgcguccacagcagcgccuccaaggagaucaagagcuuccuguggacccagucccuccgccgggagcugagcggcuacugcuccaacaucaagcuccagguggucaaggacgcccaggcgcugcugcacgggcuggacuucagcgagguguccaacgugcagcgccucaugcggaaggagcgccgggacgacaacgaccugaagcgccugcgggaccucaaccaggccgucaacaaccugguggagcucaagagcacccagcagaaguccauccugcgcgugggcacccugaccagcgacgaccugcucauccuggccgccgaccuggagaagcucaaguccaaggucacccggaccgagcgcccccugagcgccgggguguacaugggcaaccuguccagccagcagcucgaccagcggcgcgcgcugcugaacaugaucgggauguccggcagcaaccagggcgcccggacggggcgcgacggcgugguccgggugugggacgugaagaacgccgagcuccugaacaaccaguucgggaccaugccgucccugacccucgccugccugaccaagcagggccaggucgaccugaacgacgcggugcaggcccucacggaccuggggcugaucuacaccgccaaguaccccaacaccagcgaccucgaccgccugacccagucccaccccauccugaacaugaucgacacgaagaaguccagccucaacaucuccggcuacaacuucagccugggcgccgccgugaaggcgggggccugcaugcuggacggcgggaacaugcucgagaccaucaaggucagcccccagaccauggacggcauccucaagagcauccugaaggugaagaaggcccugggcauguucaucuccgacgccccgggggagcggaaccccuacgagaacauccuguacaagaucugccugagcggcgacggguggcccuacaucgccucccgcaccagcaucacgggccgggcgugggagaacaccguggucgaccucgaguccgacgggaagccccagaaggccggcagcaacggcuccaacaagagccugcaguccgccggguucaccgccggccugaccuacagccagcucaugacgcugaaggacgccaugcugcagcuggacccgaacgcgaagaccuggauggacaucgaggggcgccccgaggaccccguggagaucgcccucuaccagcccuccagcggcugcuacauccacuucuuccgggagccgaccgaccugaagcaguucaagcaggacgccaaguacucccacgggaucgacgugaccgaccuguucgccgcccagcccggccucacgagcgcggucaucgacgcccugccccgcaacauggugaucacgugccagggcuccgacgacauccgcaagcuguucgagagccaggggcggaaggacaucaagcucaucgacaucgcccugagcaagaccgacucccgcaaguacgagaacgccgugugggaccaguacaaggaccugugccacaugcacaccggcaucgucguggagaagaagaagcgcgggggcaaggaggagaucaccccgcacugcgcgcucauggacugcaucauguucgacgccgccgucagcgggggccugaacaccuccgugcugcgggccgugcucccccgggacauggucuuccgcaccagcacgccccggguggugcugugaggacuagucccuguucccagagcccacuuuuuuuucuuuuuuugaaauaaaauagccugucuuucagaucucaaaggcucuuuucagagccaccaaaaaaaaaaaaaaaaaaaaaaaaaaaaaaaaaaaaaaaaaaaaaaaaaaaaaaaaaaaaaaaaagaauu

SEQ ID NO: 21165 - RNA, 2021 nt, Artificial Sequence
  mRNA product Design a-2 (hSL-A64-N5) comprising derived and/or modified sequence from LASV(Josiah;Clade IV)__NP_694869__SP-IgE_NP(2-569) (opt4)
aggagaguccgcucagccagguugcagaagcggcuuagcguguguccuaaucuucucucugcguguagguaggccugugccgcaaacaagcuuaccauggacuggaccuggauccuguuccugguggccgccgccaccagagugcacagcagcgccagcaaggagaucaagagcuuccuguggacccagagccugagaagagagcugagcggcuacugcagcaacaucaagcugcagguggugaaggacgcccaggcccugcugcacggccuggacuucagcgaggugagcaacgugcagagacugaugagaaaggagagaagagacgacaacgaccugaagagacugagagaccugaaccaggccgugaacaaccugguggagcugaagagcacccagcagaagagcauccugagagugggcacccugaccagcgacgaccugcugauccuggccgccgaccuggagaagcugaagagcaaggugaucagaaccgagagaccccugagcgccggcguguacaugggcaaccugagcagccagcagcuggaccagagaagagcccugcugaacaugaucggcaugagcggcggcaaccagggcgccagagccggcagagacggcguggugagagugugggacgugaagaacgccgagcugcugaacaaccaguucggcaccaugcccagccugacccuggccugccugaccaagcagggccagguggaccugaacgacgccgugcaggcccugaccgaccugggccugaucuacaccgccaaguaccccaacaccagcgaccuggacagacugacccagagccaccccauccugaacaugaucgacaccaagaagagcagccugaacaucagcggcuacaacuucagccugggcgccgccgugaaggccggcgccugcaugcuggacggcggcaacaugcuggagaccaucaaggugagcccccagaccauggacggcauccugaagagcauccugaaggugaagaaggcccugggcauguucaucagcgacacccccggcgagagaaaccccuacgagaacauccuguacaagaucugccugagcggcgacggcuggcccuacaucgccagcagaaccagcaucaccggcagagccugggagaacaccgugguggaccuggagagcgacggcaagccccagaaggccgacagcaacaacagcagcaagagccugcagagcgccggcuucaccgccggccugaccuacagccagcugaugacccugaaggacgccaugcugcagcuggaccccaacgccaagaccuggauggacaucgagggcagacccgaggaccccguggagaucgcccuguaccagcccagcagcggcugcuacauccacuucuucagagagcccaccgaccugaagcaguucaagcaggacgccaaguacagccacggcaucgacgugaccgaccuguucgccacccagcccggccugaccagcgccgugaucgacgcccugcccagaaacauggugaucaccugccagggcagcgacgacaucagaaagcugcuggagagccagggcagaaaggacaucaagcugaucgacaucgcccugagcaagaccgacagcagaaaguacgagaacgccgugugggaccaguacaaggaccugugccacaugcacaccggcguggugguggagaagaagaagagaggcggcaaggaggagaucaccccccacugcgcccugauggacugcaucauguucgacgccgccgugagcggcggccugaacaccagcgugcugagagccgugcugcccagagacaugguguucagaaccagcacccccagaguggugcugugaggacuagucccuguucccagagcccacuuuuuuuucuuuuuuugaaauaaaauagccugucuuucagaucucaaaggcucuuuucagagccaccaaaaaaaaaaaaaaaaaaaaaaaaaaaaaaaaaaaaaaaaaaaaaaaaaaaaaaaaaaaaaaaaagaauu

SEQ ID NO: 21166 - RNA, 2021 nt, Artificial Sequence
  mRNA product Design a-2 (hSL-A64-N5) comprising derived and/or modified sequence from LASV(LP;Clade I)__AAF86702__SP-IgE_NP(2-569) (opt4)
aggagaguccgcucagccagguugcagaagcggcuuagcguguguccuaaucuucucucugcguguagguaggccugugccgcaaacaagcuuaccauggacuggaccuggauccuguuccugguggccgccgccaccagagugcacagcagcaacagcaaggagaucaagagcuuccuguggacccagagccugagaagagagcugagcggcuacugcagcaacaucaagcugcagguggugaaggacgcccaggcccugcugcacggccuggacuucagcgaggugagcaacgugcagagacugaugagaaagcagaagagagacgacgccgaccugaagagacugagagaccugaaccaggccgugaacaaccugguggagcugaagagcacccagcagaagaacgugcugagagugggcacccugagcagcgacgaccugaucacccuggccgccgaccuggagaagcugaagagcaaggugaucagaaccgagagaccccugagcagcggcguguacaugggcaaccugagcagccagcagcuggaccagagaagagcccugcugagcaugaucggcaugagcggcggcccccagggcaacagaaccggcggcgacggcguggugagagugugggacgugaagaacgccgagcugcugaacaaccaguucggcaccaugcccagccugacccuggccugccugaccaagcagggccagguggaccugaacgacgccgugcaggcccugaccgaccugggccugaucuacaccgccaaguaccccaacagcagcgaccuggacaugcugacccagagccaccccauccugggcaugguggacaccaagaagagcagccugaacaucagcggcuacaacuucagccugggcgccgccgugaaggccggcgccugcaugcuggacggcggcaacaugcuggagaccaucaaggugagcccccagaccauggacggcauccugaagagcauccugaaggugaagagaagccugggcauguucaucagcgacacccccggcgagagaaaccccuacgagaacauccuguacaagaucugccugagcggcgagggcuggcccuacaucgccagcagaaccagcaucaccggcagagccugggagaacacccugguggaccuggagagcgacaacaagccccccaagcugaacagcgccggcagcaacaagagccugcaggccgccggccugaacgccggccugaccuacagccagcugaugacccugaaggacugcaugcugcagcuggaccccagcagcaagaccuggaucgacaucgagggcagacccgaggaccccguggagaucgcccuguuccagcccagcagcggcugcuacauccacuucuucagagagcccaccgaccugaagcaguucaagcaggacgccaaguacagccacggcaucgacgugaccgaccuguucagcacccagcccggccugaccagcgccgugaucgaggcccugcccagaaacauggugcugaccugccagggcagcgacgacaucaagaagcugcuggagagccagggcagaagagacaucaagcugaucgacaucagccugagcaaggccgacagcagaaaguucgagaacgccgugugggaccaguacaaggaccugugccacaugcacaccggcguggugguggagaagaagaagagaggcggcaaggaggagaucaccccccacugcgcccugcuggacugcaucauguucgacgccgccaccaccggcagccugaacaucaccacccugagagccgugcugcccagagacaugguguucagaaccagcacccccaagguggugcugugaggacuagucccuguucccagagcccacuuuuuuuucuuuuuuugaaauaaaauagccugucuuucagaucucaaaggcucuuuucagagccaccaaaaaaaaaaaaaaaaaaaaaaaaaaaaaaaaaaaaaaaaaaaaaaaaaaaaaaaaaaaaaaaaagaauu

SEQ ID NO: 21167 - RNA, 2021 nt, Artificial Sequence
  mRNA product Design a-2 (hSL-A64-N5) comprising derived and/or modified sequence from LASV(803213;Clade II)__AAF86704__SP-IgE_NP(2-569) (opt4)
aggagaguccgcucagccagguugcagaagcggcuuagcguguguccuaaucuucucucugcguguagguaggccugugccgcaaacaagcuuaccauggacuggaccuggauccuguuccugguggccgccgccaccagagugcacagcagcgccagcaaggaggugaagagcuuccuguggacccagagccugagaagagagcugagcggcuacugcagcaacaucaagcugcagguggugaaggacgcccaggcccugcugcacggccuggacuucagcgaggugaacaacgugcagagacugaugagaaagcagaagagagacgacggcgaccugaagagacugagagaccugaaccaggccgugaacaaccugguggagcugaagagcacccagcagaagagcauccugagagugggcacccugaccagcgacgaccugcugacccuggccgccgaccuggagaagcugaagagcaaggugaucagaaccgagagaccccugagcagcggcguguacaugggcaaccugagcacccagcagcuggagcagagaagagcccugcugaacaugaucggcauggugggcggcgcccagggcacccagcccggcagagacggcguggugagagugugggacgugaagaaccccgaccugcugaacaaccaguucggcaccaugcccagccugacccuggccugccugaccaagcagggccagguggaccugaacgacgccgugcuggcccugaccgaccugggccugaucuacaccgccaaguaccccaacagcagcgaccuggacagacugagccagagccaccccauccugaacaugguggacaccaagaagagcagccugaacaucagcggcuacaacuucagccugggcgccgccgugaaggccggcgccugcaugcuggacggcggcaacaugcuggagaccaucaaggugaccccccagaccauggacggcauccugaagagcauccugaaggugaagagaagccugggcauguucgugagcgacacccccggcgagagaaaccccuacgagaacauccuguacaagaucugccugagcggcgacggcuggcccuacaucgccagcagaaccagcaucgugggcagagccugggagaacaccaccguggaccuggagagcgacggcaagccccagaaggugggcaccgccggcagcaacaagagccugcagagcgccggcuuccccaccggccugaccuacagccagcugaugacccugaaggacagcaugaugcagcuggaccccagcgccaagaccuggaucgacaucgagggcagacccgaggaccccguggagaucgcccuguaccagcccaugagcggcugcuacauccacuucuucagagagcccaccgaccugaagcaguucaagcaggacgccaaguacagccacggcaucgacguggccgaccuguuccccgcccagcccggccugaccagcgccgugaucgaggcccugcccagaaacauggugcugaccugccagggcagcgacgacaucaagaagcugcuggacagccagggcagaagagacaucaagcugaucgacaucagccugagcaagguggacagcagaaaguucgagaacgccgugugggaccagugcaaggaccugugccacaugcacaccggcguggugguggagaagaagaagagaggcggcaaggaggagaucaccccccacugcgcccugauggacugcaucauguucgacgccgccgugagcggcggccugaacauccccgugcugagagccgugcugcccagagacaugguguucagaaccagcagccccaagguggugcugugaggacuagucccuguucccagagcccacuuuuuuuucuuuuuuugaaauaaaauagccugucuuucagaucucaaaggcucuuuucagagccaccaaaaaaaaaaaaaaaaaaaaaaaaaaaaaaaaaaaaaaaaaaaaaaaaaaaaaaaaaaaaaaaaagaauu

SEQ ID NO: 21168 - RNA, 2024 nt, Artificial Sequence
  mRNA product Design a-2 (hSL-A64-N5) comprising derived and/or modified sequence from LASV(GA391;Clade III)__CAA36646__SP-IgE_NP(2-570) (opt4)
aggagaguccgcucagccagguugcagaagcggcuuagcguguguccuaaucuucucucugcguguagguaggccugugccgcaaacaagcuuaccauggacuggaccuggauccuguuccugguggccgccgccaccagagugcacagcagcgccagcaaggaggugagaagcuuccuguggacccagagccugagaagagagcugagcggcuacugcagcaacaucaagcugcagguggugaaggacgcccaggcccugcugcacggccuggacuucagcgaggugagcaacgugcagagacugaugagaaagcagaagagagacgacggcgaccugaagagacugagagaccugaaccaggccgugaacaaccugguggagcugaagagcacccagcagaagagcgugcugagagugggcacccugagcagcgacgaccugcugauccuggccgccgaccuggagaagcugaagagcaaggugaccagaaccgagagaccccugagcagcggcguguacaugggcaaccugagcagccagcagcuggaccagagaagagcccugcugaacaugaucggcaugaccggcgugagcggcggcggcaagggcgccagcgacggcaucgugagagugugggacgugaagaacgccgagcugcugaacaaccaguucggcaccaugcccagccugacccuggccugccugaccaagcagggccagguggaccugaacgacgccgugcaggcccugaccgaccugggccugaucuacaccgccaaguaccccaacagcagcgaccuggacagacugagccagagccaccccauccugaacaugaucgacaccaagaagagcagccugaacaucagcggcuacaacuucagccugggcgccgccgugaaggccggcgccugcaugcuggacggcggcaacaugcuggagaccaucaaggugagcccccagaccauggacggcauccugaagagcauccugaaggugaagaagagccugggcauguucgugagcgacacccccggcgagagaaaccccuacgagaacauccuguacaagaucugccugagcggcgacggcuggcccuacaucgccagcagaaccagcaucgugggcagagccugggagaacaccgugguggaccuggagcaggacaacaagccccagaagaucggcaacggcggcagcaacaagagccugcagagcgccggcuucgccgccggccugaccuacagccagcugaugacccugaaggacuucaagugcuucaaccugauccccaacgccaagaccuggauggacaucgagggcagacccgaggaccccguggagaucgcccuguaccagcccagcagcggcugcuacgugcacuucuucagagagcccaccgaccugaagcaguucaagcaggacgccaaguacagccacggcaucgacgugaccgaccuguucgccgcccagcccggccugaccagcgccgugaucgaggcccugcccagaaacauggugaucaccugccagggcagcgaggacaucagaaagcugcuggagagccagggcagaagagacaucaagcugaucgacaucacccugagcaaggccgacagcagaaaguucgagaacgccgugugggaccaguucaaggaccugugccacaugcacaccggcguggugguggagaagaagaagagaggcggcaaggaggagaucaccccccacugcgcccugauggacugcaucauguucgacgccgccgugagcggcggccuggacgccaaggugcugagaguggugcugcccagagacaugguguucagaaccagcacccccaagguggugcugugaggacuagucccuguucccagagcccacuuuuuuuucuuuuuuugaaauaaaauagccugucuuucagaucucaaaggcucuuuucagagccaccaaaaaaaaaaaaaaaaaaaaaaaaaaaaaaaaaaaaaaaaaaaaaaaaaaaaaaaaaaaaaaaaagaauu

SEQ ID NO: 21169 - RNA, 2021 nt, Artificial Sequence
  mRNA product Design a-2 (hSL-A64-N5) comprising derived and/or modified sequence from LASV(AV;Clade V)__CCA30315__SP-IgE_NP(2-569) (opt4)
aggagaguccgcucagccagguugcagaagcggcuuagcguguguccuaaucuucucucugcguguagguaggccugugccgcaaacaagcuuaccauggacuggaccuggauccuguuccugguggccgccgccaccagagugcacagcagcgccagcaaggaggugaagagcuuccuguggacccagagccugagaagagagcugagcggcuacugcagcaacaucaagcugcagguggugaaggacgcccaggcccugcugcacggccuggacuucagcgaggugagcaacgugcagagacugaugagaaagcagagaagagacgacagcgaccugaagagacugagagaccugaaccaggccgugaacaaccugguggagcugaagagcacccagcagaagagcgugcugagagugggcacccugagcagcgacgaccugcugacccuggccgccgaccuggagaagcugaagagcaaggugaccagaaccgagagaccccugagcagcggcguguacaugggcaaccugagcagccagcagcuggaccagagaagagcccugcugaaccugaucggcaugaccaacggcagccagggcagccaggccggcagagacggcguggugagagugugggacgugaagaacgccgagcugcugaacaaccaguucggcaccaugcccagccugacccuggccugccugaccaagcagggccagguggaccugaacgacguggugcaggcccugaccgaccugggccugaucuacaccgccaaguaccccaacaccagcgaccuggacagacugacccagagccaccccauccugaacaugaucgacaccaagaagagcagccugaacaucagcggcuacaacuucagccugggcgccgccgugaaggccggcgccugcaugcuggacggcggcaacaugcuggagaccaucaaggugagcccccagagcauggacggcauccugaagagcauccugaaggugaagagagcccugggcauguucgugagcgacacccccggcgagagaaaccccuacgagaacauccuguacaagaucugccugagcggcgacggcuggcccuacaucgccagcagaaccagcaucgugggcagagccugggagaacaccgugguggaccuggagaccgacggcaagccccagaagaucggcagcggcaacagcaacaagagccugcagagcgccggcuucagcgccggccugaccuacagccagcugaugacccugaaggacgccaugcugcagcuggaccccaacgccaagaccuggauggacaucgagggcagacccgaggaccccguggagguggcccuguaccagcccaucagcggcugcuacauccacuucuucagagagcccaccgaccugaagcaguucaagcaggacgccaaguacagccacggcaucgacaucgccgaccuguucgccgcccagcccggccugaccagcgccgugaucgaggcccugcccagaaacauggugaucaccugccagggcagcgaggacaucaagaagcugcuggagagccagggcagaaaggacaucaagcugaucgacaucgcccugagcaagaucgacagcagaaaguucgagaacgccgugugggaccaguacaaggaccugugccacaugcacaccggcguggugguggagaagaagaagagaggcggcaaggaggagaucaccccccacugcgcccugauggacugcaucauguucgacgccgccgugagcggcggccugaacacccuggugcugagagccgugcugcccagagacaugguguucagaaccagcacccccagaguggugcugugaggacuagucccuguucccagagcccacuuuuuuuucuuuuuuugaaauaaaauagccugucuuucagaucucaaaggcucuuuucagagccaccaaaaaaaaaaaaaaaaaaaaaaaaaaaaaaaaaaaaaaaaaaaaaaaaaaaaaaaaaaaaaaaaagaauu

SEQ ID NO: 21170 - RNA, 2021 nt, Artificial Sequence
  mRNA product Design a-2 (hSL-A64-N5) comprising derived and/or modified sequence from LASV(Togo/2016/7082;Clade VI)__AMR44578__SP-IgE_NP(2-569) (opt4)
aggagaguccgcucagccagguugcagaagcggcuuagcguguguccuaaucuucucucugcguguagguaggccugugccgcaaacaagcuuaccauggacuggaccuggauccuguuccugguggccgccgccaccagagugcacagcagcaacagcaaggaggugaagagcuuccuguggacccagagccugagaagagagcugagcggcuacugcagcaacaucaagcugcagguggugaaggacgcccaggcccugcugcacggccuggacuucagcgaggugagcaacgugcagagacugaugagaaagcagaagagagacgacggcgaccugaagagacugagagaccugaaccaggccgugaacaaccugguggagcugaagagcgugcagcagaagagcauccugagagugggcacccugaccagcgacgaccugcugacccuggccgccgaccuggagaagcugaagagcaaggugaccagaaccgagagaccccugagcagcggcguguacaugggcaaccugagcagccagcagcuggaccagagaagagcccugcugagcaugaucggcaugagcggcggcaaccagaacagccagcccaagggcgacggcguggugagagugugggacgugaagaacgccgaccugcugaacaaccaguucggcaccaugcccagccugacccuggccugccugaccaagcagggccagguggaccugaacgacgccgugcaggcccugaccgaccugggccugaucuacaccgccaaguaccccaacagcagcgaccuggacagacugagccagagccaccccauccugaacaugaucgacaccaagaagagcagccugaacaucagcggcuacaacuucagccugggcgccgccaucaagaccggcgccugcaugcuggacggcggcaacaugcuggagaccaucaaggugaccccccagaccauggacggcauccugaagagcauccugaaggugaagagaagccugggcauguucaucagcgacacccccggcgagagaaaccccuacgagaacauccuguacaagaucugccugagcggcgacggcuggcccuacaucgccagcagaaccgccaucaucggcagagccugggagaacaccgugguggaccuggagagcgacagcaagccccagaagaucggcagcaacggcagcaacaagagccugcagagcgccggcuucgcccccggccugaccuacagccagcugaugacccugaaggacagcaugcugcagcuggaccccaacgccaagaccuggaucgacaucgagggcagacccgaggaccccguggagguggcccuguuccagcccaucagcggcugcuacauccacuucuucagagagcccaccgaccugaagcaguucaagcaggacgccaaguacagccacggcaucgacgugaccgaccuguucgccgcccagcccggccugaccagcgccgugaucgaggcccugcccagaaacauggugcugaccugccagggcagcgacgacaucaagaagcugcuggacagccagggcagaagagacaucaagcugaucgacgugagccugaacaagaucgacagcagaaaguucgagaacgccgugugggaccaguacaaggaccugugccacaugcacaccggcguggugguggagaagaagaagaagggcggcaaggaggagaucaccccccacugcgcccugcuggacugcaucauguucgacgccgccgugagcggcggccugaacgccaccgugcugagagccgugcugcccagagacaugguguucagaaccagcagccccaagguggugcugugaggacuagucccuguucccagagcccacuuuuuuuucuuuuuuugaaauaaaauagccugucuuucagaucucaaaggcucuuuucagagccaccaaaaaaaaaaaaaaaaaaaaaaaaaaaaaaaaaaaaaaaaaaaaaaaaaaaaaaaaaaaaaaaaagaauu

SEQ ID NO: 21171 - RNA, 2021 nt, Artificial Sequence
  mRNA product Design a-2 (hSL-A64-N5) comprising derived and/or modified sequence from LASV(KAK-428;Clade n.d. (VII))__ANH09741__SP-IgE_NP(2-569) (opt4)
aggagaguccgcucagccagguugcagaagcggcuuagcguguguccuaaucuucucucugcguguagguaggccugugccgcaaacaagcuuaccauggacuggaccuggauccuguuccugguggccgccgccaccagagugcacagcagcaacagcaaggaggugaagagcuuccuguggacccagagccugagaagagagcugagcggcuacugcaccaacaucaagcugcagguggugaaggacgcccaggcccugcugcacggccuggacuucagcgaggugagcaacgugcagagacugaugagaaagcagaagagagacgacaacgaccugaagagacugagagaccugaaccaggccgugaacaaccugguggagcugaagagcgugcagcagaagagcgugcugaaggugggcacccugaacagcgacgaccugcugacccuggccgccgaccuggagaagcugaagagcaagguggugagaaccgagagaccccugagcagcggcguguacaugggcaaccugagcagccagcagcuggaccagagaagagcccugcugaacaugaucggcauggccggcggcagccagggcaaccagcccagcagagacggcguggugagagugugggacgugaagaacgccgaccugcugaacaaccaguucggcaccaugcccagccugacccuggccugccugaccaagcagggccagguggaccugaacgacguggugcuggcccugaccgaccugggccugaucuacaccgccaaguaccccaacagcagcgaccuggacagacugagccagaaccaccccgugcugaacaugaucgacgugaacaagagcagccugaacaucagcggcuacaacuucagccugggcgccgccgugaaggccggcgccugcaugcuggacggcggcaacaugcuggagaccaucaagaucagcccccagaccguggacggcauccugaagagcauccugaaggugaagagagcccugggcauguucgugagcgacacccccggcgagagaaaccccuacgagaacauccuguacaaggugugccugagcggcaacggcuggcccuacaucgccagcagaaccagcaucgugggcagagccugggagaacaccgugguggaccuggagagcaacaagaaccagcccaaggugggcaacaacggcagcaacaagaugcugcagagcagcggcuucgccaccggccugaccuacagccagcugaugacccugagagacagcaugcugcagcuggaccccaccgccaagaccuggaucgacaucgagggcagacccgaggaccccguggagcuggcccuguuccagcccagcagcggcugcuacauccacuucuucagagagcccaccgaccugaagcaguucaagcaggacgccaaguacagccacggcaucgacgugaacgaccuguucagcgcccagcccggccugaccagcgccgugcuggaggcccugcccagaaacauggugcugaccugccagggcagcgacgacaucagaaagcugcuggacagccaggacagaaaggacaucaagcugaucgacaucagccugagcaaggccgacgccagaaaguucgagaacgacgugugggaccaguucaaggaccugugccacaugcacaccggcaucgugguggagaagaagaagaagggcggcaagcaggagaugaccccccacugcgcccugcuggacugcaucauguucgacgccgccgugagcggcggccugaacgugcccacccugagagccgugcugcccaccgacaugguguucagaaccaucaccaccaagguggugcugugaggacuagucccuguucccagagcccacuuuuuuuucuuuuuuugaaauaaaauagccugucuuucagaucucaaaggcucuuuucagagccaccaaaaaaaaaaaaaaaaaaaaaaaaaaaaaaaaaaaaaaaaaaaaaaaaaaaaaaaaaaaaaaaaagaauu

SEQ ID NO: 21172 - RNA, 2021 nt, Artificial Sequence; identical to SEQ ID NO: 21166
  mRNA product Design a-2 (hSL-A64-N5) comprising derived and/or modified sequence from LASV(Pinneo-NIG-1969;Clade I)__AIT17837__SP-IgE_NP(2-569) (opt4)

SEQ ID NO: 21173 - RNA, 2021 nt, Artificial Sequence
  mRNA product Design a-2 (hSL-A64-N5) comprising derived and/or modified sequence from LASV(ISTH0009-NIG-2011;Clade II)__AIT17405__SP-IgE_NP(2-569) (opt4)
aggagaguccgcucagccagguugcagaagcggcuuagcguguguccuaaucuucucucugcguguagguaggccugugccgcaaacaagcuuaccauggacuggaccuggauccuguuccugguggccgccgccaccagagugcacagcagcgugagcaaggaggugaagagcuuccuguggacccagagccugagaagagagcugagcggcuacugcagcaacaucaagcugcagguggugaaggacgcccaggcccugcugcacggccuggacuucagcgaggugagcaacgugcagagacugaugagaaagcagaagagagacgacagcgaccugaagagacugagagaccugaaccaggccgugaacaaccugguggagcugaagagcacccagcagaagagcauccugagagugggcacccugaccagcgacgaccugcugacccuggccgccgaccuggagaagcugaagagcaaggugaucagaaccgagagaccccugagcagcggcguguacaugggcaaccugagcacccagcagcuggagcagagaagagcccugcugaacaugaucggcauggugggcggcgcccagggcacccagcccggcagagacggcguggugagagugugggacgugaagaaccccgaccugcugaacaaccaguucggcaccaugcccagccugacccuggccugccugaccaagcagggccagguggaccugaacgacgccgugcuggcccugaccgaccugggccugaucuacaccgccaaguaccccaacagcagcgaccuggacagacugagccagagccaccccauccugaacaugguggacaucaagaagagcagccugaacaucagcggcuacaacuucagccugggcgccgccgugaaggccggcgccugcaugcuggacggcggcaacaugcuggagaccaucaaggugaccccccagaccauggacggcauccugaagagcauccugaaggugaagagaagccugggcauguucgugagcgacacccccggcgagagaaaccccuacgagaacauccuguacaagaucugccugagcggcgacggcuggcccuacaucgccagcagaaccagcaucgugggcagagccugggagaacaccaccguggaccuggagagcgacggcaagccccagaaggugggcagcgccggcagcaacaagagccugcagagcgccggcuuccccaccggccugaccuacagccagcugaugacccugaaggacagcaugaugcagcuggaccccagcgccaagaccuggaucgacaucgagggcagacccgaggaccccguggagaucgcccuguaccagcccaugagcggcugcuacauccacuucuucagagagcccaccgaccugaagcaguucaagcaggacgccaaguacagccacggcaucgacguggccgaccuguuccccgcccagcccggccugaccagcgccgugaucgaggcccugcccagaaacauggugcugaccugccagggcagcgacgacaucaagagacugcuggacagccagggcagaagagacaucaagcugaucgacaucgcccugagcaaggccgacagcagaagauucgagaacgccgugugggaccagugcaaggaccugugccacaugcacaccggcguggugguggagaagaagaagagaggcggcaaggaggagaucaccccccacugcgcccugauggacugcaucauguacgacgccgccgugagcggcggccugaacauccccgugcugagagccgugcugcccagagacaugguguucagaaccagcagccccaagguggugcugugaggacuagucccuguucccagagcccacuuuuuuuucuuuuuuugaaauaaaauagccugucuuucagaucucaaaggcucuuuucagagccaccaaaaaaaaaaaaaaaaaaaaaaaaaaaaaaaaaaaaaaaaaaaaaaaaaaaaaaaaaaaaaaaaagaauu

SEQ ID NO: 21174 - RNA, 2021 nt, Artificial Sequence
  mRNA product Design a-2 (hSL-A64-N5) comprising derived and/or modified sequence from LASV(ISTH2010-NIG-2012;Clade II)__AIT17483__SP-IgE_NP(2-569) (opt4)
aggagaguccgcucagccagguugcagaagcggcuuagcguguguccuaaucuucucucugcguguagguaggccugugccgcaaacaagcuuaccauggacuggaccuggauccuguuccugguggccgccgccaccagagugcacagcagcgccagcaaggaggugaagagcuuccuguggacccagagccugagaagagagcugagcggcuacugcagcaacaucaagcugcagguggugaaggacgcccaggcccugcugcacggccuggacuucagcgaggugagcaacgugcagagacugaugagaaagcagaagagagacgacagcgaccugaagagacugagagaccugaaccaggccgugaacaaccugguggagcugaagagcacccagcagaagagcauccugagagugggcacccugaccagcgacgaccugcugacccuggccgccgaccuggagaagcugaagagcaaggugaucagaaccgagagaccccugagcagcggcguguacaugggcaaccugagcacccagcagcuggagcagagaagagcccugcugaaccugaucggcauggugggcggcgcccagggcacccagcccggcagagacggcguggugagagugugggacgugaagaaccccgaccugcugaacaaccaguucggcaccaugcccagccugacccuggccugccugaccaagcagggccagguggaccugaacgacgccgugcuggcccugaccgaccugggccugaucuacaccgccaaguaccccaacagcagcgaccuggacagacugagccagagccaccccauccugaacaugguggacaccaagaagagcagccugaacaucagcggcuucaacuucagccugggcgccgccgugaaggccggcgccugcaugcuggacggcggcaacaugcuggagaccaucaaggugaccccccagaccauggacggcauccugaagagcauccugaaggugaagaagagccugggcauguucgugagcgacacccccggcgagagaaaccccuacgagaacauccuguacaagaucugccugagcggcgacggcuggcccuacaucgccagcagaaccagcaucgugggcagagccugggagaacaccaccguggaccuggagagcgacggcaagccccacaaggugggcaccgccggcagcaacaagagccugcagagcgccggcuuccccaccggccugaccuacagccagcugaugacccugaaggacagcaugaugcagcuggaccccagcgccaagaccuggaucgacaucgagggcagacccgaggaccccguggagaucgcccuguaccagcccaugagcggcugcuacauccacuucuucagagagcccaccgaccugaagcaguucaagcaggacgccaaguacagccacggcaucgacguggccgaccuguuccccgcccagcccggccugaccagcgccgugaucgaggcccugcccagaaacauggugcugaccugccagggcagcgacgacaucaagagacugcuggacagccagggcagaagagacaucaagcugaucgacaucgcccugagcaaggccgacagcagaagauucgagaacgccgugugggaccagugcaaggaccugugccacaugcacaccggcguggugguggagaagaagaagagaggcggcaaggaggagaucaccccccacugcgcccugauggacugcaucauguacgacgccgccgugagcggcggccugaacauccccgugcugagagccgugcugcccagagacaugguguucagaaccagcagccccaagguggugcugugaggacuagucccuguucccagagcccacuuuuuuuucuuuuuuugaaauaaaauagccugucuuucagaucucaaaggcucuuuucagagccaccaaaaaaaaaaaaaaaaaaaaaaaaaaaaaaaaaaaaaaaaaaaaaaaaaaaaaaaaaaaaaaaaagaauu

SEQ ID NO: 21175 - RNA, 2021 nt, Artificial Sequence
  mRNA product Design a-2 (hSL-A64-N5) comprising derived and/or modified sequence from LASV(Lassa virus/H.sapiens-wt/NGA/2015/ISTH_0543;Clade II)__AVO03640__SP-IgE_NP(2-569) (opt4)
aggagaguccgcucagccagguugcagaagcggcuuagcguguguccuaaucuucucucugcguguagguaggccugugccgcaaacaagcuuaccauggacuggaccuggauccuguuccugguggccgccgccaccagagugcacagcagcgccagcaaggaggugaagagcuuccuguggacccagagccugagaagagagcugagcggcuacugcagcaacaucaagcugcagguggugaaggacgcccaggcccugcugcacggccuggacuucagcgaggugagcaacgugcagagacugaugagaaagcagaagagagacgacagcgaccugaagagacugagagaccugaaccaggccgugaacaaccugguggagcugaagagcacccagcagaagagcauccugagagugggcacccugaccagcgacgaccugcugacccuggccgccgaccuggagaagcugaagagcaaggugaucagaaccgagagaccccugagcagcggcguguacaugggcaaccugagcacccagcagcuggagcagagaagagcccugcugaacaugaucggcauggugggcggcgcccagggcacccagcccggcagagacggcguggugagagugugggacgugaagaaccccgaccugcugaacaaccaguucggcaccaugcccagccugacccuggccugccugaccaagcagggccagguggaccugaacgacgccgugcuggcccugaccgaccugggccugaucuacaccgccaaguaccccaacagcagcgaccuggacagacugagccagagccaccccauccugaacaugguggacaccaagaagagcagccugaacaucagcggcuacaacuucagccugggcgccgccgugaaggccggcgccugcaugcuggacggcggcaacaugcuggagaccaucaaggugaccccccagaccauggacggcauccugaagagcauccugaaggugaagaagagccugggcauguucgugagcgacacccccggcgagagaaaccccuacgagaacauccuguacaagaucugccugagcggcgacggcuggcccuacaucgccagcagaaccagcaucgugggcagagccugggagaacaccaccguggaccuggagagcgacggcaagccccagaaggugggcagcgccggcagcaacaagagccugcagagcgccggcuuccccaccggccugaccuacagccagcugaugacccugaaggacagcaugaugcagcuggaccccagcgccaagaccuggaucgacaucgagggcagacccgaggaccccguggagaucgcccuguaccagcccaugagcggcugcuacauccacuucuucagagagcccaccgaccugaagcaguucaagcaggacgccaaguacagccacggcaucgacguggccgaccuguuccccgcccagcccggccugaccagcgccgugaucgaggcccugcccagaaacauggugcugaccugccagggcagcgacgacaucaagagacugcuggacagccagggcagaaaggacaucaagcugaucgacaucgcccugagcaaggccgacagcagaagauucgagaacgccgugugggaccagugcaaggaccugugccacaugcacaccggcguggugguggagaagaagaagagaggcggcaaggaggagaucaccccccacugcgcccugauggacugcaucauguacgacgccgccgugagcggcggccugaacauccccgugcugagagccgugcugcccagagacaugguguucagaaccagcagccccaagguggugcugugaggacuagucccuguucccagagcccacuuuuuuuucuuuuuuugaaauaaaauagccugucuuucagaucucaaaggcucuuuucagagccaccaaaaaaaaaaaaaaaaaaaaaaaaaaaaaaaaaaaaaaaaaaaaaaaaaaaaaaaaaaaaaaaaagaauu

SEQ ID NO: 21176 - RNA, 2021 nt, Artificial Sequence
  mRNA product Design a-2 (hSL-A64-N5) comprising derived and/or modified sequence from LASV(Lassa virus/H.sapiens-wt/NGA/2016/ISTH_0009;Clade II)__AVO03572__SP-IgE_NP(2-569) (opt4)
aggagaguccgcucagccagguugcagaagcggcuuagcguguguccuaaucuucucucugcguguagguaggccugugccgcaaacaagcuuaccauggacuggaccuggauccuguuccugguggccgccgccaccagagugcacagcagcgccagcaaggaggugaagagcuuccuguggacccagagccugagaagagagcugagcggcuacugcagcaacaucaagcugcagguggugaaggacgcccaggcccugcugcacggccuggacuucagcgaggugagcaacgugcagagacugaugagaaagcagaagagagacgacagcgaccugaagagacugagagaccugaaccaggccgugaacaaccugguggagcugaagagcacccagcagaagagcauccugagagugggcacccugaccagcgacgaccugcugacccuggccgccgaccuggagaagcugaagagcaaggugaucagaaccgagagaccccugagcagcggcguguacaugggcaaccugagcacccagcagcuggagcagagaagagcccugcugaacaugaucggcauggugggcggcgcccagggcacccagcccggcagagacggcguggugagagugugggacgugaagaaccccgaccugcugaacaaccaguucggcaccaugcccagccugacccuggccugccugaccaagcagggccagguggaccugaacgacgccgugcuggcccugaccgaccugggccugaucuacaccgccaaguaccccaacagcagcgaccuggacagacugagccagagccaccccauccugaacaugguggacaccaagaagagcagccugaacaucagcggcuacaacuucagccugggcgccgccgugaaggccggcgccugcaugcuggacggcggcaacaugcuggagaccaucaaggugaccccccagaccauggacggcauccugaagagcauccugaaggugaagaagagccugggcauguucgugagcgacacccccggcgagagaaaccccuacgagaacauccuguacaagaucugccugagcggcgacggcuggcccuacaucgccagcagaaccagcaucgugggcagagccugggagaacaccaccguggaccuggagagcgacggcaagccccagaaggugggcagcgccggcagcaacaagagccugcagagcgccggcuuccccaccggccugaccuacagccagcugaugacccugaaggacagcaugaugcagcuggaccccagcgccaagaccuggaucgacaucgagggcagacccgaggaccccguggagaucgcccuguaccagcccaugagcggcugcuacauccacuucuucagagagcccaccgaccugaagcaguucaagcaggacgccaaguacagccacggcaucgacguggccgaccuguuccccgcccagcccggccugaccagcgccgugaucgaggcccugcccagaaacauggugcugaccugccagggcagcgacgacaucaagagacugcuggacagccagggcagaagagacaucaagcugaucgacaucgcccugagcaaggccgacagcagaagauucgagaacgccgugugggaccagugcaaggaccugugccacaugcacaccggcguggugguggagaagaagaagagaggcggcaaggaggagaucaccccccacugcgcccugauggacugcaucauguacgacgccgccgugagcggcggccugaacauccccgugcugagagccgugcugcccagagacaugguguucagaaccagcagccccaagguggugcugugaggacuagucccuguucccagagcccacuuuuuuuucuuuuuuugaaauaaaauagccugucuuucagaucucaaaggcucuuuucagagccaccaaaaaaaaaaaaaaaaaaaaaaaaaaaaaaaaaaaaaaaaaaaaaaaaaaaaaaaaaaaaaaaaagaauu

SEQ ID NO: 21177 - RNA, 2021 nt, Artificial Sequence
  mRNA product Design a-2 (hSL-A64-N5) comprising derived and/or modified sequence from LASV(Lassa virus/H.sapiens-wt/NGA/2016/ISTH_0017;Clade II)__AVO03568__SP-IgE_NP(2-569) (opt4)
aggagaguccgcucagccagguugcagaagcggcuuagcguguguccuaaucuucucucugcguguagguaggccugugccgcaaacaagcuuaccauggacuggaccuggauccuguuccugguggccgccgccaccagagugcacagcagcgccagcaaggaggugaagagcuuccuguggacccagagccugagaagagagcugagcggcuacugcagcagcaucaagcugcagguggugaaggacgcccaggcccugcugcacggccuggacuucagcgaggugagcaacgugcagagacugaugagaaagcagaagagagacgacagcgaccugaagagacugagagaccugaaccaggccgugaacaaccugguggagcugaagagcacccagcagaagagcauccugagagugggcacccugaccagcgacgaccugcugacccuggccgccgaccuggagaagcugaagagcaaggugaucagaaccgagagaccccugagcagcggcguguacaugggcaaccugagcacccagcagcuggagcagagaagagcccugcugaacaugaucggcauggccggcggcgcccagggcacccagcccggcagagacggcguggugagagugugggacgugaagaaccccgaccugcugaacaaccaguucggcaccaugcccagccugacccuggccugccugaccaagcagggccagguggaccugaacgacgccgugcuggcccugaccgaccugggccugaucuacaccgccaaguaccccaacagcagcgaccuggacagacugagccagagccaccccauccugaacaugguggacaccaagaagagcagccugaacaucagcggcuacaacuucagccugggcgccgccgugaaggccggcgccugcaugcuggacggcggcaacaugcuggagaccaucaaggugaccccccagaccauggacggcauccugaagagcauccugaaggugaagagaagccugggcauguucgugagcgacgcccccggcgagagaaaccccuacgagaacauccuguacaagaucugccugagcggcgacggcuggcccuacaucgccagcagaaccagcaucgugggcagagccugggagaacaccaccguggaccuggagagcgacggcaagccccagaaggugggcgccaccggcagcaacaagagccugcagagcgccggcuuccccaccggccugaccuacagccagcugaugacccugaaggacagcaugaugcagcuggaccccagcgccaagaccuggaucgacaucgagggcagacccgaggaccccguggagguggcccuguaccagcccgugagcggcugcuacauccacuucuucagagagcccaccgaccugaagcaguucaagcaggacgccaaguacagccacggcaucgacguggccgaccuguuccccgcccagcccggccugaccagcgccgugaucgaggcccugcccagaaacauggugcugaccugccagggcagcgacgacaucaagaagcugcuggacagccagggcagaaaggacaucaagcugaucgacaucgcccugagcaaggccgacagcagaagauucgagaacgccgugugggaccagugcaaggaccugugccacaugcacaccggcguggugguggagaagaagaagagaggcggcaaggaggagaucaccccccacugcgcccugauggacugcaucauguacgacgccgccgugagcggcggccugaacauccccgugcugagagccgugcugcccagagacaugguguucagaaccagcagccccaagguggugcugugaggacuagucccuguucccagagcccacuuuuuuuucuuuuuuugaaauaaaauagccugucuuucagaucucaaaggcucuuuucagagccaccaaaaaaaaaaaaaaaaaaaaaaaaaaaaaaaaaaaaaaaaaaaaaaaaaaaaaaaaaaaaaaaaagaauu

SEQ ID NO: 21178 - RNA, 2021 nt, Artificial Sequence
  mRNA product Design a-2 (hSL-A64-N5) comprising derived and/or modified sequence from LASV(Lassa virus/H.sapiens-wt/NGA/2018/ISTH_0959;Clade II)__AVV65100__SP-IgE_NP(2-569) (opt4)
aggagaguccgcucagccagguugcagaagcggcuuagcguguguccuaaucuucucucugcguguagguaggccugugccgcaaacaagcuuaccauggacuggaccuggauccuguuccugguggccgccgccaccagagugcacagcagcgccagcaaggaggugaagagcuuccuguggacccagagccugagaagagagcugagcggcuacugcagcaacaucaagcugcagguggugaaggacgcccaggcccugcugcacggccuggacuucagcgaggugagcaacgugcagagacugaugagaaagcagaagagagacgacagcgaccugaagagacugagagaccugaaccaggccgugaacaaccugguggagcugaagagcacccagcagaagagcauccugagagugggcacccugaccagcgacgaccugcugacccuggccgccgaccuggagaagcugaagagcaaggugaucagaaccgagagaccccugagcagcggcguguacaugggcaaccugagcacccagcagcuggagcagagaagagcccugcugaaccugaucggcauggugggcggcgcccagggcacccagcccggcagagacggcguggugagagugugggacgugaagaaccccgaccugcugaacaaccaguucggcaccaugcccagccugacccuggccugccugaccaagcagggccagguggaccugaacgacguggugcuggcccugaccgaccugggccugaucuacaccgccaaguaccccaacagcagcgaccuggacagacugagccagagccaccccauccugaacaugguggacaccaagaagagcagccugaacaucagcggcuucaacuucagccugggcgccgccgugaaggccggcgccugcaugcuggacggcggcaacaugcuggagaccaucaaggugaccccccagaccauggacggcauccugaagagcauccugaaggugaagaagagccugggcauguucgugagcgacacccccggcgagagaaaccccuacgagaacauccuguacaagaucugccugagcggcgacggcuggcccuacaucgccagcagaaccagcaucgugggcagagccugggagaacaccaccguggaccuggagagcgacggcaagccccacaaggugggcaccgccggcagcaacaagagccugcagagcgccggcuuccccaccggccugaccuacagccagcugaugacccugaaggacagcaugaugcagcuggaccccagcgccaagaccuggaucgacaucgagggcagacccgaggaccccguggagaucgcccuguaccagcccaugagcggcugcuacauccacuucuucagagagcccaccgaccugaagcaguucaagcaggacgccaaguacagccacggcaucgacguggccgaccuguuccccgcccagcccggccugaccagcgccgugaucgaggcccugcccagaaacauggugcugaccugccagggcagcgacgacaucaagagacugcuggacagccagggcagaaaggacaucaagcugaucgacaucgcccugagcaagaccgacagcagaagauucgagaacgccgugugggaccagugcaaggaccugugccacaugcacaccggcguggugguggagaagaagaagagaggcggcaaggaggagaucaccccccacugcgcccugauggacugcaucauguacgacgccgccgugagcggcggccugaacauccccgugcugagagccgugcugcccagagacaugguguucagaaccagcagccccaagguggugcugugaggacuagucccuguucccagagcccacuuuuuuuucuuuuuuugaaauaaaauagccugucuuucagaucucaaaggcucuuuucagagccaccaaaaaaaaaaaaaaaaaaaaaaaaaaaaaaaaaaaaaaaaaaaaaaaaaaaaaaaaaaaaaaaaagaauu

SEQ ID NO: 21179 - RNA, 2021 nt, Artificial Sequence
  mRNA product Design a-2 (hSL-A64-N5) comprising derived and/or modified sequence from LASV(LASV003-NIG-2008;Clade II)__AIT17581__SP-IgE_NP(2-569) (opt4)
aggagaguccgcucagccagguugcagaagcggcuuagcguguguccuaaucuucucucugcguguagguaggccugugccgcaaacaagcuuaccauggacuggaccuggauccuguuccugguggccgccgccaccagagugcacagcagcgccagcaaggaggugaagagcuuccuguggacccagagccugagaagagagcugagcggcuacugcagcagcaucaagcugcagguggugaaggacgcccaggcccugcugcacggccuggacuucagcgaggugagcaacgugcagagacugaugagaaagcagaagagagacgacagcgaccugaagagacugagagaccugaaccaggccgugaacaaccugguggagcugaagagcacccagcagaagagcgugcugagagugggcacccugaccagcgacgaccugcugacccuggccgccgaccuggagaagcugaagagcaaggugaucagaaccgagagaccccugagcagcggcguguacaugggcaaccugagcgcccagcagcuggagcagagaagaacccugcugaacaugaucggcauggugggcggcgcccagggcacccagcccggcagagacggcguggugagagugugggacgugaagaaccccgaccugcugaacaaccaguucggcaccaugcccagccugacccuggccugccugaccaagcagggccagguggaccugaacgacguggugcuggcccugaccgaccugggccugaucuacaccgccaaguaccccaacagcagcgaccuggacagacugagccagagccaccccauccugagcaugguggacaccaagaagagcagccugaacaucagcggcuacaacuucagccugggcgccgccgugaaggccggcgccugcaugcuggacggcggcaacaugcuggagaccaucaaggugaccccccagaccauggacggcauccugaagagcauccugaaggugaagaagagccugggcauguucgugagcgacacccccggcgagagaaaccccuacgagaacauccuguacaagaucugccugagcggcgacggcuggcccuacaucgccagcagaaccagcaucgugggcagagccugggagaacaccaccguggaccuggagagcgacggcaagccccagaaggugggcaccgccggcagcaacaagagccugcagagcgccggcuuccccaccggccugaccuacagccagcugaugacccugaaggacagcaugaugcagcuggaccccagcgccaagaccuggaucgacaucgagggcagacccgaggaccccguggagaucgcccuguaccagcccaugagcggcugcuacauccacuucuucagagagcccaccgaccugaagcaguucaagcaggacgccaaguacagccacggcaucgacgugaccgaccuguuccccgcccagcccggccugaccagcgccgugaucgaggcccugcccagaaacauggugcugaccugccagggcagcgacgacaucaagagacugcuggacagccagggcagaagagacaucaagcugaucgacaucgcccugagcaaggccgacagcagaagauucgagaacgccgugugggaccagugcaaggaccugugccacaugcacaccggcguggugguggagaagaagaagagaggcggcaaggaggagaucaccccccacugcgcccugauggacugcaucauguacgacgccgccgugagcggcggccugaacauccccgugcugagagccgugcugcccagagacaugguguucagaaccagcagccccaagguggugcugugaggacuagucccuguucccagagcccacuuuuuuuucuuuuuuugaaauaaaauagccugucuuucagaucucaaaggcucuuuucagagccaccaaaaaaaaaaaaaaaaaaaaaaaaaaaaaaaaaaaaaaaaaaaaaaaaaaaaaaaaaaaaaaaaagaauu

SEQ ID NO: 21180 - RNA, 2021 nt, Artificial Sequence
  mRNA product Design a-2 (hSL-A64-N5) comprising derived and/or modified sequence from LASV(LASV035-NIG-2009;Clade II)__AIT17589__SP-IgE_NP(2-569) (opt4)
aggagaguccgcucagccagguugcagaagcggcuuagcguguguccuaaucuucucucugcguguagguaggccugugccgcaaacaagcuuaccauggacuggaccuggauccuguuccugguggccgccgccaccagagugcacagcagcgccagcaaggaggugaagagcuuccuguggacccagagccugagaagagagcugagcggcuacugcagcagcaucaagcugcagguggugaaggacgcccaggcccugcugcacggccuggacuucagcgaggugagcaacgugcagagacugaugagaaagcagaagagagacgacagcgaccugaagagacugagagaccugaaccaggccgugaacaaccugguggagcugaagagcacccagcagaagagcauccugagagugggcacccugaccagcgacgaccugcugacccuggccgccgaccuggagaagcugaagagcaaggugaucagaaccgagagaccccugagcagcggcguguacaugggcaaccugagcgcccagcagcuggagcagagaagagcccugcugaacaugaucggcauggugggcggcgcccagggcacccagcccggcagagacggcguggugagagugugggacgugaagaaccccgaccugcugaacaaccaguucggcaccaugcccagccugacccuggccugccugaccaagcagggccagguggaccugaacgacgccgugcuggcccugaccgaccugggccugaucuacaccgccaaguaccccaacagcagcgaccuggacagacugagccagagccaccccauccugaacaugguggacaccaagaagagcagccugaacaucagcggcuacaacuucagccugggcgccgccgugaaggccggcgccugcaugcuggacggcggcaacaugcuggagaccaucaaggugaccccccagaccauggacggcauccugaagagcauccugaaggugaagagaagccugggcauguucgugagcgacacccccggcgagagaaaccccuacgagaacauccuguacaagaucugccugagcggcgacggcuggcccuacaucgccagcagaaccagcaucgugggcagagccugggagaacaccaccguggaccuggagagcgacggcaagccccagaaggugggcaccaccggcagcaacaagagccugcagagcgccggcuuccccaccggccugaccuacagccagcugaugacccugaaggacagcaugaugcagcuggaccccagcgccaagaccuggaucgacaucgagggcagacccgaggaccccguggagaucgcccuguaccagcccaugagcggcugcuacauccacuucuucagagagcccaccgaccugaagcaguucaagcaggacgccaaguacagccacggcaucgacguggccgaccuguuccccgcccagcccggccugaccagcgccgugaucgaggcccugcccagaaacauggugcugaccugccagggcagcgacgacaucaagaagcugcuggacagccagggcagaagagacaucaagcugaucgacaucgcccugagcaaggccgacagcagaaaguucgagaacgccgugugggaccagugcaaggaccugugccacaugcacaccggcguggugguggagaagaagaagagaggcggcaaggaggagaucaccccccacugcgcccugauggacugcaucauguacgacgccgccgugagcggcggccugaacauccccgugcugagagccgugcugcccagagacaugguguucagaaccagcagccccaagguggugcugugaggacuagucccuguucccagagcccacuuuuuuuucuuuuuuugaaauaaaauagccugucuuucagaucucaaaggcucuuuucagagccaccaaaaaaaaaaaaaaaaaaaaaaaaaaaaaaaaaaaaaaaaaaaaaaaaaaaaaaaaaaaaaaaaagaauu

SEQ ID NO: 21181 - RNA, 2021 nt, Artificial Sequence
  mRNA product Design a-2 (hSL-A64-N5) comprising derived and/or modified sequence from LASV(LASV1000-NIG-2009;Clade II)__AIT17783__SP-IgE_NP(2-569) (opt4)
aggagaguccgcucagccagguugcagaagcggcuuagcguguguccuaaucuucucucugcguguagguaggccugugccgcaaacaagcuuaccauggacuggaccuggauccuguuccugguggccgccgccaccagagugcacagcagcgccagcaaggaggugaagagcuuccuguggacccagagccugagaagagagcugagcggcuacugcagcaacaucaagcugcagguggugaaggacgcccaggcccugcugcacggccuggacuucagcgaggugagcaacgugcagagacugaugagaaagcagaagagagacgacagcgaccugaagagacugagagaccugaaccaggccgugaacaaccugguggagcugaagagcacccagcagaagagcauccugagagugggcacccugaccagcgacgaccugcugacccuggccgccgaccuggagaagcugaagagcaaggugaucagaaccgagagaccccugagcagcggcguguacaugggcaaccugagcacccagcagcuggagcagagaagagcccugcugaacaugaucggcauggugggcggcgcccagggcacccagcccggcagagacggcguggugagagugugggacgugaagaaccccgaccugcugaacaaccaguucggcaccaugcccagccugacccuggccugccugaccaagcagggccagguggaccugaacgacguggugcuggcccugaccgaccugggccugaucuacaccgccaaguaccccaacagcagcgaccuggacagacugagccagagccaccccauccugaacaugguggacaccaagaagagcagccugaacaucagcggcuacaacuucagccugggcgccgccgugaaggccggcgccugcaugcuggacggcggcaacaugcuggagaccaucaaggugaccccccagaccauggacggcauccugaagagcauccugaaggugaagaagagccugggcauguucgugagcgacacccccggcgagagaaaccccuacgagaacauccuguacaagaucugccugagcggcgacggcuggcccuacaucgccagcagaaccagcaucgugggcagagccugggagaacaccaccguggaccuggagagcgacggcaagccccagaaggugggcaccgccggcagcaacaagagccugcagagcgccggcuuccccaccggccugaccuacagccagcugaugacccugaaggacagcaugaugcagcuggaccccagcgccaagaccuggaucgacaucgagggcagacccgaggaccccguggagaucgcccuguaccagcccgugagcggcugcuacauccacuucuucagagagcccaccgaccugaagcaguucaagcaggacgccaaguacagccacggcaucgacguggccgaccuguuccccgcccagcccggccugaccagcgccgugaucgaggcccugcccagaaacauggugcugaccugccagggcagcgacgacaucaagagacugcuggacagccagggcagaagagacaucaagcugaucgacaucgcccugagcaaggccgacagcagaagauucgagaacgccgugugggaccagugcaaggaccugugccacaugcacaccggcguggugguggagaagaagaagagaggcggcaaggaggagaucaccccccacugcgcccugauggacugcaucauguacgacgccgccgugagcggcggccugaacauccccgugcugagagccgugcugcccagagacaugguguucagaaccagcagccccaagguggugcugugaggacuagucccuguucccagagcccacuuuuuuuucuuuuuuugaaauaaaauagccugucuuucagaucucaaaggcucuuuucagagccaccaaaaaaaaaaaaaaaaaaaaaaaaaaaaaaaaaaaaaaaaaaaaaaaaaaaaaaaaaaaaaaaaagaauu

SEQ ID NO: 21182 - RNA, 2021 nt, Artificial Sequence
  mRNA product Design a-2 (hSL-A64-N5) comprising derived and/or modified sequence from LASV(LASV221-NIG-2010;Clade II)__AIT17625__SP-IgE_NP(2-569) (opt4)
aggagaguccgcucagccagguugcagaagcggcuuagcguguguccuaaucuucucucugcguguagguaggccugugccgcaaacaagcuuaccauggacuggaccuggauccuguuccugguggccgccgccaccagagugcacagcagcgccagcaaggaggugaagagcuuccuguggacccagagccugagaagagagcugagcggcuacugcagcagcaucaagcugcagguggugaaggacgcccaggcccugcugcacggccuggacuucagcgaggugagcaacgugcagagacugaugagaaagcagagaagagacgacagcgaccugaagagacugagagaccugaaccaggccgugaacaaccugguggagcugaagagcacccagcagaagagcauccugagagugggcacccugaccagcgacgaccugcugacccuggccgccgaccuggagaagcugaagagcaaggugaucagaaccgagagaccccugagcagcggcguguacaugggcaaccugagcacccagcagcuggagcagagaagagcccugcugaacaugaucggcauggugggcggcgcccagggcacccagcccggcagagacggcguggugagagugugggacgugaagaaccccgaccugcugaacaaccaguucggcaccaugcccagccugacccuggccugccugaccaagcagggccagguggaccugaacgacgccgugcuggcccugaccgaccugggccugaucuacaccgccaaguaccccaacagcagcgaccuggacagacugagccagagccaccccauccugaacaugguggacaccaagaagagcagccugaacaucagcggcuacaacuucagccugggcgccgccgugaaggccggcgccugcaugcuggacggcggcaacaugcuggagaccaucaaggugaccccccagaccguggacggcauccugaagagcauccugaaggugaagagaagccugggcauguucgugagcgacacccccggcgagagaaaccccuacgagaacauccuguacaagaucugccugagcggcgacggcuggcccuacaucgccagcagaaccagcaucgugggcagagccugggagaacaccaccguggaccuggagagcgacggcaagccccagaaggugggcaccgccggcagcaacaagagccugcagagcgccggcuuccccaccggccugaccuacagccagcugaugacccugaaggacagcaugaugcagcuggaccccagcgccaagaccuggaucgacaucgagggcagacccgaggaccccguggagaucgcccuguaccagcccaugagcggcugcuacauccacuucuucagagagcccaccgaccugaagcaguucaagcaggacgccaaguacagccacggcaucgacguggccgaccuguuccccgcccagcccggccugaccagcgccgugaucgaggcccugcccagaaacauggugcugaccugccagggcagcgacgacaucaagagacugcuggacagccagggcagaagagacaucaagcugaucgacaucgcccugagcaaggccgacagcagaaaguucgagaacgccgugugggaccagugcaaggaccugugccacaugcacaccggcguggugguggagaagaagaagagaggcggcaaggaggagaucaccccccacugcgcccugauggacugcaucauguacgacgccgccgugagcggcggccugaacauccccgugcugagagccgugcugcccagagacaugguguucagaaccagcagccccaagguggugcugugaggacuagucccuguucccagagcccacuuuuuuuucuuuuuuugaaauaaaauagccugucuuucagaucucaaaggcucuuuucagagccaccaaaaaaaaaaaaaaaaaaaaaaaaaaaaaaaaaaaaaaaaaaaaaaaaaaaaaaaaaaaaaaaaagaauu

SEQ ID NO: 21183 - RNA, 2021 nt, Artificial Sequence
  mRNA product Design a-2 (hSL-A64-N5) comprising derived and/or modified sequence from LASV(LASV237-NIG-2010;Clade II)__AIT17639__SP-IgE_NP(2-569) (opt4)
aggagaguccgcucagccagguugcagaagcggcuuagcguguguccuaaucuucucucugcguguagguaggccugugccgcaaacaagcuuaccauggacuggaccuggauccuguuccugguggccgccgccaccagagugcacagcagcgccagcaaggaggugaagagcuuccuguggacccagagccugagaagagagcugagcggcuacugcagcaacaucaagcugcagguggugaaggacgcccaggcccugcugcacggccuggacuucagcgaggugagcaacgugcagagacugaugagaaagcagaagagagacgacagcgaccugaagagacugagagaccugaaccaggccgugaacaaccugguggagcugaagagcacccagcagaagagcauccugagagugggcacccugaccagcgacgaccugcugacccuggccgccgaccuggagaagcugaagagcaaggugaucagaaccgagagaccccugagcagcggcguguacaugggcaaccugagcacccagcagcuggagcagagaagagcccugcugaacaugaucggcauggugggcggcgcccagggcacccagcccggcagagacggcguggugagagugugggacgugaagaaccccgaccugcugaacaaccaguucggcaccaugcccagccugacccuggccugccugaccaagcagggccagguggaccugaacgacgccgugcuggcccugaccgaccugggccugaucuacaccgccaaguaccccaacagcagcgaccuggacagacugagccagagccaccccauccugaacaugguggacaucaagaagagcagccugaacaucagcggcuacaacuucagccugggcgccgccgugaaggccggcgccugcaugcuggacggcggcaacaugcuggagaccaucaaggugaccccccagaccauggacggcauccugaagagcauccugaaggugaagagaagccugggcauguucgugagcgacacccccggcgagagaaaccccuacgagaacauccuguacaagaucugccugagcggcgacggcuggcccuacaucgccagcagaaccagcaucgugggcagagccugggagaacaccaccguggaccuggagagcgacggcaagccccagaaggugggcagcgccggcagcaacaagagccugcagagcgccggcuuccccaccggccugaccuacagccagcugaugacccugaaggacagcaugaugcagcuggaccccagcgccaagaccuggaucgacaucgagggcagacccgaggaccccguggagaucgcccuguaccagcccaugagcggcugcuacauccacuucuucagagagcccaccgaccugaagcaguucaagcaggacgccaaguacagccacggcaucgacguggccgaccuguuccccgcccagcccggccugaccagcgccgugaucgaggcccugcccagaaacauggugcugaccugccagggcagcgacgacaucaagagacugcuggacagccagggcagaagagacaucaagcugaucgacaucgcccugagcaaggccgacagcagaagauucgagaacgccgugugggaccagugcaaggaccugugccacaugcacaccggcguggugguggagaagaagaagagaggcggcaaggaggagaucaccccccacugcgcccugauggacugcaucauguacgacgccgccgugagcggcggccugaacauccccgugcugagagccgugcugcccagagacaugguguucagaaccagcagccccaagguggugcugugaggacuagucccuguucccagagcccacuuuuuuuucuuuuuuugaaauaaaauagccugucuuucagaucucaaaggcucuuuucagagccaccaaaaaaaaaaaaaaaaaaaaaaaaaaaaaaaaaaaaaaaaaaaaaaaaaaaaaaaaaaaaaaaaagaauu

SEQ ID NO: 21184 - RNA, 2021 nt, Artificial Sequence
  mRNA product Design a-2 (hSL-A64-N5) comprising derived and/or modified sequence from LASV(LASV253-NIG-2011;Clade II)__AIT17671__SP-IgE_NP(2-569) (opt4)
aggagaguccgcucagccagguugcagaagcggcuuagcguguguccuaaucuucucucugcguguagguaggccugugccgcaaacaagcuuaccauggacuggaccuggauccuguuccugguggccgccgccaccagagugcacagcagcgccagcaaggaggugaagagcuuccuguggacccagagccugagaagagagcugagcggcuacugcagcagcaucaagcugcagguggugaaggacgcccaggcccugcugcacggccuggacuucagcgaggugagcaacgugcagagacugaugagaaagcagaagagagacgacagcgaccugaagagacugagagaccugaaccaggccgugaacaaccugguggagcugaagagcacccagcagaagagcgugcugagagugggcacccugaccagcgacgaccugcugacccuggccgccgaccuggagaagcugaagagcaaggugaucagaaccgagagaccccugagcagcggcguguacaugggcaaccugagcacccagcagcuggagcagagaagagcccugcugaacaugaucggcauggugggcggcgcccagggcacccagcccggcagagacggcguggugagagugugggacgugaagaaccccgaccugcugaacaaccaguucggcaccaugcccagccugacccuggccugccugaccaagcagggccagguggaccugaacgacguggugcuggcccugaccgaccugggccugaucuacaccgccaaguaccccaacagcagcgaccuggacagacugagccagagccaccccauccugaacaugguggacaccaagaagagcagccugaacaucagcggcuacaacuucagccugggcgccgccgugaaggccggcgccugcaugcuggacggcggcaacaugcuggagaccaucaaggugaccccccagaccauggacggcauccugaagagcauccugaaggugaagaagagccugggcauguucgugagcgacacccccggcgagagaaaccccuacgagaacauccuguacaagaucugccugagcggcgacggcuggcccuacaucgccagcagaaccagcaucgugggcagagccugggagaacaccaccguggaccuggagagcgacggcaagccccagaaggugggcaccgccggcagcaacaagagccugcagagcgccggcuuccccaccggccugaccuacagccagcugaugacccugaaggacagcaugaugcagcuggaccccagcgccaagaccuggaucgacaucgagggcagacccgaggaccccguggagaucgcccuguaccagcccaugagcggcugcuacauccacuucuucagagagcccaccgaccugaagcaguucaagcaggacgccaaguacagccacggcaucgacgugaccgaccuguuccccgcccagcccggccugaccagcgccgugaucgaggcccugcccagaaacauggugcugaccugccagggcagcgacgacaucaagagacugcuggacagccagggcagaagagacaucaagcugaucgacaucgcccugagcaaggccgacagcagaagauucgagaacgccgugugggaccagugcaaggaccugugccacaugcacaccggcguggugguggagaagaagaagagaggcggcaaggaggagaucaccccccacugcgcccugauggacugcaucauguacgacgccgccgugagcggcggccugaacauccccgugcugagagccgugcugcccagagacaugguguucagaaccagcagccccaagguggugcugugaggacuagucccuguucccagagcccacuuuuuuuucuuuuuuugaaauaaaauagccugucuuucagaucucaaaggcucuuuucagagccaccaaaaaaaaaaaaaaaaaaaaaaaaaaaaaaaaaaaaaaaaaaaaaaaaaaaaaaaaaaaaaaaaagaauu

SEQ ID NO: 21185 - RNA, 2021 nt, Artificial Sequence
  mRNA product Design a-2 (hSL-A64-N5) comprising derived and/or modified sequence from LASV(LASV254-NIG-2011;Clade II)__AIT17675__SP-IgE_NP(2-569) (opt4)
aggagaguccgcucagccagguugcagaagcggcuuagcguguguccuaaucuucucucugcguguagguaggccugugccgcaaacaagcuuaccauggacuggaccuggauccuguuccugguggccgccgccaccagagugcacagcagcgccagcaaggaggugaagagcuuccuguggacccagagccugagaagagagcugagcggcuacugcagcagcaucaagcugcagguggugaaggacgcccaggcccugcugcacggccuggacuucagcgaggugagcaacgugcagagacugaugagaaagcagaagagagacgacagcgaccugaagagacugagagaccugaaccaggccgugaacaaccugguggagcugaagagcacccagcagaagagcgugcugagagugggcacccugaccagcgacgaccugcugacccuggccgccgaccuggagaagcugaagagcaaggugaucagaaccgagagaccccugagcagcggcguguacaugggcaaccugagcacccagcagcuggagcagagaagagcccugcugaacaugaucggcauggugggcggcgcccagggcacccagcccggcagagacggcguggugagagugugggacgugaagaaccccgaccugcugaacaaccaguucggcaccaugcccagccugacccuggccugccugaccaagcagggccagguggaccugaacgacgccgugcuggcccugaccgaccugggccugaucuacaccgccaaguaccccaacagcagcgaccuggacagacugagccagagccaccccauccugaacaugguggacaccaagaagagcagccugaacaucagcggcuacaacuucagccugggcgccgccgugaaggccggcgccugcaugcuggacggcggcaacaugcuggagaccaucaaggugaccccccagaccauggacggcauccugaagagcauccugaaggugaagaagagccugggcauguucgugagcgacacccccggcgagagaaaccccuacgagaacauccuguacaagaucugccugagcggcgacggcuggcccuacaucgccagcagaaccagcaucgugggcagagccugggagaacaccaucguggaccuggagagcgacggcaagccccagaaggugggcaccgccggcagcaacaagagccugcagagcgccggcuuccccaccggccugaccuacagccagcugaugacccugaaggacagcaugaugcagcuggaccccagcgccaagaccuggaucgacaucgagggcagacccgaggaccccguggagaucgcccuguaccagcccaugagcggcugcuacauccacuucuucagagagcccaccgaccugaagcaguucaagcaggacgccaaguacagccacggcaucgacguggccgaccuguuccccgcccagcccggccugaccagcgccgugaucgaggcccugcccagaaacauggugcugaccugccagggcagcgacgacaucaagagacugcuggacagccagggcagaagagacaucaagcugaucgacaucgcccugagcaaggccgacagcagaagauucgagaacgccgugugggaccagugcaaggaccugugccacaugcacaccggcguggugguggagaagaagaagagaggcggcaaggaggagaucaccccccacugcgcccugauggacugcaucauguacgacgccgccgugagcggcggccugaacauccccgugcugagagccgugcugcccagagacaugguguucagaaccagcagccccaagguggugcugugaggacuagucccuguucccagagcccacuuuuuuuucuuuuuuugaaauaaaauagccugucuuucagaucucaaaggcucuuuucagagccaccaaaaaaaaaaaaaaaaaaaaaaaaaaaaaaaaaaaaaaaaaaaaaaaaaaaaaaaaaaaaaaaaagaauu

SEQ ID NO: 21186 - RNA, 2021 nt, Artificial Sequence
  mRNA product Design a-2 (hSL-A64-N5) comprising derived and/or modified sequence from LASV(Nig08-04;Clade II)__ADU56611__SP-IgE_NP(2-569) (opt4)
aggagaguccgcucagccagguugcagaagcggcuuagcguguguccuaaucuucucucugcguguagguaggccugugccgcaaacaagcuuaccauggacuggaccuggauccuguuccugguggccgccgccaccagagugcacagcagcgccagcaaggaggugaagagcuuccuguggacccagagccugagaagagagcugagcggcuacugcagcaacaucaagcugcagguggugaaggacgcccaggcccugcugcacggccuggacuucagcgaggugagcaacgugcagagacugaugagaaagcagaagagagacgacggcgaccugaagagacugagagaccugaaccaggccgugaacaaccugguggagcugaagagcacccagcagaagagcgugcugagagugggcacccugaccagcgacgaccugcugacccuggccgccgaccuggagaagcugaagagcaaggugaucagaaccgagagaccccugagcagcggcguguacaugggcaaccugagcacccagcagcuggagcagagaaaggcccugcugagcaugaucggcauggugggcggcgcccagggcacccagcccggcagagacggcguggugagagugugggacgugaagaaccccgaccugcugaacaaccaguucggcaccaugcccagccugacccuggccugccugaccaagcagggccagguggaccugaacgacgccgugcuggcccugaccgaccugggccugaucuacaccgccaaguaccccaacagcagcgaccuggacagacugagccagagccaccccauccugaacaugguggacaccaagaagagcagccugaacaucagcggcuacaacuucagccugggcgccgccgugaaggccggcgccugcaugcuggacggcggcaacaugcuggagaccaucaaggugaccccccagaccauggacggcauccugaagagcauccugaaggugaagagaagccugggcauguucgugagcgacacccccggcgagagaaaccccuacgagaacauccuguacaagaucugccugagcggcgacggcuggcccuacaucgccagcagaaccagcaucgugggcagagccugggagaacaccaccguggaccuggagagcgacggcaagccccagaaggugggcaccgccggcagcaacaagagccugcagagcgccggcuuccccaccggccugaccuacagccagcugaugacccugaaggacagcaugaugcagcuggaccccagcgccaagaccuggaucgacaucgagggcagacccgaggaccccguggagaucgcccuguaccagcccaugagcggcugcuacauccacuucuucagagagcccaccgaccugaagcaguucaagcaggacgccaaguacagccacggcaucgacgugaccgaccuguucagcgcccagcccggccugaccagcgccgugaucgaggcccugcccagaaacauggugcugaccugccagggcagcgacgacaucaagaagcugcuggacagccagggcagaagagacaucaagcugaucgacaucagccugaacaaggccgacagcagaagauucgagaacgccgugugggaccagugcaaggaccugugccacaugcacaccggcguggugguggagaagaagaagagaggcggcaaggaggagaucaccccccacugcgcccugauggacugcaucauguucgacgccgccgugagcggcggccugaacauccccauccugagagccgugcugcccagagacaugguguucagaaccagcagccccaagguggugcugugaggacuagucccuguucccagagcccacuuuuuuuucuuuuuuugaaauaaaauagccugucuuucagaucucaaaggcucuuuucagagccaccaaaaaaaaaaaaaaaaaaaaaaaaaaaaaaaaaaaaaaaaaaaaaaaaaaaaaaaaaaaaaaaaagaauu

SEQ ID NO: 21187 - RNA, 2024 nt, Artificial Sequence
  mRNA product Design a-2 (hSL-A64-N5) comprising derived and/or modified sequence from LASV(GA391;Clade III)__AAA46284__SP-IgE_NP(2-570) (opt4)
aggagaguccgcucagccagguugcagaagcggcuuagcguguguccuaaucuucucucugcguguagguaggccugugccgcaaacaagcuuaccauggacuggaccuggauccuguuccugguggccgccgccaccagagugcacagcagcgccagcaaggaggugagaagcugccuguggacccagagccugagaagagagcugagcggcuacugcagcaacaucaagcugcagguggugaaggacgcccaggcccugcugcacggccuggacuucagcgaggugagcaacgugcagagacugaugagaaagcagaagagagacgacggcgaccugaagagacugagagaccugaaccaggccgugaacaaccugguggagcugaagagcacccagcagaagagcgugcugagagugggcacccugagcagcgacgaccugcugauccuggccgccgaccuggagaagcugaagagcaaggugaccagaaccgagagaccccugagcagcggcguguacaugggcaaccugagcagccagcagcuggaccagagaagagcccugcugaacaugaucggcaugaccggcgugagcggcggcggcaagggcgccagcaacggcaucgugagagugugggacgugaagaacgccgagcugcugaacaaccaguucggcaccaugcccagccugacccuggccugccugaccaagcagggccagguggaccugaacgacgccgugcaggcccugaccgaccugggccugaucuacaccgccaaguaccccaacagcagcgaccuggacagacugagccagagccaccccauccugaacaugaucgacaccaagaagagcagccugaacaucagcggcuacaacuucagccugggcgccgccgugaaggccggcgccugcaugcuggacggcggcaacaugcuggagaccaucaaggugagcccccagaccauggacggcauccugaagagcauccugaaggugaagaagagccugggcauguucgugagcgacacccccggcgagagaaaccccuacgagaacauccuguacaagaucugccugagcggcgacggcuggagcuacaucgccagcagaaccagcaucgugggcagagccugggagaacaccgugguggaccuggagcaggacaacaagccccagaagaucggcaacggcggcagcaacaagagccugcagagcgccggcuucgccgccggccugaucuacagccagcugaugacccugaaggacuucaagugcuucaaccugauccccaacgccaagaccuggauggacaucgagggcagacccgaggaccccguggagaucgcccuguaccagcccagcagcggcugcuacgugcacuucuucagagagcccaccgaccugaagcaguucaagcaggacgccaaguacagccacggcagagacgugaccgaccuguucgccgcccagcccggccugaccagcgccgugaucgaggcccugcccagaaacauggugaucaccugccagggcagcgaggacaucagaaagcugcuggagagccagggcagaagagacaucaagcugaucgacaucacccugagcaaggccgacagcagaaaguucgagaacgccgugugggaccaguucaaggaccugugccacaugcacaccggcguggugguggagaagaagaagagaggcggcaaggaggagaucaccccccacugcgcccugauggacugcaucauguucgacgccgccgugagcggcggccuggacgccaaggugcugagaguggugcugcccagagacaugguguucagaaccagcacccccaagguggugcugugaggacuagucccuguucccagagcccacuuuuuuuucuuuuuuugaaauaaaauagccugucuuucagaucucaaaggcucuuuucagagccaccaaaaaaaaaaaaaaaaaaaaaaaaaaaaaaaaaaaaaaaaaaaaaaaaaaaaaaaaaaaaaaaaagaauu

SEQ ID NO: 21188 - RNA, 2021 nt, Artificial Sequence
  mRNA product Design a-2 (hSL-A64-N5) comprising derived and/or modified sequence from LASV(Nig08-A19;Clade III)__ADU56619__SP-IgE_NP(2-569) (opt4)
aggagaguccgcucagccagguugcagaagcggcuuagcguguguccuaaucuucucucugcguguagguaggccugugccgcaaacaagcuuaccauggacuggaccuggauccuguuccugguggccgccgccaccagagugcacagcagcgccagcaaggaggugaagagcuuccuguggacccagagccugagaagagagcugagcggcuacugcagcaacaucaagcugcagguggugaaggacgcccaggcccugcugcacggccuggacuucagcgaggugagcaacgugcagagacugaugagaaagcagaagagagacgacggcgaccugaagagacugagagaccugaaccaggccgugaacaaccugguggagcugaagagcacccagcagaagagcgugcugagagugggcacccugagcagcgacgaccugcuggugcuggccgccgaccuggagaagcugaagagcaagguggugagaaccgagagaccccugagcagcggcaucuacaugggcaaccugagcagccagcagcuggaccagagaaaggcccugcugaacaugaucggcaugaccggcggcaacggcggcagaaacaccaccagcgacggcaucgugagagugugggacgugaagaacgccgagcugcugaacaaccaguucggcaccaugcccagccugacccuggccugccugaccaagcagggccagguggaccugaacgacgccgugcaggcccugaccgaccugggccugaucuacaccgccaaguaccccaacagcagcgaccuggacagacuggcccagagccaccccauccugaacaugaucgacaccaagaagagcagccugaacaucagcggcuacaacuucagccugggcgccgccgugaaggccggcgccugcaugcuggacggcggcaacaugcuggagaccaucaaggugagcccccagaccauggacggcauccugaagagcauccugaaggugaagagaagccugggcauguucaucagcgacacccccggcgagagaaaccccuacgagaacauccuguacaagaucugccugagcggcgacggcuggcccuacaucgccagcagaaccagcaucgugggcagagccugggagaacaccgugguggaccuggagagcgacaacaagccccagaagaccggcaacggcggcagcaacaagagccugcagagcgccggcuucgccgccggccugaccuacagccagcugaugacccugaaggacagcaugcugcagcuggaccccaacgccaagaccuggauggacaucgagggcagacccgaggaccccguggagaucgcccuguaccagcccagcagcggcugcuacauccacuucuucagagagcccaccgaccugaagcaguucaagcaggacgccaaguacagccacggcaucgacgugaccgaccuguucgccgcccagcccggccugaccagcgccgugaucgaggcccugcccagaaacauggugaucaccugccagggcagcgaggacaucagaaagcugcuggagagccagggcagaagagacaucaagcugaucgacaucagccugagcaagguggacagcagaaaguucgagaacgccgugugggaccaguucaaggaccugugccacaugcacaccggcaucgugguggagaagaagaagagaggcggcaaggaggagaucaccccccacugcgcccugauggacugcaucauguucgacgccgccgugagcggcggcguggacgccaaggugcugagagccgugcugcccagagacaugguguucagaaccagcacccccaagguggugcugugaggacuagucccuguucccagagcccacuuuuuuuucuuuuuuugaaauaaaauagccugucuuucagaucucaaaggcucuuuucagagccaccaaaaaaaaaaaaaaaaaaaaaaaaaaaaaaaaaaaaaaaaaaaaaaaaaaaaaaaaaaaaaaaaagaauu

SEQ ID NO: 21189 - RNA, 2021 nt, Artificial Sequence
  mRNA product Design a-2 (hSL-A64-N5) comprising derived and/or modified sequence from LASV(G1180-SLE-2010;Clade IV)__AIT17169__SP-IgE_NP(2-569) (opt4)
aggagaguccgcucagccagguugcagaagcggcuuagcguguguccuaaucuucucucugcguguagguaggccugugccgcaaacaagcuuaccauggacuggaccuggauccuguuccugguggccgccgccaccagagugcacagcagcgccagcaaggagaucaagagcuuccuguggacccagagccugagaagagagcugagcggcuacugcagcaacaucaagcugcagguggugaaggacgcccaggcccugcugcacggccuggacuucagcgaggugagcaacgugcagagacugaugagaaaggagagaagagacgacaacgaccugaagagacugagagaccugaaccaggccgugaacaaccugguggagcugaagagcacccagcagaagagcauccugagagugggcacccugaccagcgacgaccugcugauccuggccgccgaccuggagaagcugaagagcaaggugaucagaaccgagagaccccugagcgccggcguguacaugggcaaccugagcagccagcagcuggaccagagaagagcccugcugagcaugaucggcaugagcagcggcaaccagagagcccaggccggcagagacggcguggugagagugugggacgugaagaacguggagcugcugaacaaccaguucggcaccaugcccagccugacccuggccugccugaccaagcagggccagguggaccugaacgacgccgugcaggcccugaccgaccugggccugaucuacaccgccaaguaccccaacaccagcgaccuggacagacugacccagagccaccccauccugaacaugaucgacaccaagaagagcagccugaacaucagcggcuacaacuucagccugggcgccgccgugaaggccggcgccugcaugcuggacggcggcaacaugcuggagaccaucaaggugagcccccagaccauggacggcauccugaagagcauccugaaggugaagaaggcccugggcauguucaucagcgacacccccggcgagagaaaccccuacgagaacauccuguacaagaucugccugagcggcgacggcuggcccuacaucgccagcagaaccagcaucaccggcagagccugggagaacaccgugguggaccuggagagcgacggcaagccccagaaggccggcagcaacaacagcaacaagagccugcagagcgugggcuucaccgccggccugaccuacagccagcugaugacccugaaggacgccaugcugcagcuggaccccaacgccaagaccuggauggacaucgagggcagacccgaggaccccguggagaucgcccuguaccagcccagcagcggcugcuacauccacuucuucagagagcccaccgaccugaagcaguucaagcaggacgccaaguacagccacggcaucgacgugaccgaccuguucgccgcccagcccggccugaccagcgccgugaucgacgcccugcccagaaacauggugaucaccugccagggcagcgacgacaucagaaagcugcuggagagccagggcagaaaggacaucaagcugaucgacaucgcccugagcaagaccgacagcagaaaguacgagaacgccgugugggaccaguacaaggaccugugccacaugcacaccggcguggugguggagaagaagaagagaggcggcaaggaggagaucaccccccacugcgcccugauggacugcaucauguucgacgccgccgugagcggcggccugaacaccagcgugcugagagccgugcugcccagagacaugguguucagaaccagcacccccagaguggugcugugaggacuagucccuguucccagagcccacuuuuuuuucuuuuuuugaaauaaaauagccugucuuucagaucucaaaggcucuuuucagagccaccaaaaaaaaaaaaaaaaaaaaaaaaaaaaaaaaaaaaaaaaaaaaaaaaaaaaaaaaaaaaaaaaagaauu

SEQ ID NO: 21190 - RNA, 2021 nt, Artificial Sequence
  mRNA product Design a-2 (hSL-A64-N5) comprising derived and/or modified sequence from LASV(G1442-SLE-2011;Clade IV)__AIT17181__SP-IgE_NP(2-569) (opt4)
aggagaguccgcucagccagguugcagaagcggcuuagcguguguccuaaucuucucucugcguguagguaggccugugccgcaaacaagcuuaccauggacuggaccuggauccuguuccugguggccgccgccaccagagugcacagcagcgccagcaaggaggugaagagcuuccuguggacccagagccugagaagagagcugagcggcuacugcagcaacaucaagcugcagguggugaaggacgcccaggcccugcugcacggccuggacuucagcgaggugagcaacgugcagagacugaugagaaagcagagaagagacgacaacgaccugaagagacugagagaccugaaccaggccgugaacaaccugguggagcugaagagcacccagcagaagagcgugcugagagugggcacccugaccagcgacgaccugcuggugcuggccgccgaccuggagaagcugaagagcaaggugaucagaaccgagagaccccugagcgccggcguguacaugggcaaccugagcagccagcagcuggaccagagaagagcccugcugaacaugaucggcaugagcggcggcauccagggcaccagaaccggcagagacggcguggugagagugugggacgugaagaacgccgaccugcugaacaaccaguucggcaccaugcccagccugacccuggccugccugaccaagcagggccagguggaccugaacgacguggugcaggcccugaccgaccugggccugaucuacaccgccaaguaccccaacgccagcgaccuggacagacugacccagagccaccccauccugaacaugaucgacaccaagaagagcagccugaacaucagcggcuacaacuucagccugggcgccgccgugaaggccggcgccugcaugcuggacggcggcaacaugcuggagaccaucaaggugagcccccagaccauggacggcauccugaagagcauccugaaggugaagaagacccugggcauguucaucagcgacacccccggcgagagaaaccccuacgagaacauccuguacaagaucugccugagcggcgacggcuggcccuacaucgccagcagaaccagcaucaccggcagagccugggagaacaccgugguggaccuggagagcgacggcaagccccagaaggccggcagcaacaacagcaacaagagccugcagagcgccggcuucgccgccggccugaccuacagccagcugaugacccugaaggacgccaugcugcagcuggaccccaacgccaagaccuggauggacaucgagggcagacccgaggaccccguggagaucgcccuguaccagcccagcagcggcugcuacauccacuucuucagagagcccaccgaccugaagcaguucaagcaggacgccaaguacagccacggcaucgacgugaccgaccuguucgccgcccagcccggccugaccagcgccgugaucgaggcccugcccagaaacauggugaucaccugccagggcagcgacgacaucaagaagcugcuggagagccagggcagaaaggacaucaagcugaucgacaucgcccugagcaagaccgacagcagaaaguacgagaacgccgugugggaccaguacaaggaccugugccacaugcacaccggcguggugguggagaagaagaagagaggcggcaaggaggagaucaccccccacugcgcccugauggacugcaucauguucgacgccgccgugagcggcggccugaacacccuggugcugagagccgugcugcccagagacaugguguucagaaccagcacccccagaguggugcugugaggacuagucccuguucccagagcccacuuuuuuuucuuuuuuugaaauaaaauagccugucuuucagaucucaaaggcucuuuucagagccaccaaaaaaaaaaaaaaaaaaaaaaaaaaaaaaaaaaaaaaaaaaaaaaaaaaaaaaaaaaaaaaaaagaauu

SEQ ID NO: 21191 - RNA, 2021 nt, Artificial Sequence
  mRNA product Design a-2 (hSL-A64-N5) comprising derived and/or modified sequence from LASV(G3010-SLE-2013;Clade IV)__AIT17345__SP-IgE_NP(2-569) (opt4)
aggagaguccgcucagccagguugcagaagcggcuuagcguguguccuaaucuucucucugcguguagguaggccugugccgcaaacaagcuuaccauggacuggaccuggauccuguuccugguggccgccgccaccagagugcacagcagcgccagcaaggagaucaagagcuuccuguggacccagagccugagaagagagcugagcggcuacugcagcaacaucaagcugcagguggugaaggacgcccaggcccugcugcacggccuggacuucagcgaggugagcaacgugcagagacugaugagaaaggagagaagagacgacaacgaccugaagagacugagagaccugaaccaggccgugaacaaccugguggagcugaagagcacccagcagaagagcauccugagagugggcacccugaccagcgacgaccugcugauccuggccgccgaccuggagaagcugaagagcaaggugaccagaaccgagagaccccugagcgccggcguguacaugggcaaccugagcagccagcagcuggaccagagaagagcccugcugagcaugaucggcaugagcagcggcgugcagggcgccagagccggcagagacggcguggugagagugugggacgugaagaacgccgagcugcugaacaaccaguucggcaccaugcccagccugacccuggccugccugaccaagcagggccagguggaccugaacgacguggugcaggcccugaccgaccugggccugaucuacaccgccaaguaccccaacaccagcgaccuggacagacugacccagagccaccccauccugaacaugaucgacaccaagaagagcagccugaacaucagcggcuacaacuucagccugggcgccgccgugaaggccggcgccugcaugcuggacggcggcaacaugcuggagaccaucaaggugagcccccagaccauggacggcauccugaagagcauccugaaggugaagaaggcccugggcauguucaucagcgagacccccggcgagagaaaccccuacgagaacauccuguacaagaucugccugagcggcgacggcuggcccuacaucgccagcagaaccagcaucaccggcagagccugggagaacaccgugguggaccuggagagcgacggcaagccccagaaggccggcagcaacaacagcaacaagagccugcagagcgccggcuucaccgccggccugaccuacagccagcugaugacccugaaggacgccaugcugcagcuggaccccaacgccaagaccuggauggacaucgagggcagacccgaggaccccguggagguggcccuguaccagcccagcagcggcugcuacauccacuucuucagagagcccaccgaccugaagcaguucaagcaggacgccaaguacagccacggcaucgacgugaccgaccuguucgccgcccagcccggccugaccagcgccgugaucgacgcccugcccagaaacauggugaucaccugccagggcagcgacgacaucaagaagcugcuggagagccagggcagaaaggacaucaagcugaucgacaucgcccugagcaagaccgacagcagaaaguacgagaacgccgugugggaccaguacaaggaccugugccacaugcacaccggcguggugguggagaagaagaagagaggcggcaaggaggagaucaccccccacugcgcccugauggacugcaucauguucgacgccgccgugagcggcggccugaacaccagcgugcugagagccgugcugcccagagacaugguguucagaaccagcacccccagaguggugcugugaggacuagucccuguucccagagcccacuuuuuuuucuuuuuuugaaauaaaauagccugucuuucagaucucaaaggcucuuuucagagccaccaaaaaaaaaaaaaaaaaaaaaaaaaaaaaaaaaaaaaaaaaaaaaaaaaaaaaaaaaaaaaaaaagaauu

SEQ ID NO: 21192 - RNA, 2021 nt, Artificial Sequence
  mRNA product Design a-2 (hSL-A64-N5) comprising derived and/or modified sequence from LASV(G502-SLE-2009;Clade IV)__AIT17127__SP-IgE_NP(2-569) (opt4)
aggagaguccgcucagccagguugcagaagcggcuuagcguguguccuaaucuucucucugcguguagguaggccugugccgcaaacaagcuuaccauggacuggaccuggauccuguuccugguggccgccgccaccagagugcacagcagcgccagcaaggagaucaagagcuuccuguggacccagagccugagaagagagcugagcggcuacugcagcaacaucaagcugcagguggugaaggacgcccaggcccugcugcacggccuggacuucagcgaggugagcaacgugcagagacugaugagaaaggagagaagagacgacaacgaccugaagagacugagagaccugaaccaggccgugaacaaccugguggagcugaagagcacccagcagaagagcauccugagagugggcacccugaccagcgacgaccugcugauccuggccgccgaccuggagaagcugaagagcaaggugaucagaaccgagagaccccugagcgccggcguguacaugggcaaccugagcagccagcagcuggaccagagaagagcccugcugagcaugaucggcaugagcggcggcaaccagggcgugagagccggcaaggacggcguggugagagugugggacgugaagaacgccgagcugcugaacaaccaguucggcaccaugcccagccugacccuggccugccugaccaagcagggccagguggaccugaacgacgccgugcaggcccugaccgaccugggccugaucuacaccgccaaguaccccaacaccagcgaccuggacagacugacccagagccaccccauccugaacaugaucgacaccaagaagagcagccugaacaucagcggcuacaacuucagccugggcgccgccgugaaggccggcgccugcaugcuggacggcggcaacaugcuggagaccaucaaggugagcccccagaccauggacggcauccugaagagcauccugaaggugaagaaggcccugggcauguucaucagcgacacccccggcgagagaaaccccuacgagaacauccuguacaagaucugccugagcggcgacggcuggcccuacaucgccagcagaaccagcaucaccggcagagccugggagaacaccgugguggaccuggagagcgacggcaagccccagaaggccggcagcaacaacagcaacaagagccugcagagcgccggcuucaccgccggccugaccuacagccagcugaugacccugaaggacgccaugcugcagcuggaccccaacaccaagaccuggauggacaucgagggcagacccgaggaccccguggagaucgcccuguaccagcccagcagcggcugcuacauccacuucuucagagagcccaccgaccugaagcaguucaagcaggacgccaaguacagccacggcaucgacgugaccgaccuguucgccgcccagcccggccugaccagcgccgugaucgacgcccugcccagaaacauggugaucaccugccagggcagcgacgacaucagaaagcugcuggagagccagggcagaaaggacaucaagcugaucgacaucgcccugaacaagaccgacagcagaaaguacgagaacgccgugugggaccaguacaaggaccugugccacaugcacaccggcguggugguggagaagaagaagagaggcggcaaggaggagaucaccccccacugcgcccugauggacugcaucauguucgacgccgccgugagcggcggccugaacaccagcgugcugagagccgugcugcccagagacaugguguucagaaccagcacccccagaguggugcugugaggacuagucccuguucccagagcccacuuuuuuuucuuuuuuugaaauaaaauagccugucuuucagaucucaaaggcucuuuucagagccaccaaaaaaaaaaaaaaaaaaaaaaaaaaaaaaaaaaaaaaaaaaaaaaaaaaaaaaaaaaaaaaaaagaauu

SEQ ID NO: 21193 - RNA, 2021 nt, Artificial Sequence
  mRNA product Design a-2 (hSL-A64-N5) comprising derived and/or modified sequence from LASV(G733-SLE-2010;Clade IV)__AIT17155__SP-IgE_NP(2-569) (opt4)
aggagaguccgcucagccagguugcagaagcggcuuagcguguguccuaaucuucucucugcguguagguaggccugugccgcaaacaagcuuaccauggacuggaccuggauccuguuccugguggccgccgccaccagagugcacagcagcgccagcaaggagaucaagagcuuccuguggacccagagccugagaagagagcugagcggcuacugcagcaacaucaagcugcagguggugaaggacgcccaggcccugcugcacggccuggacuucagcgaggugagcaacgugcagagacugaugagaaaggagagaagagacgacaacgaccugaagagacugagagaccugaaccaggccgugaacaaccugguggagcugaagagcacccagcagaagagcgugcugagagugggcacccugaccagcgacgagcugcuggugcuggccgccgaccuggagaagcugaagagcaaggugaucagaaccgagagaccccugagcgccggcguguacaugggcaaccugagcagccagcagcuggaccagagaagagcccugcugagcaugaucggcaugagcggcggcaaccagggcgccagaaccggcagagacggcguggugagagugugggacgugaagaacgccgagcugcugaacaaccaguucggcaccaugcccagccugacccuggccugccugaccaagcagggccagguggaccugaacgacgccgugcaggcccugaccgaccugggccugaucuacaccgccaaguaccccaacaccagcgaccuggacagacugacccagagccaccccauccugaacaugaucgacaccaagaagagcagccugaacaucagcggcuacaacuucagccugggcgccgccgugaaggccggcgccugcaugcuggacggcggcaacaugcuggagaccaucaaggugagcccccagaccauggacggcauccugaagagcauccugaaggugaagaaggcccugggcauguucaucagcgacacccccggcgagagaaaccccuacgagaacauccuguacaagaucugccugagcggcgacggcuggcccuacaucgccagcagaaccagcaucaccggcagagccugggagaacaccgugguggaccuggagagcgacggcaagccccagaaggccggcagcaacaacagcaacaagagccugcagagcgccggcuucaccgccggccugaccuacagccagcugaugacccugaaggacgccaugcugcagcuggaccccaacgccaagaccuggauggacaucgagggcagacccgaggaccccguggagaucgcccuguaccagcccagcagcggcugcuacauccacuucuucagagagcccaccgaccugaagcaguucaagcaggacgccaaguacagccacggcaucgacgugaccgaccuguucgccgcccagcccggccugaccagcgccgugaucgacgcccugcccagaaacauggugaucaccugccagggcagcgacgacaucagaaagcugcuggagagccagggcagaaaggacaucaagcugaucgacaucgcccugagcaagaucgacagcagaaaguacgagaacgccgugugggaccaguacaaggaccugugccacaugcacaccggcguggugguggagaagaagaagagaggcggcaaggaggagaucaccccccacugcgcccugauggacugcaucauguucgacgccgccgugagcggcggccugaacagccuggugcugagagccgugcugcccagagacaugguguucagaaccagcacccccagaguggugcugugaggacuagucccuguucccagagcccacuuuuuuuucuuuuuuugaaauaaaauagccugucuuucagaucucaaaggcucuuuucagagccaccaaaaaaaaaaaaaaaaaaaaaaaaaaaaaaaaaaaaaaaaaaaaaaaaaaaaaaaaaaaaaaaaagaauu

SEQ ID NO: 21194 - RNA, 2021 nt, Artificial Sequence
  mRNA product Design a-2 (hSL-A64-N5) comprising derived and/or modified sequence from MOPV/LASV reassortant(IGS-1;Clade IV)__AFY05578__SP-IgE_NP(2-569) (opt4)
aggagaguccgcucagccagguugcagaagcggcuuagcguguguccuaaucuucucucugcguguagguaggccugugccgcaaacaagcuuaccauggacuggaccuggauccuguuccugguggccgccgccaccagagugcacagcagcgccagcaaggagaucaagagcuuccuguggacccagagccugagaagagagcugagcggcuacugcagcaacaucaagcugcagguggugaaggacgcccaggcccugcugcacggccuggacuucagcgaggugagcaacgugcagagacugaugagaaaggagagaagagacgacaacgaccugaagagacugagagaccugaaccaggccgugaacaaccugguggagcugaagagcacccagcagaagagcauccugagagugggcacccugaccagcgacgaccugcugauccuggccgccgaccuggagaagcugagaagcaaggugaucagaaccgagagaccccugagcgccggcguguacaugggcaaccugagcagccagcagcuggaccagagaagagcccugcugaacaugaucggcaugagcggcggcaaccagggcgccagagccggcagagacggcguggugagagugugggacgugaagaacgccgagcugcugagcaaccaguucggcaccaugcccagccugacccuggccugccugaccaagcagggccagguggaccugaacgacgccgugcaggcccugaccgaccugggccugaucuacaccgccaaguaccccaacaccagcgaccuggacagacugacccagagccaccccauccugaacaugaucgacaccaagaagagcagccugaacaucagcggcuacaacuucagccugggcgccgccgugaaggccggcgccugcaugcuggacggcggcaacaugcuggagaccaucaaggugagcccccagaccauggacggcauccugaagagcauccugaaggugaagaaggcccugggcauguucaucagcgacacccccggcgagagaaaccccuacgagaacauccuguacaagaucugccugagcggcgacggcuggcccuacaucgccagcagaaccagcaucaccggcagagccugggagaacaccgugguggaccuggagagcgacggcaagccccagaaggccgacagcaacaacagcagcaagagccugcagagcgccggcuucaccgccggccugaccuacagccagcugaugacccugaaggacgccaugcugcagcuggaccccaacgccaagaccuggauggacaucgagggcagacccgaggaccccguggagaucgcccuguaccagcccagcagcggcugcuacauccacuucuucagagagcccaccgaccugaagcaguucaagcaggacgccaaguacagccacggcaucgacgugaccgaccuguucgccacccagcccggccugaccagcgccgugaucgacgcccugcccagaaacauggugaucaccugccagggcagcgacgacaucagaaagcugcuggagagccagggcagaaaggacaucaagcugaucgacaucgaccugagcaagaccgacagcagaaaguacgagaacgccgugugggaccaguacaaggaccugugccacaugcacaccggcguggugguggagaagaagaagagaggcggcaaggaggagaucaccccccacugcgcccugauggacugcaucauguucgacgccgccgugagcggcggccugaacaccagcgugcugagagccgugcugcccagagacaugguguucagaaccagcacccccagaguggugcugugaggacuagucccuguucccagagcccacuuuuuuuucuuuuuuugaaauaaaauagccugucuuucagaucucaaaggcucuuuucagagccaccaaaaaaaaaaaaaaaaaaaaaaaaaaaaaaaaaaaaaaaaaaaaaaaaaaaaaaaaaaaaaaaaagaauu

SEQ ID NO: 21195 - RNA, 2021 nt, Artificial Sequence
  mRNA product Design a-2 (hSL-A64-N5) comprising derived and/or modified sequence from LASV(LM765-SLE-2012;Clade IV)__AIT17815__SP-IgE_NP(2-569) (opt4)
aggagaguccgcucagccagguugcagaagcggcuuagcguguguccuaaucuucucucugcguguagguaggccugugccgcaaacaagcuuaccauggacuggaccuggauccuguuccugguggccgccgccaccagagugcacagcagcgccagcaaggagaucaagagcuuccuguggacccagagccugagaagagagcugagcggcuacugcagcaacaucaagcugcagguggugaaggacgcccaggcccugcugcacggccuggacuucagcgaggugagcaacgugcagagacugaugagaaaggagagaagagacgacaacgaccugaagagacugagagaccugaaccaggccgugaacaaccugguggagcugaagagcacccagcagaagagcauccugagagugggcacccugaccagcgacgaccugcugauccuggccgccgaccuggagaagcugaagagcaaggugaccagaaccgagagaccccugagcgccggcguguacaugggcaaccugagcagccagcagcuggaccagagaagagcccugcuggacaugaucggcaugagcggcagcaaccagggcgccagagccggcagagacggcguggugagagugugggacgugaagaacgccgagcugcugaacaaccaguucggcaccaugcccagccugacccuggccugccugaccaagcagggccagguggaccugaacgacgccgugcaggcccugaccgaccugggccugaucuacaccgccaaguaccccaacaccagcgaccuggacagacugacccagagccaccccauccugaacaugaucgacaccaagaagagcagccugaacaucagcggcuacaacuucagccugggcgccgccgugaaggccggcgccugcaugcuggacggcggcaacaugcuggagaccaucaaggugagcccccagaccauggacggcauccugaagagcauccugaaggugaagaaggcccugggcauguucaucagcgacgcccccggcgagagaaaccccuacgagaacauccuguacaagaucugccugagcggcgacggcuggcccuacaucgccagcagaaccagcaucaccggcagagccugggagaacaccgugguggaccuggagagcgacggcaagccccagaaggccggcagcaacggcagcaacaagagccugcagagcgccggcuucaccgccggccugaccuacagccagcugaugacccugaaggacgccaugcugcagcuggaccccaacgccaagaccuggauggacaucgagggcagacccgaggaccccguggagaucgcccuguaccagcccagcagcggcugcuacauccacuucuucagagagcccaccgaccugaagcaguucaagcaggacgccaaguacagccacggcaucgacgugaccgaccuguucgccgcccagcccggccugaccagcgccgugaucgacgcccugcccagaaacauggugaucaccugccagggcagcgacgacaucagaaagcuguucgagagccagggcagaaaggacaucaagcugaucgacaucgcccugagcaagaccgacagcagaaaguacgagaacgccgugugggaccaguacaaggaccugugccacaugcacaccggcaucgugguggagaagaagaagagaggcggcaaggaggagaucaccccccacugcgcccugauggacugcaucauguucgacgccgccgugagcggcggccugaacaccagcgugcugagagccgugcugcccagagacaugguguucagaaccagcacccccagaguggugcugugaggacuagucccuguucccagagcccacuuuuuuuucuuuuuuugaaauaaaauagccugucuuucagaucucaaaggcucuuuucagagccaccaaaaaaaaaaaaaaaaaaaaaaaaaaaaaaaaaaaaaaaaaaaaaaaaaaaaaaaaaaaaaaaaagaauu

SEQ ID NO: 21196 - RNA, 2021 nt, Artificial Sequence
  mRNA product Design a-2 (hSL-A64-N5) comprising derived and/or modified sequence from LASV(LM776-SLE-2012;Clade IV)__AIT17825__SP-IgE_NP(2-569) (opt4)
aggagaguccgcucagccagguugcagaagcggcuuagcguguguccuaaucuucucucugcguguagguaggccugugccgcaaacaagcuuaccauggacuggaccuggauccuguuccugguggccgccgccaccagagugcacagcagcgccagcaaggagaucaagagcuuccuguggacccagagccugagaagagagcugagcagcuacugcagcaacaucaagcugcagguggugaaggacgcccaggcccugcugcacggccuggacuucagcgaggugagcaacgugcagagacugaugagaaaggagagaagagacgacaacgaccugaagagacugagagaccugaaccaggccgugaacaaccugguggagcugaagagcacccagcagaagagcauccugagagugggcacccugaccagcgacgaccugcugauccuggccgccgaccuggagaagcugaagagcaaggugaccagaaccgagagaccccugagcgccggcguguacaugggcaaccugagcagccagcagcuggaccagagaagagcccugcugagcaugaucggcaugagcggcagcaaccagggcgccagagccggcagagacggcguggugagagugugggacgugaagaacgccgagcugcugaacaaccaguucggcaccaugcccagccugacccuggccugccugaccaagcagggccagguggaccugaacgacgccgugcaggcccugaccgaccugggccugaucuacaccgccaaguaccccaacaccagcgaccuggacagacugacccagagccaccccauccugaacaugaucgacaccaagaagagcagccugaacaucagcggcuacaacuucagccugggcgccgccgugaaggccggcgccugcaugcuggacggcggcaacaugcuggagaccaucaaggugagcccccagaccauggacggcauccugaagagcauccugaaggugaagaaggcccugggcauguucaucagcgacacccccggcgagagaaaccccuacgagaacauccuguacaagaucugccugagcggcgacggcuggcccuacaucgccagcagaaccagcaucaccggcagagccugggagaacaccgugguggaccuggagagcgacggcaagccccagaaggccggcagcaacaacagcaacaagagccugcagagcgccggcuucaccgccggccugaccuacagccagcugaugacccugaaggacgccaugcugcagcuggaccccaacgccaagaccuggauggacaucgagggcagacccgaggaccccguggagguggcccuguaccagcccagcagcggcugcuacauccacuucuucagagagcccaccgaccugaagcaguucaagcaggacgccaaguacagccacggcaucgacgugaccgaccuguucgccgcccagcccggccugaccagcgccgugaucgacgcccugcccagaaacauggugaucaccugccagggcagcgacgacaucagaaagcugcuggagagccagggcagaaaggacaucaagcugaucgacaucgcccugagcaagaccgacagcagaaaguacgagaacgccgugugggaccaguacaaggaccugugccacaugcacaccggcguggugguggagaagaagaagagaggcggcaaggaggagaucaccccccacugcgcccugauggacugcaucauguucgacgccgccgugagcggcggccugaacaccagcgugcugagagccgugcugcccagagacaugguguucagaaccagcacccccagaguggugcugugaggacuagucccuguucccagagcccacuuuuuuuucuuuuuuugaaauaaaauagccugucuuucagaucucaaaggcucuuuucagagccaccaaaaaaaaaaaaaaaaaaaaaaaaaaaaaaaaaaaaaaaaaaaaaaaaaaaaaaaaaaaaaaaaagaauu

SEQ ID NO: 21197 - RNA, 2021 nt, Artificial Sequence
  mRNA product Design a-2 (hSL-A64-N5) comprising derived and/or modified sequence from LASV(Mad39;Clade IV)__ANH09723__SP-IgE_NP(2-569) (opt4)
aggagaguccgcucagccagguugcagaagcggcuuagcguguguccuaaucuucucucugcguguagguaggccugugccgcaaacaagcuuaccauggacuggaccuggauccuguuccugguggccgccgccaccagagugcacagcagcgccagcaaggagaucaagagcuuccuguggacccagagccugagaagagagcugagcggcuacugcagcaacaucaagcugcagguggugaaggacgcccaggcccugcugcacggccuggacuucagcgaggugagcaacgugcagagacugaugagaaagcagagaagagacgacaacgaccugaagagacugagagaccugaaccaggccgugaacaaccugguggagcugaagagcacccagcagaagagcgugcugagagugggcacccugaccagcgacgaccugcugacccuggccgccgaccuggagaagcugaagagcaaggugaccagaaccgagagaccccugaccgccggcguguacaugggcaaccugagcagccagcagcuggaccagagaagagcccugcugaacaugaucggcaugagcggcggcaaccagggcgccagaaccggcagagacggcguggugagagugugggacgugaagaacgccgagcugcugaacaaccaguucggcaccaugcccagccugacccuggccugccugaccaagcagggccagguggaccugaacgacguggugcaggcccugaccgaccugggccugaucuacaccgccaaguaccccaacaccagcgaccuggacagacugacccagagccaccccauccugaacaugaucgacaccaacaagagcagccugaacaucagcggcuacaacuucagccugggcgccgccgugaaggccggcgccugcaugcuggacggcggcaacaugcuggagaccaucaaggugagcccccagaccauggacggcauccugaagagcauccugaaggugaagaagagccugggcauguucaucagcgacacccccggcgagagaaaccccuacgagaacauccuguacaagaucugccugagcggcgacggcuggcccuacaucgccagcagaaccagcaucaccggcagagccugggagaacaccgugguggaccuggagagcggcggcaagccccagaaggccggcagcaacaacagcaacaagagccugcagagcgccggcuucgccgccggccugaccuacagccagcugaugacccugaaggacgccaugcugcagcuggaccccaacgccaagaccuggauggacaucgagggcagacccgaggaccccguggagaucgcccuguaccagcccaucagcggcugcuacauccacuucuucagagagcccaccgaccugaagcaguucaagcaggacgccaaguacagccacggcaucgacgugaccgaccuguucgccgcccagcccggccugaccagcgccgugaucgaggcccugcccagaaacauggugaucaccugccagggcagcgacgacaucagaaagcuguucgagagccagggcagaaaggacaucaagcugaucgacaucgcccugagcaagaccgacagcagaaaguacgagaacgccgugugggaccaguacaaggaccugugccacaugcacaccggcguggugguggagaagaagaagaagggcggcaaggaggagaucaccccccacugcgcccugauggacugcaucauguucgacgccgccgugagcggcggccugaacacccuggugcugagagccgugcugcccagagacaugguguucagaaccagcacccccaagguggugcugugaggacuagucccuguucccagagcccacuuuuuuuucuuuuuuugaaauaaaauagccugucuuucagaucucaaaggcucuuuucagagccaccaaaaaaaaaaaaaaaaaaaaaaaaaaaaaaaaaaaaaaaaaaaaaaaaaaaaaaaaaaaaaaaaagaauu

SEQ ID NO: 21198 - RNA, 2021 nt, Artificial Sequence
  mRNA product Design a-2 (hSL-A64-N5) comprising derived and/or modified sequence from LASV(Z0947-SLE-2011;Clade IV)__AIT17841__SP-IgE_NP(2-569) (opt4)
aggagaguccgcucagccagguugcagaagcggcuuagcguguguccuaaucuucucucugcguguagguaggccugugccgcaaacaagcuuaccauggacuggaccuggauccuguuccugguggccgccgccaccagagugcacagcagcgccagcaaggagaucaagagcuuccuguggacccagagccugagaagagagcugagcggcuacugcagcaacaucaagcugcagguggugaaggacgcccaggcccugcugcacggccuggacuucagcgaggugagcaacgugcagagacugaugagaaaggagagaagagacgacaacgaccugaagagacugagagaccugaaccaggccgugaacaaccugguggagcugaagagcacccagcagaagagcauccugagagugggcacccugaccagcgacgaccugcugauccuggccgccgaccuggagaagcugaagagcaaggugaccagaaccgagagaccccugagcgccggcguguacaugggcaaccugagcagccagcagcuggaccagagaagagcccugcugaacaugaucggcaugagcggcagcaaccagggcgccagaaccggcagagacggcguggugagagugugggacgugaagaacgccgagcugcugaacaaccaguucggcaccaugcccagccugacccuggccugccugaccaagcagggccagguggaccugaacgacgccgugcaggcccugaccgaccugggccugaucuacaccgccaaguaccccaacaccagcgaccuggacagacugacccagagccaccccauccugaacaugaucgacaccaagaagagcagccugaacaucagcggcuacaacuucagccugggcgccgccgugaaggccggcgccugcaugcuggacggcggcaacaugcuggagaccaucaaggugagcccccagaccauggacggcauccugaagagcauccugaaggugaagaaggcccugggcauguucaucagcgacgcccccggcgagagaaaccccuacgagaacauccuguacaagaucugccugagcggcgacggcuggcccuacaucgccagcagaaccagcaucaccggcagagccugggagaacaccgugguggaccuggagagcgacggcaagccccagaaggccggcagcaacggcagcaacaagagccugcagagcgccggcuucaccgccggccugaccuacagccagcugaugacccugaaggacgccaugcugcagcuggaccccaacgccaagaccuggauggacaucgagggcagacccgaggaccccguggagaucgcccuguaccagcccagcagcggcugcuacauccacuucuucagagagcccaccgaccugaagcaguucaagcaggacgccaaguacagccacggcaucgacgugaccgaccuguucgccgcccagcccggccugaccagcgccgugaucgacgcccugcccagaaacauggugaucaccugccagggcagcgacgacaucagaaagcuguucgagagccagggcagaaaggacaucaagcugaucgacaucgcccugagcaagaccgacagcagaaaguacgagaacgccgugugggaccaguacaaggaccugugccacaugcacaccggcaucgugguggagaagaagaagagaggcggcaaggaggagaucaccccccacugcgcccugauggacugcaucauguucgacgccgccgugagcggcggccugaacaccagcgugcugagagccgugcugcccagagacaugguguucagaaccagcacccccagaguggugcugugaggacuagucccuguucccagagcccacuuuuuuuucuuuuuuugaaauaaaauagccugucuuucagaucucaaaggcucuuuucagagccaccaaaaaaaaaaaaaaaaaaaaaaaaaaaaaaaaaaaaaaaaaaaaaaaaaaaaaaaaaaaaaaaaagaauu

SEQ ID NO: 21199 - RNA, 2021 nt, Artificial Sequence
  mRNA product Design a-2 (hSL-A64-N5) comprising derived and/or modified sequence from LASV(Josiah;Clade IV)__NP_694869__SP-IgE_NP(2-569) (opt5)
aggagaguccgcucagccagguugcagaagcggcuuagcguguguccuaaucuucucucugcguguagguaggccugugccgcaaacaagcuuaccauggacuggaccuggauccuguuccucguggccgcugccacaagaguccacagcagcgccuccaaggagaucaaaucuuuccuguggacccagagccucagacgggaacuguccggcuacugcucuaacauuaagcugcaaguggucaaagacgcucaggcccugcuccacgggcuggauuuuagcgagguuuccaaugugcagcgccuuaugagaaaggaacggcgcgacgauaacgaccugaaaagacuccgggaucugaaucaggcggugaacaaucuggucgagcucaagucuacacaacaaaagagcauccugcgcgugggaacgcuuaccuccgacgaucugcucauucuggcugccgaccuugaaaaacuuaagagcaaaguuaucagaacagagcggccccucucugccggcguguauauggggaaccuguccagccagcagcuggaucagcgcagagcucuccugaauaugauuggaaugucuggcgggaaccagggagcccgggcuggccgcgacggcgucgugagaguuugggaugugaagaaugccgagcuucugaacaaucaguucgggaccaugccuucccucacacuggcgugucuuaccaaacagggacaagucgaccugaacgaugccgugcaggcucucacagaccugggccugaucuacaccgccaaguauccgaauacgagcgaccucgaucggcugacccagucucaucccauccuuaacaugauugacacaaagaaauccagccugaauaucuccggguacaacuuuucucucggagcugccgugaaggcgggcgccugcaugcuggaugggggaaacaugcuugaaaccauuaaagucagcccucaaacaauggacggcauccugaaguccauucucaaaguuaagaaagcucugggcauguucaucagcgauacccccggggagcgcaauccuuaugaaaacauucuguacaagaucugucucucuggagacggcuggcccuauaucgccuccagaacgagcauuacagggcgggcuugggagaauaccgugguggaucuggagucugacggaaagccucagaaagccgauagcaacaauuccucuaagagccuucaguccgccggcuuuacagcugggcugaccuacagccagcucaugacccugaaagacgcgaugcugcaacuugauccgaacgccaagacauggauggacaucgaaggaagacccgaggacccugucgaaauugcucucuaccagcccucuuccggcugcuauauccacuucuuucgcgagccuacggaucugaaacaguucaagcaggacgccaaguacagccauggcauugaugugaccgaccuguuugccacacaacccgggcucaccucugcuguuaucgaugcccugccgcggaauauggugaucacaugucagggauccgacgauauuagaaaacuucuggaaagccagggccgcaaggacaucaaacucauugauaucgcgcuguccaagaccgacucucggaaauaugagaacgcugucugggaucaguacaaggaccugugccacaugcauacgggggugguuguggagaagaaaaagagaggaggcaaagaagagauuacaccucacugugcccuuauggauugcaucauguucgacgccgcugucagcgggggccucaauaccuccgugcugcgcgccguccugccccgggacaugguguuuagaaccucuacaccucgcguugugcucugaggacuagucccuguucccagagcccacuuuuuuuucuuuuuuugaaauaaaauagccugucuuucagaucucaaaggcucuuuucagagccaccaaaaaaaaaaaaaaaaaaaaaaaaaaaaaaaaaaaaaaaaaaaaaaaaaaaaaaaaaaaaaaaaagaauu

SEQ ID NO: 21200 - RNA, 2021 nt, Artificial Sequence
  mRNA product Design a-2 (hSL-A64-N5) comprising derived and/or modified sequence from LASV(LP;Clade I)__AAF86702__SP-IgE_NP(2-569) (opt5)
aggagaguccgcucagccagguugcagaagcggcuuagcguguguccuaaucuucucucugcguguagguaggccugugccgcaaacaagcuuaccauggacuggaccuggauccuguuccucguggccgcugccacaagaguccacagcagcaacuccaaggagaucaaaucuuuccuguggacccagagccucagacgggaacuguccggcuacugcucuaauauuaagcuccaaguggucaaagacgcccaggcucugcuccacgggcuggauuuuagcgagguuuccaacgugcagcgccuuaugagaaagcagaaacgggacgaugccgaccugaagcgccucagagaucugaaucaagcggugaacaaucuggucgaacucaagucuacacagcagaaaaacgugcugcggguuggaacgcuuagcuccgacgaucugaucacccucgcugccgaccuggagaaacuuaaaagcaaggugauucgcacagaaagaccccugucuuccggcgucuauauggggaaucucagcucucagcaacuggaucagcggcgcgcccugcucuccaugaucggaaugagcggcgggccucagggaaacagaaccggcggcgacggggugguucgggugugggaugucaaaaaugcugagcugcuuaacaaucaguucggaacaaugccgucucugacccucgccugucugacaaagcaaggccagguggaccuuaacgaugcugugcaggcccugaccgaccucgggcugauuuacacggcgaaguaucccaauuccagcgaccuggauaugcucacccaaucccauccuauccugggaauggucgacacaaagaagucuagccuuaacaucuccggcuacaauuuuagccugggggccgcuguuaaagccggagcuugcaugcucgauggcggcaacaugcuggagaccauuaaggugucuccccagacaauggacgggauccuuaaauccauucugaaggugaaacgcagccucggaauguucaucucugauaccccuggcgaaagaaaccccuaugagaauauucuguacaagaucugucugagcggggaaggauggccuuauauugccucccggacgucuaucacaggccgcgcgugggagaacacccucgucgaccuggagagcgauaauaagccgcccaaacuuaacuccgccgggagcaauaagucucugcaggcugccggacucaacgcuggccugacauacucccagcugaugacccuuaaagacugcaugcuccaacuggauccuagcucuaagaccuggaucgacauugaaggcagacccgaggauccuguggaaaucgcccuguuucagcccuccagcggguguuacauucacuucuuucgggagccgacagaccucaaacaguucaagcaggacgccaaguauucccauggaaucgauguuacggaccuguuuucuacccaaccuggccuuacaagcgcugugauugaagcgcugcccagaaauaugguccuuaccugccagggguccgaugacaucaaaaagcugcuggagucucagggacgccgggauaucaaacuuauugacaucagccucuccaaggccgauagcagaaaauucgagaacgcugugugggaccaguacaaggaucugugucacaugcauacaggcguuguggucgaaaagaaaaagcgcgggggcaaagaggaaauuaccccucacugcgcccugcucgacuguaucauguuugaugccgcuacgacaggaucucugaauauuaccacccuucgggccgugcugcccagagacauggucuuccgcacauccacccccaaggugguucucugaggacuagucccuguucccagagcccacuuuuuuuucuuuuuuugaaauaaaauagccugucuuucagaucucaaaggcucuuuucagagccaccaaaaaaaaaaaaaaaaaaaaaaaaaaaaaaaaaaaaaaaaaaaaaaaaaaaaaaaaaaaaaaaaagaauu

SEQ ID NO: 21201 - RNA, 2021 nt, Artificial Sequence
  mRNA product Design a-2 (hSL-A64-N5) comprising derived and/or modified sequence from LASV(803213;Clade II)__AAF86704__SP-IgE_NP(2-569) (opt5)
aggagaguccgcucagccagguugcagaagcggcuuagcguguguccuaaucuucucucugcguguagguaggccugugccgcaaacaagcuuaccauggacuggaccuggauccuguuccucguggccgcugccacaagaguccacagcagcgccuccaaggaggugaaaucuuuccuguggacccagagccucagacgggaacuguccggcuacugcucuaacaucaaacuucaagucguuaaggacgcucaggcccugcuccacgggcuggauuuuagcgaggugaauaacgugcagcgccuuaugagaaagcagaaacgggacgauggagaccugaagcgccucagagaucugaaucaagcggucaacaaucugguggaacucaaguccacacagcagaaaucuauucugcggguuggcacgcuuaccagcgacgaucugcucacacuggcugccgaccuugagaagcugaaauccaaggugauccgcaccgaaagaccccucagcucuggggucuauaugggaaaccuguccacacagcaacuggagcagcggcgcgcccuccugaauaugauuggcauggugggaggagcucagggcacccagccuggcagagaugggguugugcgggucugggacgugaaaaacccggaucuucugaauaaccaauucggaacaaugcccagccucacccuggccugucuuacgaagcagggccagguggaccugaaugaugcuguccucgcccugaccgaccuggggcucaucuacacagcgaaguauccuaacucuuccgaccuggaucgccuuagccaaucucaucccauucugaauaugguugacaccaaaaaguccagccucaacaucuccggauacaauuuuucucugggcgccgcugugaaagccggggcuugcaugcuugauggaggcaacaugcuggagacaaucaaggugaccccucagacgauggacggcauucucaaaagcauccugaaggucaaaagaucccuggggauguucgugagcgauacacccggagaacggaacccuuaugagaauauucucuacaagaucugucugucuggcgacggguggccguauauugccucccgcaccagcaucguugggagagcgugggaaaacacaaccguggaucuugagucugacggcaagccccagaaagucgggaccgccggaagcaauaagucccugcagucugcuggcuuuccuacaggccucacguacagccaacugaugacccugaaagauuccaugaugcagcuugaccccagcgccaagacauggauugauaucgaggggcggccugaagaccccguggagaucgcucucuaccagccgaugucuggaugcuauauucacuucuuuagagaaccuaccgaccugaaacaguucaagcaagaugccaaguacucccauggcaucgacguugccgaucuguuucccgcucagccugggcucacaagcgcggugauugaggcccugccccgcaacaugguccuuaccugucagggaucugacgauaucaaaaagcugcucgacucccagggccggagagauauuaaacugaucgacaucagccuguccaagguggauucucgcaaauucgaaaaugcugucugggaccaaugcaaggaucuuugucacaugcauacgggggugguuguggagaagaaaaagcggggcggaaaagaggaaauuacaccccacugcgcccucauggacuguaucauguuugaugccgcugucagcggcgggcugaacauuccugugcugagagccguucucccgcgcgacaugguguuccggaccuccucucccaaggucgugcugugaggacuagucccuguucccagagcccacuuuuuuuucuuuuuuugaaauaaaauagccugucuuucagaucucaaaggcucuuuucagagccaccaaaaaaaaaaaaaaaaaaaaaaaaaaaaaaaaaaaaaaaaaaaaaaaaaaaaaaaaaaaaaaaaagaauu

SEQ ID NO: 21202 - RNA, 2024 nt, Artificial Sequence
  mRNA product Design a-2 (hSL-A64-N5) comprising derived and/or modified sequence from LASV(GA391;Clade III)__CAA36646__SP-IgE_NP(2-570) (opt5)
aggagaguccgcucagccagguugcagaagcggcuuagcguguguccuaaucuucucucugcguguagguaggccugugccgcaaacaagcuuaccauggacuggaccuggauccuguuccucguggccgcugccacaagaguccacagcagcgccuccaaggaggugagaucuuuccuguggacccagagccuccggcgcgaacuguccggcuacugcucuaacaucaaacuucaagucguuaaggacgcucaggcccugcuccacgggcuggauuuuagcgagguguccaaugugcagagacuuaugcggaaacagaagcgcgacgauggagaccugaaaagacuccgggaucugaaccaagcggucaauaaccugguggaacucaagucuacacagcagaaaagcguucugcgcgugggcacgcuuuccagcgacgaucugcucauucuggcugccgaccuugagaaacugaagucuaaagucaccagaacagaacggccccucuccagcgggguguauaugggaaaucugucuucccagcaacuggaucagcgcagagcccuccugaacaugaucggcaugaccgggguuagcggaggcggcaagggggcuucugacggaauugugcgggucugggaugugaaaaaugccgagcuucugaacaaucaguucggcacaaugccuucccucacccuggcuugucuuacaaagcaggggcaaguggaccugaacgaugccguccaggcgcucaccgaccugggacugaucuacacggccaaguauccgaauagcuccgaccucgaucgccugucucagagccaucccauucuuaacaugaucgacaccaaaaaguccagccugaauaucucuggcuacaacuuuucccucggggcugccguuaaagcuggagccugcaugcuggauggcggcaauaugcuugagacaauuaaggugagcccucaaaccauggacgggauccugaaaucuauucucaaggugaaaaagagccugggaauguucgucuccgauacacccggcgaaagaaacccuuaugagaacauccuguacaagauuugucucucuggggacggauggcccuauaucgcgagccggaccuccauugugggccgcgccugggaaaauacgguuguggaucuggagcaggacaacaaaccucagaagaucgggaauggaggcagcaacaaaucucuucaguccgcuggcuuugccgcugggcugacauacagccaacucaugacccugaaggauuucaaaugcuuuaaucugaucccgaacgccaagacauggauggacauugagggaagacccgaagauccugucgagaucgcccuuuaccagcccucuuccggcuguuaugugcacuucuuucgggaaccuaccgaccucaagcaguucaaacaggacgcuaaguacagccaugggauugauguuaccgaccuguuugcggcccaacccggacugacauccgcugugaucgaggcccucccgagaaauauggucauuacgugccagggcucugaagauauccgcaaacugcuugagagccaggggcggagagacaucaagcugauugauaucacccucuccaaagccgacucucgcaaguucgagaacgcugugugggaucaguuuaaggaccugugucacaugcauacaggcgucgugguugaaaagaagaaacggggaggcaaggaggaaauuaccccucacugcgcccugauggauuguaucauguucgacgcggcugugagcgggggacuugaugccaaaguccucagagugguucugccccgcgacaugguguuccggacauccaccccuaaggucgugcugugaggacuagucccuguucccagagcccacuuuuuuuucuuuuuuugaaauaaaauagccugucuuucagaucucaaaggcucuuuucagagccaccaaaaaaaaaaaaaaaaaaaaaaaaaaaaaaaaaaaaaaaaaaaaaaaaaaaaaaaaaaaaaaaaagaauu

SEQ ID NO: 21203 - RNA, 2021 nt, Artificial Sequence
  mRNA product Design a-2 (hSL-A64-N5) comprising derived and/or modified sequence from LASV(AV;Clade V)__CCA30315__SP-IgE_NP(2-569) (opt5)
aggagaguccgcucagccagguugcagaagcggcuuagcguguguccuaaucuucucucugcguguagguaggccugugccgcaaacaagcuuaccauggacuggaccuggauccuguuccucguggccgcugccacaagaguccacagcagcgccuccaaggaggugaaaucuuuccuguggacccagagccucagacgggaacuguccggcuacugcucuaacaucaaacuucaagucguuaaggacgcucaggcccugcuccacgggcuggauuuuagcgagguguccaaugugcagcgccuuaugagaaagcagcggcgcgacgauucugaccugaaaagacuccgggaucugaaccaagcggucaauaaccugguggaacucaagagcacacagcagaaguccguucugcgcgugggaacgcuuagcucugacgaucugcucacccuggcugccgaccuugagaaacugaaguccaaagucacaagaaccgaacggccccucagcucuggcguguauauggggaaucuguccagccagcaacuggaucagcgcagagcccuccugaaccuuauuggaaugacaaauggcucucaggggucccaggcuggacgggacggcguugugcgcgucugggaugugaagaacgccgagcugcucaauaaccaauucggcaccaugccuagccugacacuugcuugucugaccaaacagggacagguggaccucaaugaugucguucaagcccugacggaccuggggcucaucuacaccgcgaaguauccgaacacauccgaccuggauagacuuacccagucucaucccauucugaauaugaucgacacaaagaaaagcucccucaacauuagcggcuacaauuuuucucugggggccgcugugaaggccggagcuugcaugcuugauggcgggaacaugcuggagaccaucaaaguguccccucagagcauggacggaauccucaagucuauucugaaagucaagcgggcccugggcauguucgugagcgauacgcccggcgaacgcaacccuuaugagaauauccucuacaaaauuugucuguccggggacggauggcccuauaucgcgucuagaacaagcauuguuggccgggccugggaaaacaccguggucgaucuugagacagacgggaagccucagaagaucggauccggcaauagcaacaaaucucugcaauccgcuggguuuagcgccggacucaccuacucucagcugaugacccugaaggaugcuaugcuucagcucgacccgaaugccaaaacauggauggauauugagggcagacccgaagacccuguggagguugcccuguaccagcccaucuccggcugcuauauccacuucuuucgcgaaccuacggaccugaagcaauucaaacaggaugcuaaguacagccaugggauugacaucgcggaucucuuugccgcucagcccggacugaccuccgccgugauugaggcccuuccgcggaacauggucaucacaugucagggcucugaagacauuaagaaacugcucgagagccaagggagaaaggauaucaaacugaucgacauugcucuguccaagaucgauucucgcaaauucgagaaugccgugugggaccaguauaaggaucuuugccacaugcauaccggagucgugguugaaaagaaaaagcggggcgggaaagaggaaauuacaccucacugugcgcucauggacugcaucauguuugaugcugccgugagcggcggacugaacacccugguccucagagccgugcugccccgcgacaugguuuuccggacguccacaccuagagugguccuuugaggacuagucccuguucccagagcccacuuuuuuuucuuuuuuugaaauaaaauagccugucuuucagaucucaaaggcucuuuucagagccaccaaaaaaaaaaaaaaaaaaaaaaaaaaaaaaaaaaaaaaaaaaaaaaaaaaaaaaaaaaaaaaaaagaauu

SEQ ID NO: 21204 - RNA, 2021 nt, Artificial Sequence
  mRNA product Design a-2 (hSL-A64-N5) comprising derived and/or modified sequence from LASV(Togo/2016/7082;Clade VI)__AMR44578__SP-IgE_NP(2-569) (opt5)
aggagaguccgcucagccagguugcagaagcggcuuagcguguguccuaaucuucucucugcguguagguaggccugugccgcaaacaagcuuaccauggacuggaccuggauccuguuccucguggccgcugccacaagaguccacagcagcaacuccaaggaggugaaaucuuuccuguggacccagagccucagacgggaacuguccggcuacugcucuaauaucaaacuucaagucguuaaagacgcccaggcucugcuccacgggcuggauuuuagcgagguguccaacgugcagcgccuuaugagaaagcagaaacgggacgauggagaccugaagcgccucagagaucugaaucaagccgucaacaaucugguggaacucaagucuguucagcagaaaagcauucugcgggugggcacacuuacguccgacgaucugcucacccuggcggcugaccuugagaagcugaaaagcaaggucacacgcaccgaaagaccccucucuuccgggguguauaugggaaaccugagcucucagcaacuggaucagcggcgcgcccuccuguccaugaucggcaugagcgggggaaaucagaacucucagccuaaaggcgacggcguugugagagucugggaugugaagaaugccgaccuucugaacaaucaauucgggacaaugccgucccucacccuggcuugucuuacaaagcagggacagguggaucugaacgacgccguccaagcucucaccgaccugggccugauuuacacggccaaauaucccaauagcuccgaucucgaccggcugucucagagccauccuauccuuaacaugauugauaccaagaaauccagccugaauaucucuggguacaacuuuucccucggagcggccaucaagacaggcgcuugcaugcuggacgggggaaacaugcuugagaccauuaaaguuacaccccagaccauggauggcauccucaagagcauucugaaagugaagcgcucucugggcauguucaucagcgacacgccuggggagagaaaucccuaugaaaacauucuguacaagaucugucucuccggagauggcuggccuuauauugccucucggacagcuaucaucgggcgcgccugggagaauaccguggucgaccuggaaagcgauuccaaaccgcagaagauuggaagcaacggcucuaauaaaucccuucaaagcgcgggguuugcccccggacugacauacucucagcucaugacccugaaggacuccaugcugcagcuugauccuaacgcuaaaaccuggaucgacauugagggcagacccgaggacccuguggaaguugcccucuuccagcccaucagcggcugcuacauucacuuuuuccgggagccgacagaucugaagcaauuuaagcaggacgcuaaauauucccaugggaucgaugugacggaccuguucgccgcccagccuggacucaccucugcugucaucgaagcgcugcccagaaauauggugcuuacaugucagggcagcgaugacauuaagaaacugcucgauucccaagggcgccgggacaucaagcugauugauguuucucugaacaaaaucgacagcagaaaguuugagaaugccgugugggaucaguacaaggaccuuugccacaugcauaccggagucguggucgaaaagaagaaaaagggcgggaaagaggagauuacaccucacugugcucuccuggauugcaucauguucgacgccgccguguccggcggacugaacgcuaccguucuccgcgccgugcugccccgggacauggucuuuagaacgagcucucccaaggugguucuuugaggacuagucccuguucccagagcccacuuuuuuuucuuuuuuugaaauaaaauagccugucuuucagaucucaaaggcucuuuucagagccaccaaaaaaaaaaaaaaaaaaaaaaaaaaaaaaaaaaaaaaaaaaaaaaaaaaaaaaaaaaaaaaaaagaauu

SEQ ID NO: 21205 - RNA, 2021 nt, Artificial Sequence
  mRNA product Design a-2 (hSL-A64-N5) comprising derived and/or modified sequence from LASV(KAK-428;Clade n.d. (VII))__ANH09741__SP-IgE_NP(2-569) (opt5)
aggagaguccgcucagccagguugcagaagcggcuuagcguguguccuaaucuucucucugcguguagguaggccugugccgcaaacaagcuuaccauggacuggaccuggauccuguuccucguggccgcugccacaagaguccacagcagcaacuccaaggaggugaaaucuuuccuguggacccagagccucagacgggaacuguccggcuacugcacaaauaucaaacuucaagucguuaaggacgcccaggcucugcuccacgggcuggauuuuucugaggugagcaacgugcagcgccuuaugagaaagcagaaacgggacgauaaugaccugaagcgccucagagaucugaaccaagccgucaauaaccugguggaacucaaguccguucagcagaaaucugugcugaaggucggaacgcuuaauagcgacgaucugcucacccuggcggcugaccuugagaaacugaaguccaaagugguucggacagaacgcccccucagcucuggcguguauauggggaaccuguccagccagcaacuggaucagagacgggcccuccugaauaugauuggaauggccggcgggucucagggaaaccagccuucccgcgacggcgucgugagagugugggaugucaagaaugcugaccuucugaacaaucaauucggcaccaugccgagccucacacuggccugucuuaccaagcaggggcagguugaucugaacgacguggugcucgcucugacagaccugggacucaucuacaccgccaaauaucccaauucuuccgaucuggaccggcuuagccaaaaccauccuguccugaacaugauugaugugaauaaguccucucucaacaucagcggcuacaauuuuucccugggggcggccguuaaagcuggagccugcaugcuugacggcgggaacaugcuggagacgauuaagaucagcccccagaccguggauggaauccucaaaucuauucugaaggucaaacgcgcucugggcauguucguguccgacacaccuggcgagagaaaucccuaugaaaacauccucuacaagguuugucugagcgggaauggauggccuuauauugccucucggaccagcaucgugggccgcgcgugggagaacacagucguggaucuugaauccaauaagaaccagccgaaagucgggaauaacggaucuaauaagaugcugcagagcuccggcuuugccaccgggcucacguacagccaacugaugacacugagagacucuaugcuucagcucgaucccaccgcuaaaacauggauugacaucgagggacggccugaggaucccguggaacuggcccuguuccagccuuccagcggcugcuacauucacuuuuucagagagcccaccgaccucaagcaguuuaaacaagacgcuaaguauucucauggcaucgauguuaacgaccuguucuccgcccagccggggcuuaccagcgccgugcuggaagcucucccucgcaauaugguccugacaugucagggauccgaugacauccggaagcugcuugauucucaggacagaaaagauauuaagcucaucgacauuagccuguccaaagcggaugcccgcaaguuugagaacgacgugugggaucaauucaaagaccugugccacaugcauacgggcaucguuguggaaaagaagaaaaagggagggaaacaggagaugacaccccacugugcucuccuggauugcauuauguuugacgccgccgucucuggcgggcuuaacgugccuacccugcgggcugugcuccccaccgacaugguuuucagaacaaucaccacgaaggucgugcugugaggacuagucccuguucccagagcccacuuuuuuuucuuuuuuugaaauaaaauagccugucuuucagaucucaaaggcucuuuucagagccaccaaaaaaaaaaaaaaaaaaaaaaaaaaaaaaaaaaaaaaaaaaaaaaaaaaaaaaaaaaaaaaaaagaauu

SEQ ID NO: 21206 - RNA, 2021 nt, Artificial Sequence; identical to SEQ ID NO: 21200
  mRNA product Design a-2 (hSL-A64-N5) comprising derived and/or modified sequence from LASV(Pinneo-NIG-1969;Clade I)__AIT17837__SP-IgE_NP(2-569) (opt5)

SEQ ID NO: 21207 - RNA, 2021 nt, Artificial Sequence
  mRNA product Design a-2 (hSL-A64-N5) comprising derived and/or modified sequence from LASV(ISTH0009-NIG-2011;Clade II)__AIT17405__SP-IgE_NP(2-569) (opt5)
aggagaguccgcucagccagguugcagaagcggcuuagcguguguccuaaucuucucucugcguguagguaggccugugccgcaaacaagcuuaccauggacuggaccuggauccuguuccucguggccgcugccacaagaguccacagcagcguguccaaggaggucaaaucuuuccuguggacccagagccucagacgggaacuguccggcuacugcucuaacaucaaacuucaaguugugaaggacgcccaggcucugcuccacgggcuggauuuuagcgagguguccaauguccagcgccuuaugagaaagcagaaacgggacgauucugaccugaagcgccucagagaucugaaccaagccgugaauaaccugguugaacucaagagcacacagcagaaauccauucugcgggugggaacgcuuaccagcgacgaucugcucacacuggcggcugaccuugagaagcugaaaucuaaggucauccgcaccgaaagaccccucuccagcggcguguauauggggaaucugucuacacagcaacuggagcagcggcgcgcccuccugaacaugauuggaaugguuggcggggcccagggaacccagccuggcagagauggcgugguccgggugugggacgugaaaaauccggaucuucugaacaaucaauucgggacaaugcccucccucacccuggcuugucuuacgaagcagggacaggucgaccugaacgaugccguucucgcucugaccgaccugggccucaucuacacagccaaguauccuaauagcucugaccuggaucgccuuucccaaagccaucccauucugaacaugguggacaucaaaaaguccucucucaauaucagcggguacaacuuuucccugggagcggccgugaaagcuggcgccugcaugcuugaugggggaaauaugcuggagaccauuaaggucacaccucagaccauggacggcauccucaaaagcauucugaaggugaaaagaucucugggcauguucguuuccgauacgcccggggaacggaacccuuaugagaacauccucuacaagauuugucugagcggagacggcuggccguauaucgcuucucgcacaagcauuguggggagagccugggaaaauaccacagucgaucuugaguccgacggaaagccccagaaagugggcucugcggggagcaacaagucccugcagagcgccggauuuccuaccggccucaccuacucucaacugaugacacugaaagauuccaugaugcagcuugaccccagcgcuaagacguggaucgauaucgagggccggccugaagaccccguugagauugcccucuaccagccgaugucugggugcuauauccacuucuuuagagaaccuaccgaccugaaacaguucaagcaagaugcuaaguacucccauggaauugacguggccgaucuguuucccgcccagccuggccucacaagcgcugucaucgaggcgcugccccgcaauauggugcuuaccugucagggguccgacgauauuaaacggcugcucgacucucagggaagacgcgauaucaagcugaucgacauugcccugagcaaagcugauucccggagauucgaaaacgccgucugggaccaaugcaaggaucuuugucacaugcauacaggcgugguuguggagaaaaagaagcgcgggggcaaagaggaaaucacgccccacugcgcccucauggacuguauuauguaugaugcugccgucucuggaggccugaauaucccugugcugcgggcgguucucccgagagacaugguguuucgcaccagcucccccaaggucgugcugugaggacuagucccuguucccagagcccacuuuuuuuucuuuuuuugaaauaaaauagccugucuuucagaucucaaaggcucuuuucagagccaccaaaaaaaaaaaaaaaaaaaaaaaaaaaaaaaaaaaaaaaaaaaaaaaaaaaaaaaaaaaaaaaaagaauu
